United States Patent Application Publication US 2007/0161031 A1 - sequence listing, part 32

SEQ ID NO: 40549 - DNA, 2300 bp, Homo sapien
aagcataactgtagcacatttaaatgttaagtagccaccccaaagtgaacatgggtcatatgttacgtgcatgtttgttcaataggcatgtgtcaggaccaccttcatgaatattcatagctcctcctgtaaccagttaaatatatatgtttagccaacctcttcagcataaagctcccaccccaagccctcctttgaagggcctgtctctagttttgcctggatggccaccttgcaggctgtaaccctttggaagaaataaagtctcctctctccttttcaaaacttaaaaattgtgaatttttatttttattttatgtatttaacttttaagtttaggacacatgtgcaggtttgttatataggtaaattcacatcatgggggtttgttgtacagattatttcatcaccaagctattaagcccagtaattattagtcattttttctgatcgtctccctcctcacccactctgccctccagcaggccccagtatccgttgttcccctctatgtgtccatgtgttctcatcatttagctcccacttataagtgagaacatgctgtatttgcttttctgttgctaaggataatggcccccagctccatccatgttcctgcaaaggatatgatctcattcttttttatggctgcatagaatttcatggtgtatataccacattttctttatgcagtctaccactgatggacatttaggttgattccatgtctttgctattgtgaacagtgctgcaatgaacataagcgtgcatgtgtctttatgacagagtgatttatattcctttgggtatatacacagtaatgggattgccagatcctatggtagttctgtctttgaggaactaccacactgatttccaaaatacatgtggccaacaagcatatgaaaaaaagctcaatgacactgatcattagagaaatgcaaatcaaaactacaatggattttttaagttaataatgtgaacaggctgagtatgagggacatggtggcccaagcttgagtatatatatggaaccgttctggcgaggggagttgtacaatgaagacaatttgtgcagggcttctcattgcaggtggaggatatgacttcgtcacaaagacaaccattaagagttttgaacagagtaaaagctggagaggtctgtgttttagggaggtggaaatggggatgatggactggaagggtaaaaaaccagagattggttttgaagctgctgtacccattccagagaagtgttgcattgacagagcacacaagtcctcgaataggaccgtggttagaacggccgatatttatcagtgggaatggtaaacatttatcaagtgagcaaccaagttcagttacttaatctgagtctcattatgtcttctataaaatacacattaaaaatagaaagtaaaaacgtgggtaaagtacccagtggatggtcattactcagaaaaaggtattttaaaagtttctcccttattctttctgagtacagcctgtagtacttgaaccacttctctttcgtcccctaccacgctgttctgcaatctctttttacctgtctcactctcttcctgtactgtgtgcctcatcgggacttctaaaggcttacggcctaggtctttgtattccgtgtctctggcacgcgcctctgcacacagcaggcctgaaccaaaacttgtgagcaaataggatgtaagggggtgaaggaggtgggcgcgaaacgggttcgaggtcgcgcactccgccggtttctgccgccagcccaaccccgctgggtcgtacctaagagatcgccggtgtcagagcgcagcgggcaccttcacaagcatcttgagggacaagcagagtcgctcctcccgcagggcgcgggctaagaagtgaggaacccaaggggctcccgtccaactaagaagcgaaatcccccacctccaggccttcagggctggttcttgggaaatcctaactctttcccttctaaccccttccttggcccttcttcctgcccgggaggatcaagggcgctgttttccagaagctgccgggtcggaaacggtgggggaacggggcggtacgcgtgggtggaggataggcggggagggggcagtccacgaacttttgtcattcagcctgggagaccacggtgacattcctgtctgcgctgcgggcaggccagcctctccggccctggactagggggcgccgccgagagaagccgccgcaggctgcagagtcgccgaccgcgctgttcgcaggcagaccccgggctgcccaccgcggcctagcgcgcg

SEQ ID NO: 40550 - DNA, 2300 bp, Homo sapien
attgcatctaccaagaggaatggtgccttagggtccttcatatgcatcatttccctgtcttgtgaaaaatgtttttggaattttgcataacggttaggcctcccggctctctttaacgtgaaattatcactgagtttccagtagacatgagaaatgtaagaagaaccaaagaagaggctattaatgggtaatggcacatgaaagtcatgagtcaatacaaggaaataggccaaacagagctggcatattctgaaattgatatgtgttaatgttggtatgtgatcttatagatattaaaacaggtacacttataagctatccatgtggatatgtaaatttgtggtttatttgctccagaatgcataaaatttgctccagagtgtataaaatacttattctataaaacagagaatttcgactctttcaatcaataatattcctttacaacattcacaactttcggtatactccagaagaccacattgttggagaagatgctcactgagtttgcagaatgaaatctatttttctagcaaaagacatttctcaagatcataagagagttccctttgcaaaactcctcagattatctgttgtggttaaacacttattccaccctgtagatagctgtttctatttccaagtatctctgcaatatagtcattcaaagagcaacacacatgctccaatctacacctccacatccactgtttcagataaatgataaagtagcactcactgaagaccttgaagattcatgcaccactaacagacagatgccatcctgttggcagctgtatatggctccctgaatacattgttctgatccaatactcaaaaacaggctttggggctgtaaaacacagacagtaattgtcatctgtaagggatgagtaaggggcttcagcccttgctaagggcagaaattgcaaagtttgcttctatcattagaaagtttacttgcatcatttgacagtgctaacttatttttttcagctcagtgctgataaatgcattagatgtctctaacactcaggtcatcattcggcaactgtttgaaaccctggcagtgatacaccgtaggaggtgctcagtgttagctgcaataatgtctttgatgggctaattaattaattaattgtggaaaatctgaaaatcattgaaatcattcatgagaacagacaaggagaaaaaaacctacagatacaaggaccatttaccaggggtaatgtttagcacagtaattccattaatttatgcccctataagataggagcaggttttataatcaatccaaacaaaaggaaaggcaagtggggaagaatgacagactgcagagagagaagaaatttctcattttccaaattatttgtgtcttattttctaactgcataatactcagcttttaacaaagatggatcacaaggtttcttttaaataattttgcaaaataatccagaaattgtaaccaaaagagatttattgagaatcttctcttgcttggggtggtgggggtgacacagagcagtcaggctaggacactgctttccatgagcatccaggggactgctgggccctcctggcccccactaagtctgtaccgtattagtatttagaaagggtttcctgcttataaaggaaggatttggactaacctcttggcccctttccagctctaaatttccttaattccttcgaaacctgggatgtgcgtggtactggagataaagatgccgagctcctcggaagatgagtctgccctcagggagactgtatctccctgaacagacaggacatagaccagaaaacatatgtgaatcccagaaagtatctgtcaaatcaaaatgatgtggccatggaagtaaattctaaaatgtggtcacgcttacttccttctctgatggacgagctttatcgtgaccatcagttgtgaatcagcaattcagaagcccaaaccagctgacactaccctgtaattccacctgacccacttggagtcctaaggacttttcactggaaatccagtgtcttttttgtctcctttgagaaaaactgttcactcctaaacagaagaactaatgataactttaagaggatttgggccgggcgcggtggctcacgcctgtaatcccagcactttgggaggccgaggcgggaaaatcatgaggtcaggagatcgagaccatcctggctaacaaggtgaaaccccgtctctactaaaaatacaaaaaattagccgggcgcggtggcgggcgcctgtagtcccagctactcgggaggctgaggcaggagaatggctt

SEQ ID NO: 40551 - DNA, 2300 bp, Homo sapien
atggccatactgcccaaggtaatttatagattcagtgccatccccatcaagctactttaaagttcaaaaaactactttaaagttcatatggaaccaaaaaagagcccacattgccaagacaatcctaagccaaaagaacaaagctggaggcttcatgctacctgacttcaaactatactacaagactacagtaaccaaaacagcatggtactggtaccaaaacatagatatagaccaatggaacagaacagagccatcagaaataataccacacatctacaactatctgatctttgacaaacctgacaaaaacaagaaatggggaaaggattccctatttaataaatggtgctgggaaaactggctagccatatgtagaaagctgaaactggatcccttccttacaccttatacaaaaattaattcaagatggatcaaagacttaaatgctagacctaaaaccataaaaaccctagaagaaaacctaggcaataccatttaggacataggcatgggcaaggacttcatgtctaaaacaccaaaaacaatggcaacaaaagccaaaattgacaaatgggatctaattaaactaaagagcttctgcacagcaaaataaactaccgtcagagtgaacaggcaacctacagaatgggagaaaatttttgcaatctactcatttgacaaagggctaatatccagaatctacaaagaactcaaacaaatttacaagaaaaaaccccatcaaaaagtgggcgaagaatatgaacagacacttctcaaaagaagacatttatgcagtcaacagacacatcaaaaaatgctcatcatcactggccgtcagagaaatgcaaatcaaaaccacaatgagataccatctcacaccagttagaattgcaatcattaaaaagtcaggaaccaacaggtgctggagaggatgtggagaaataggaacacttttacactgttggtgggactgtaaactagatcaaccattgtgggagacagtgtggcgattcctcagggatctagaactagagataccatttgacccagccatcccattactgggtatatacccaaaggattataaatcatgctgctataaagacacatgcacacgtatgtttattgcggcactattcacaatagcaaagacttggaaccaacccaaatatccaacaatgatagactggattaggaaaatgtggcgcatatacaccatggaatactgtgcagccataaaaagtgatgagttcatgtcctttgtagggacatggatgaagctggaaaccatcattctcagcaaactatcgcaaggacagaaaaccacacacctcatgttctcactcataggtgggaattgaacaatgagaacacatggacacaggaaggggaacatcacacatgggggcctgttgtggggtggggggatgggggagggatagcattaggagatatacctaatgtaaatgacgagttaatgggtgcagcacaccaacatggcacatgttgtaacaaacctgcacgttgtgcagatgtaccctagaacttaaagtatatataaaaaaagaaatacaagtcttagatcttgttcatgggcttctgaagaacaaacttgaagtgtctcaaaaagatttaaaatttctcatatagaattgaaaattcttcccaaatggaaaatttttatacatttctgatttattacggaaataattgaggggataggtagacaaaatttttttccagtttttttccttgattctctaatgcatgcattatgactgacaaggatttctacttttccccccctttattcctttctgggtttattgctgactctaaaacttggttactccaaggagtacctgaagatccaggaacggtttggaaagtgctgcatgaatcattaacactgcttgatagtgggtgtgacagccacttattaaacatatcccctctcatcacagtagcatttgctactgggaccatgttcagaatctgaccagggatggcccctttcccatccttctctggtcccagcctttgcagaggagagcatctgtgaagtcgagataatgccaccattgtgtattgtgcattgtgaacacccttctcttcccacagaaccatctaaattacaaccaaaggtaaagcagtgccctgtttcctatcttttttttttttttttgagacggagtttcgctcatctcccaggctggagtgcaatggtgtgatctcgatacttttagtgattattacatagagatataatgtcttttgtagtaattattgcttatgca

SEQ ID NO: 40552 - DNA, 2300 bp, Homo sapien
gagccactgtacccggccctgtttttttttttttttttttaacttaagttcgtaagtttctctaatcattgtctcttcatgctctttataacttgttcttggttaatatttaaaatatctgagaactgcagtgacttttcaataaactctaaaatagctatcaataaaaatgctgaggcaactaatacaaattagtccttttgatagctttctgtaacacacggctaaagtcacccaaagtaacttatctctgtggtcaacagtggctcagaaaagcacttgatatagtaattgagtgtctggaatactgtcagattatcacccctggaattaaagctctaagtagctagaacatatacaatctgagtatcagaaattgaagtattcctactcattcactaaataacttgcaaacatttttgttaggttctatggaaggtacaaaaaggataccttcctcctcttaaagagttcatatacttataaaagaaatagaaaattaagatcagtagtataagtacaagcatagtactctgaatgcaaagggagaattgggttattaggtagaggcattatatagaaggtgttggtcaagctgacccttcaagcattgaaataagagttggaaagcctgcagtctgggtgaagctcttccagctaaggaaagacctgaacaaaacttaagggtagaaagcattctagaacaaagaacatataaaaatgcatggtctttgtaggagatggccaagtgtcatagtcaacccaaagaataatagaaggacaaaatgagctgatggagatagccaaatggggccagattttaaggccttgagtgtacattaaagggtttggacttagttgagcccattgataggtgaaatgaggattcttttcttacagttacatgtacttactctttgttcagttccactaataagagccattagactgtgctgtccagtatggttagccactcactctgtttggcaatttaaattaattaaaggtaaattaattttttttagttgcactagccacatttcaagtgctcagtagcctcatgtgagtggagagtgcagctatagaacatttctatcattgcagaaagattattggacagcacagtcccctagatgttgatgtgaggatctgtagtaggatttaaaagcttaagaatgaaaacttttgttagagctgtggttttatgataaacacataatttgtaatatgtaaaaaatgtaaattaaaaaattggttttaacatacaaagaaatcttgaaattagttgatagtatgaatgatccttttcaaatttggtttctccttttggatttttatatgttgtattttcttaaaagtcaaggtactttcaaattgagagttgaatgttagtgataatacaggaacatgttacaacctgatcttgttagttgattttgtatttgattatttttattaaacgtgtggttttttttttttttgagatggagtctccctctgtcacccaggctggagcccagtggtgtgatctgagcttgctgcaacttctgcctcccgggttcaagtgattctcctctctcagactcctgagtagctgggattacaggcatgcgccaccacacccagctaatttttgtattttagtagagatggggtttcagtatgttggtcaggcttgaactcctgacctcaagtgatccacctgccttggcctcccaaagtgctgggtttacaggcatgagccactgtgcctggccaaatgtgtttttatacctctatagtgttggattttgaatctcaatgagccacgggtttaaaatgaaattagaagattattatagacaagatgctttttctacattattgattattctaggattcactgctattgcttttaaattgaacaaggcattagagtaaaagaaacaaggctccttttagtggagaaataaaattacagaatcagtagaagtgacaagactaattatatatgtgtttcttttcaagaactacaactccaggagaaacaaaacttctggcctctgaaatctatgacattcttcagtcctccaatatggcagatggtgatagttttaatgagatgaattcacgtcgaaggaaagctcaattttttctgggaactacaaacaaacgtgccaaaacagtggttttgcatatagatggccttgatgatacggtaaggtctgttagatgggaaagagaaatcatgtttactgaatagtttcttcagtgccacttgctaacagtctttgagaataaatctcgatatcagtatttta

SEQ ID NO: 40553 - DNA, 2300 bp, Homo sapien
attatatttagtatttatttatttatttattttgagacggagactcgctctgtctcccagactggagtgcagtggcacgacctcggcttagaacctccgcctcatgggttcaagcaattcccctgcctcagcctccggagtagctgggactacaggcgcccgccaccacgccaggctaattttttgtatttttagtagggacggctgaccgggcgcggtggctcacgcctgtaaccccagcactttgggaggccgaggcgggcggatcacctgaggtcaggagatagaggccagcctgaccaacatggagaaactccgtctctactaaaaatacaaaaattagccgggcgtggtggcgcatgcctgtaattagggaggcggaggttgcggtgagccgagattgcgccattgtactccagcctgggcaggaagatagaaattctgtctcaaaaaaaaaaaaaaaaaaaaagtagagacggggtttcaccatgttggccaggctagtctcgaactcctgaactcaggtgatccacccacctcggcctcccaaagtgctgggattacaggcgtgagcccccgtacctgccttcctaatatattaacgttaacaaaaatagcaagtttaatttcctgggatttttttttagttgtttttaataactatactgaagaaagtaactcaaccaaatgggttatgtttaacctggctgtgccctttggactttttttttttttttttttagaccgtctcgctctgttgcccacgctggagtgcagtggcgtgatctcggctaactgcaatctcagcctcccaggttcaatcgattctcctgcctcagcctcccaagtagctgggattacaggcgcccgcaacgacgcctggttagttttgtttgtttgttggttggtttttagtagagacagagtttcaccatgttggccaagctggtgtcgaaatcctgacctcaagtgatccgcccacctcggcctcccaaagtgctgggattacacgcgtgagccaccgcacccggcctatttgttttctacttagcttattttgctcctattttgagttcattggaagcaagaggataaccgagaacaagggaacggaaagaaattcaagaagtagctgcttggtttttaaattcaagaagtataggagatattagcattgaatacaatctgggatatttattgttatccacactcttttcctattagaggcctctcatattccttctgactttaatacatgagctacgtggccgaatcaaactgttatggagagaatccagaatctgtttattggggttattgactgcaatggatacattattctcaaagatctgcctgcgggttaagagtaggtttgtatttaaagaaattaaaaaaaaaataaaatctatgcctaaacaaaaacttcaagtgattgccatccataaaacaagtatataaatccttactttgataaactacatagaagatattttaaaatatgaatttgagaagattgtgataataaattccttacaagaaaaaaaaaaaaacctcttccccaaaataaattgctacttaaacgaaaactgtactttgcgtctttcaagctgctagggagacagtggacaccaagaagaaataaacgaaaatccaaggaacgcctaatgtagtgctaacgtccacagtaaaacacaaaacaaaaaaaatttatgaattaagactcacagaagcgaataaaatattaggtattgcctttattagaattgcaagagttgctaaagaaatactcaatttgaattaccgaatgcaggaccggagaagtcctgctggccccacaaagctgggtattgaggttgtgaaggtgtgacagtttcccagccggaatcaaatttcttcggttagggcttggtggacggcgagtagttagggccaatatagtgttcctgggtcctcattggatcagtcccttgactcttagtgtatttccctaaaccacctatgagcgcttcactctaaaaagaccttcactgattggatactttatcctcacgttggactcattatcagccaataggagggcataagcgacagaggcgtcaggtcacctgggaagagtctgcagagcctttgcccgccagcgccttcgctctttggctccctgagttagtccggttgcttgcgatcgccgcggccggggctgcgaaccgaagggctcgctccgcgccgcctgggtctctacctcatccgtaggtgtggccctgatggtgtggcaggctctggactcctaaagctctggagcg

SEQ ID NO: 40554 - DNA, 2300 bp, Homo sapien
atttttttttttttttttgtatttttagcagagacagggtttcaccatattcgtcaggctggtctcgaacttctgacttcaaataatccgctcatttcggcctcccaaagtgctggaattataggcgtgagccactgcgtccagcccttttttttttttgagacagagtctcgcttggtcgcccaggctggtgtgcgtggtctccgctgactgcagcctctgcctcccgggttcatgcaatcctcctgcctcagcctcctgagtagctgggattacaagcacgtgccaccacattcagcttttttgtatttttggcggagacggggcttcaccatgttagctaggctagtctcaaactcctgacctcaagtgatccacctgcctcagcctcccaaattgctgggattacaggcatgcaccaccgcgcctggcctcaaactttctttctcctccactagccacatacttctagggccaggtgccaagggacccatccctgtatcatagcactgagtgagttggcagagcatgtcttgctcgaagccaatccagcaccaggaaagacagcagtaacttatcacgaagtggcccaagttcaattcaactctcttttccccacctagatccccaaaatgtccaaggccactccagcgtatctagcatgaaaggaagtatgaaggaagggaagttggaaaggaaaaaaaaaaacaaaaaagacaggtcttaacccatgcctctttgaggggtgctttaagacattttccttttaataaataagtaggaaacaacatataatctcgtaaactcgatgctaaagttcctctatggactttggaaaggctggcgaaagccagcgtgcctgaaacacaagcttcattagcttagcagtaaataccctccggaaagatctcagaggaagaaattagtgccctttgacagaatcgccaccgtccattgctcccaccctttcggctccaaagctcctgctctttcattcagcctcagacaagcactcacttctcaggaagtattccctgagacattatggaggcgcccaggctcccacctcgattccattataatatttgattaagtttgtgtttttgtttagtttgtgttatctcctcgttatcttgtaggctcacttagggcgtggctcaaggcttttaacaacctttctgctgtcatagttgtcccccaacaagccgttgttgagtaaatgagttaatgctctgggtgaaggaggaaagccctcactaggaagagacttgtgccacccggggcaagaacatcagagatccagtgacagcccagcgacctccgggatcaattgcaatgggagggtaagagagacagccaatcagcaacagcctcttcaaaagccatacaaaaatacggacaggtttcctaccctacataggaatctttcatcacgcctacgcacattactacactgcataagttagctagaaatgtaataatcatattttcacgacaattatttgaaatccagagtgtcctagagtattcaaatctttagaaagcacgtgccccaaatgaatcggactgaacagacgctggaaccgaacatggtaaagtaaaatacttatccatgaggcactttgtaatccccgcactcctgctctgcctaaagagaaacatctcggatgtgaggtccgcataggcattagatctgccgggtggacacaggtccctacagcgtggggtgaaatgggctccacatgttaggttaacaaaagcttacgactcgcagcctttttcaaggtaatacacatctgcggctacattcagaatgtgggtgtccctaaacccctaaagcatgaagctgacaaaagcacttcccaggacaggacggtgaaggcacaaagcaaggtccgcacaaaagcacacgcccctctcagagctccgcgcgtgcgcacaccgactgtgactctcagcagccggcttgcggagcggttgccgcgtcctctgccgagcttcttgtgcccgcctccgagcctgaggaaacagctgattgatcagcctggctcaggcttggggcggggattggctgattggcagcaacgccacgggacagccaagctagaagcctgaggagccggagagggtgctggctgccgcgcggccgaggtgagtagggtgggaactcggaaaagcggttggctagcgggtgatgaagtcggctgcaggcctgacggcgatgggatgccctggaaacagtcagaacaggagctgaaggagctcggttcgggaacgcagggaggccggcgggatcctgg

SEQ ID NO: 40555 - DNA, 2300 bp, Homo sapien
agcctggccaacatggtgaaaccccattgtgacaaaaatacaaaaattagccgagcatgatggcaggtgcctgtaatcccagctactcgggtggctgaggcgggaggatcacttgaactcaggaggtgggcgttgcacagttagctgagatcatgctgttgcactccagcctgagtgacagagcgagactccatctcaaaaataaccacatacaaaaatagcttattaggtggggcatagtggctcacacctgtaatgctagcactttgggaggccaaggcaggtggactccttgagcccaggggtttgaaaccagcctgggcaacatggcaagatcctgtctttataaaaaatacaaaaaaatgagccagacatggtggcatgcacctgtggttccaactacttgggaggctgaggtggcaggattacttgagcccaggaggtcagggctgcaatgagccatgatcatgtcactgcactccagcctgggcaacgaagtgagatcctgtctcaaaaaaacactattaaccaagggtactgaaaggctattttaaaggatgggacggaagcaagtgcagaattctgatggtctgtcccgctcactcggcgattgtgtttccccatcacaggtaggctcgctttcctttgagaccactggatttgtgtgttatgctgctagggctgtcaagtaggttgatggcagggggcacagctccaccccgaagcctagtctgttcgtccatgatagcatagagagtcaaattgatattgattcttttggtatacatgtgagttgtgaggtgattatcatctgcccgaatcggcacgattttagccgatagctacatgaaaagtatgagtgggtaactcataattatcacaatttttgtccttgtatatgttgctcatatacaataaaatcgggatctctttctttgatgcagttatgattcaagaagattaccacagtcaaaatccttaccataacgcagtccacgctgcggatgttactcaggccatgcactgttacttaaaggaacctaaggtaagaggttgacattgatttcaggtgaaaatcataagaaaattccttttgatttactttcacatacttctcctgaagttactgctttgactgaaaatcacagacttccttcacaagaatgagatctagctggatcaagtttctgaatctggctgtgtttcagagtgcaacagctagagaattgggtggttgttgagagagaggctggagaagcccaagcaagggccaggtcacttgaaacctcgactgctggcatttacactgagctccacatgggctccatgtgggcagggacagccttggtctgactcagtgaatgaatgaggagctacagagaggaggcaggagactttagaaaattatcctggctgtgatgtgaagataaatcgtatcaagaccaaaagcctgaacacctgccaggagttacttcagtgctccatggaagagagcagagtggccttggtgaagtagggatgtggatagtttgcaagttctcttgggaattagaatgaacaggatgtggtggtgaatgcatttcggggaaagaaacagaagtcagtgaagactggtttgggcagttgagtagaaggtggaagtcttccatgagaggaggaatgtagagcagaacaagttttgggggtaaggcttgtagagacagtgagcaccattttggatccgtggtattaaatgtatttgacatcctaatatagaggtctagtatagagttacataaaagagtctgaagtatagaagagaaatcagacttaatgtatggatttgggaatcattgtctgcaggtgttaatgaaagccatgtttgcccctggacatttcctatccctggcagttctgcaattatgtctgcctatcccatctctacttcaaaactgctctctccctagatcttagttctggctaaggtgttaggcgggaaacaggatgaccaaactggcttgtgcccattgatgccaacttaagaacacagctagtcttctgattatttaagagatcatagaatatgtgaaaatgcccgttttttagtatatatatcatgacttttaaaaaatcaactttattgtggtagaacttacatgcagtaatacagtgcatacattttatgtgtacggttttgacaaatgtatactcccaaccacccaactgtttttttttctctaagagacagggtttcacagtgttgccaggctggagtgcagtggcgtgatcatggctcactgcagcctcgacatcctgggctc

SEQ ID NO: 40556 - DNA, 2300 bp, Homo sapien
acaacttttagaactgcctttcttacttcctctttttaaatcttcatctcaattatgatttttcaagtattgtaccaaaaatagccatcttgtattcgctttccaaaacttgactctttttgagcagttgattggaagagaaatgtgaaggtgggaagggtagcatccctgggccaagcatcgaggttataggctggtttggagtgtatagcccaggccagagtggcagagaatgacctcgaagccaggggcccaggctgcacagcctcttacagatgaccgccagtgtttccctggagcattggcctaagatacactctgctgctctgtctcatgcctaggcatccttcaagtttagttgctagaaccttactggaagacagagtaatcagagaccttgacggtctcatattaaagctagtctcatggcaaaaattaaaatgttatctggatttatgcaaagatgagtattataacttgttagttctgtagcaagaagtgaaaattttatggccatgtgttaagaatggtttcaggttaggaaaatttggatttacacctataaatttaatttgcacttcattttgacaagcctagaactgacttctcttttaaataagctctttgtactgaggattagataatgaaaataatattattatttgaactattttggttcttttcaaatattttaggatcatcatttgtgtacattgataatcagatgacgttgtcttgtcatggactgcagtcacctcctgagtgttcttcagtcagcccatgccatcttcacctttctctgggacctctgcagtggtggcctgactgcccatccagcccctaccccacctccctatacttgaccaaagtggtctttttaaaaagcaaaatctactacagtacttcagtagattgaaattcagacaagacacccccacatggccctcgtagggcctggcctctgctccccagggctgcagcgtcatctggctcctcctccctgcccttgagccgccctggtctttctgtctctcagacttgcttggcttggttttgtctcaccctttggccctcacgcctgttcttcgtctgcacaatctgtcttctgtcttcacaattcttgcaccatcacactttatctcagggtcatttcagagattctggaagaagtccttcacctcttaactaggtcagattcaggtttgttggcgtttcctacgtctgcttcatcgcatttgttacagttgcaattttgtgtttatttacataatttgattaatgtacactccaactaaattgcaagcaccacaagggcaggaaccttgtctgcttttacttgatgcttatatccctgccatctggtgcagagcctggtacatattagcagcttaataaatatttgctgaatacttgaatgaaagtttcacaaaaggcattttctcagcagtattatctgcagcctctcggttatgaagatggatgaatagaagcatactttgttattagaaagctcacttacagccgcgagaacaagatctgtaccaaaaatataagttagattgcagttagtgcttgaaaataatatgtccttaattatttgaaaatgcactattagactggctttttttcagtaagtccaaaatgagtgaattataatgttaagaagcatagataatatgacagcctctaatattcataaagtagttctatccctaaaagaaataaaaagttgaacaaatttcaattaaaaattgaaaagatggaataaaatgcattaatattttaaaatgtcacaggacactgtgcttgtgaaacagttctatgtgaaaagaatgaagaaatttttagtactgccacacattttttgaaagttgttttaaggcactctgttagtactaagattgtagaagtgtttggggctggcctgaggcctcctttgcctacattttgttagactgttaggtcagcgctcactaaagtcttttccctcccctcttccaacattacttaggcagttctaccccaaccctgcggttgtggcatgaagcatgcgctgggtaagaaggctggctgggtagtgcattcccagaggagtcaggtgatcactgttggaaggcagctgcttgaggtccaaggcagtcagtgtcccctctcttttgcctcgggacagctggtatttatcagactcctaagaagttttccttgctccctagtagaagagagagattatgcagcgggcttttgattgatccaatgggaattacattgatctggtgtctggccttggttcttatcaagtg

SEQ ID NO: 40557 - DNA, 2300 bp, Homo sapien
tatcacctcctggatggttagatttacacagaattcaaacattatttgaggttagttcttgccacttacctgtgtaaggtctagggcaagcgtgtttccatgagcctattctcaacttaggtactaataattacctcatgaggtttttgtgagaagtaaacgtgataacgtaggaaaacttgctcagtataatcccaagcatatagtagatgctcaatacatctactagaagttgtgggagtaatttggatttcaaagatgagttggatcagctgtactaaaggggagcttacatcatctaatgaagacaaaatccacaagaccacgttggaggtcatagttcttttaatagtagaaagcagacaggtagaaaaatatccacgtaggaggtataaagttttagcaagagaaaagaaacatgccatgggaagatgataaaaggtctacttttgctcatttaccggattatgtgcatttggtatgtgatctcatcatcagtggaagttatgcagtgctttcaaaggccttccaccttgtcagtggctagtcatcacaaatcagtagaagggtggatgccctaagaactgaaccaaagcaataattttgccagcaggggagaggttgttcaggctgaaatcccaaaggctggaatgcattagaaacaattagttgatgctgaaagctttgaccgtttagtgagaaatgtgacaaaatgaacactcaaattacacatctagcttacaaaacaggtcaagagctctttatcttttctcgctttcgaaaaatcgaaagtcaacaaacaacacttttggtagaggggcatgcagtctactttttccctttgtcttctcagtatcatcctttctcattcttttcacccatactctcacttctttctcagtcttggttttttccctttgtctccgggtccccttctcacttccgaattctcggctcccctctccgcccctcgggctcgggatggccccggggccgcatctgccaggcgagcgctggagcctggccccaccgagggactggcagtgacgtagccaggaggacggtgctcgcgcggcccgctgacgtcactgccgcagcggtctctagcgaaacccatgaatgggaattcaaggagggaaaagccagcagtgaccccgcggtcagggctgaggacggcgactgcgccgggtgctttgggtttctggggtcggcaggccggaacgccgcctctagcgcgggacgagcacaccccatagcctaggcgcgctggaacgcacgaatttagcgctcggggggatgccccgaaacggtggggcctcgtgcgcacgcgccttggctggcgaggagctagggaagggagtcacggcggggcgcgaagggaactgcggatgagatagatgggggaaaacgtttgtcgggaggcgactccaacagagccccagggtgcagaacacaaggaaggctactgtcgccctcggccgcttgccagtctccctgggcgctgcggcggcgcggggcgctgggcctgcggcgcggcgtcgtgacgtcacggtggcggcagccgtggttggcgcaaggtccgcggctgcaaagtgtgaattacgccgggctcgcgccggcggcggagtgaagtcaggctccgggggaggggaggagcaggactccggcggcggcggcggcggcggcggcggcggcccgagctggtcgctgctcctgagtcccgcgcgccctgggtctggccgctggctccagctgtcttttcttgcactgctttgctccgttcgtgctgcgctcgaactctgcagtccgggtacctgctcctctcggccgaggagccccagggcggcggggttccctttccgactttgcctgtgctggccccgcttgcaccccgtcccccctcgcctggagcgaggcgcgcgccggtcctggtaattggcgccgcggccgccgcggagccttcccgccggcggcccgagcggagggctggggttggggaggcgtgagcgcggcttcccagcccggggtcggtccccgcccgccctgcccccgtctcggcccggagcccccgagccgcggccccctcccactgcaggggccggcggccgcggcagggcgggcgccgcgcggaggcagggcgggcgtattcaatggaagtgtgttaccagctgccggtactgcccctggacaggccggtcccccagcacgtcctcagccgccgaggagccatcagcttcagctccagctccgctctcttcggctgccccaatccccggcagctctctcaggtaatcgccgcc

SEQ ID NO: 40558 - DNA, 2300 bp, Homo sapien
atcagtcatatgttttcttcaaggtattgggaccaaattcatgcattaataacattactttgttttcattgtatttgtttttattgtcatctgacatttaaggcaattaatactgtatttctacttatgttaataataaaaaatacctttaaataattttattccagtaaaatgtatgaattaatttaaaggaaaatgttaagtaaatattagtgcagatggcaatattctgaagatgccacatgaataatcaaagtgtgggaaaccctgacattattttcatgagttcagcataatccattttaccacttttccaatgctgagctttatatttgttttctgttataaacagtgcttcaaaaaacctcttgtagctaaatatttttcatatccataatggttctcttaggagaattcacagatgtggaattgttggaagaaagggcaataattatattattttaaagtttaaaattagtgtccattaaccatttccctaagattttatgaagacatttaggaagttagtaaagcagtatttatgacctacgggaatactttcttccttgttactcaaagggttgcttaaggcagtggccttcaagtgtgttctgggaccaaatgacaatttctccccaaccagcaaagccctgtggtggggaaaaggcttggtggaagatctggtttgtagttaatgttaagtaacctttccacttaattagctttgtgatctcgtgcaagacacaacttctctaagctataattttctcatccagaaaattatactgaaaataatactttgtttatctcaccaagttgtgaagattaaatagagtgatatgtgtgaaaatagcttgtaaatgaagcatgatgtaaaatgttattggtattatgaaagcccaatatatgttctcctcttgagagattcttaaagcacaattctctgacttcacagatacgtcgtctgatgcaatacagatactttttagtatcatatggggttagcgtctagaaaaagtgaagggtatgaaataatgaagaatgaaattccagtgagactctatttctttacagattgctcctccctgtcccttactcaacactagaacctggtatagcgctgtaatcaatactctgtgtgtgtgtgtgtgtgtgtgtgtgtgtgtgtgtgtgtgtgtgtgtgtgtgtgtgtgttttagacaaggtttcattctgccgtccaggctggagtgcagtggtgcaatctcaactcattgcagcttcgatatcttgggtttaagcgatcatcccctgtcagcctcctgagtagttagaactacaggcacgcacaactacgcccagctaatttttgtattttttgtagagatagggtctcactatatagctcgggctggtctcaaactcctgggctcaagtgatcctcccacctcagcctcccaaagtgctgggattacaggcatgagccatctcgccctgccaacactaactctggactttcatttgagctttgctgcttatcatcaaatctcaatgaaaacattagttgctcagaagtcaccttacttgttaatctagaaatggtctggtggctcaggatttctgagtctgggctgggaccagagccagctactcctggcacctgtgttgctggggaaacatgatcttcactgagactctgttctcttcccataatgtacattatccaaatggtctcttgttgtgggtggattcgggtaaaaattgtcttcaccacgtggggcctcagtttcctcatctgcaaaaaaaaaggagttagatgagaatctggtcactagccggtcttctaggtctctccccacagttaagatcccataattctgcaggtcagtttatgacctgcaaagggattcttccctgagggccctcacaaggttttgaatggcagagcaaatggaaatgggggaatgtccttcccaacctcccaccatgggcaggagaggaagtgttgtccaagagggcctcagctggaccatctggaggagtgaggattccactctgtgacatcacaatatccagcccaggtttgaccttgacaactgggaaggagaaataacaggaggcgcagttactgatatagccaaggtgggacactactggagggagctagaagggatcagccagccatgcctccagttcaggtacttggcattgctaagctcagaacaggacttgccagtgtctagatgaaaaagaggagagatctcaaggtgagtgtgtctccaagcttaagaagaatagtataagcacagacggcttgtgcc

SEQ ID NO: 40559 - DNA, 2300 bp, Homo sapien
tctttaccctaaaacagttttgttgaattttaccctgacagtgtaaattgacagcttatcttcacaggcatggtacgaaggacagaactctaagtcatctctctgctcacctgagacaaatgcatatctgctttcttcctctaatgtaaaaatgcagactcactgagctaaaggaagacataaatgactattattcctctacccaccgcccagccccaacatgtaaattatgtatttggtgaaaggctgatcaaagactcagaagaatgcaactgtttgcctcttatctacccacaactgaaattttttttctctttccccaatatccattcttttccctttaaatattaaagccttcgaaatcttctttggagaaagatgcaggcctgcctcctggcacgcgcccttaaccttgacaaaacaaactttctcgattgagacctgtctcaggtactttttggcttgtactctttatcacattttattttgtactatgttctgtgtgtgcatgtctcatctccactcttatactgagctccttgaggccaatgacctatgtcttgttcatctttcaatacccagagcctcacacaatggagacacactacacatatccaatgaatgtattttgaaggaatgaattccttctaaaagaaaagactctgctgcaatgtgcatgattagtctaagtgcttttacttagatagcaaggtcttttgcagtagaaacttaatctttcctagaaaatatcccacatattgtactcagacctcccctccatagcccatgaattgataaacacaattaactgcctaggctgggtgaaccaaagtaactcagtaaaaaaactttaccagttcccgtcctccctgtagttgctaaataaatattgaaaggactaagataattctctaaagatccctgatatgcttatgaatatatataacttattattagttaatagagcttactagattctcaataagctctccgtgcacacagcactaagaccacacataactgacctacacttcactggtaatttaattcacaccagggatatgttaacaaaatgtgtttattgcccaaggtttttaaaatgaaggagaaagaaagccgaaatttatcacatataaacagacttggatttcttttttatttttgatctgatttaaacatttttaaatacaatatgtattggttaaactgttgcttcacaaaatcctgatgaatgtcagaatcgatgtttatgactcaagagcagaccaagaatatcagaaatgaccagagaaactatggtttaacaagtcaccttggaggaaggggaaatgcaagggagaataggtattttggaggcagatgaaatgcagatatggaagtaggactccatttatacttcagttgtcaatggcactggtaactgtcccccaagggatgacaaaataaaataatagatctgccacctccaggtgcctgccagttactacctcattacagattattgttgcaaactattatataatttaagaatttaaataatcagtaaaagactatcaaattttctttgtgtttttgggtgtatgtaggaggtggggcagtataggatgaaagagggccaaggaagaggaaagcaatgtggaagagcaaacagcatactagagttgttttataatgtaacttttttctcaaataattagatcatccactggttttgaatttttatttatgcatgtatttatttatttattaggtggatacctttatggtgaagggatttgaatttagcttttaaattggaatttttcaaagaccacaaccccagctgacaaagatgaaatacttaacattaagaaagtctttttgatgattgcctttgtgaagccaggataacaattttcgagacatgttttgttcattttcacctaagaaggtgctattaggctactttccgtgactcaattcctacactctcaagacagggctggcattagttacacagactctgtgctgcgttctgccccttcctggagaagccatcgccaagttctcagtgagtgctcacagagggcatggttcagtggctaggcatgcacatttgcatttgttgttgacaactgtcagcttcgacctccttctcctcacaaccccgtctaaatggggtttgtaatcctccttcccacccactctcttcactccctggggcaagaatgttgactcctgctctccgtcacctgtcaggatccatcctcctgtcactggcttatatggacacgtcagcccaccgtcacgtgaccgcaggc

SEQ ID NO: 40560 - DNA, 2300 bp, Homo sapien
aggtatgtctttattagcagtgtgagaacagacaaatacagataaattgtggctgtgcatagcttctcttcctctggggttcaggaacatttttttccttactccctagttggagccactttggctctattaatgacttaccccaagaaaacctcacagcaaggactcaacagtgatgagggagctatactaaaacaatatcccccagatagcccaatgggagagagatttgtatgggcatgggtttagtcagagcccaaaacttgttgtgtcttctctggaagaacctcccagacctccccagctaaactcataaccacatccctttcctagtttatcttctgtgtccatttactgcactgaaacttcctattccaagtcaacgtttcacctccagattgacatccaagctgaaatctgctaacagggtcagaaaacagttcataaaggaaagtaagcaaaaatgttgaacccattccagcttaataaaaaaaaaaaaagcccacaataacaaaatctaaggttctgtgtgctttcctaccaatataaaacacagctttctcccagaaactcaaccattttccataatcatgatcttctattaacaactcacatctttccaagtaggcacattctctctgttctcttatgtcaaaagtacataacatggtgcagtgatccaactatgggctggcttctctgcaaactgtcaacatttctctccctgccttccctttgttcctaagagcagttgtggattggtatagacccaaaatggaagttgaaatatgcattgcatcatttgtcacattagctacaaaggaagcagcagaagtaatcagaaatgaggagcaggaaatttccgataaacaactctgatggttatctggaagctgaattgaatcacaggcacaagaacttggaattgcattttgaattgcagaattagaggtaactgcctcccacctatatgatagtgtcaattaatcaaaaattgaatatagttttacaggcttagcattccattccattctgcgacatgtcagagagcatttatttatttaacaggctgacatgaagcacatttggatttggaaaaagaaataattaaaaagaaccaccctgggtggcccagatgtggatactattatggatgttgatagtatttggaggtgaaatgaacgagtttttttttacagactcaatattgaccaatgaaaacatgtaactaatgaatttagccctgtagtcaagcagtttaagcctttttcaacatagattaggaagttagaatggatgcctctcattgagtttgcattcagtagaataagtaaagcttgtttaactcatgcatctctcactggccgcctctctctttaatttgggaatagaaaagggagtccacaattaattttagattgtgagaagagagacaaaaaaaggagcagagagtttctgagataacctaaaatctttgccgcaccccttactaaccccggtttgtgccccttcactatgggagtagctcttgtcatcatctaaaaaacttgaactgcattttgagagatttattggccttgcttctgcaggctcataactcctttatgtgcttgctcttgggaggaaaaagcagatagacgtttaaaagctggatgttcctgcacacccctctcctgatgcttcattcttttccaggcagaaagatggtgggactctgtctctagcaaagggatatttccagatactgaggtgttgtcagagacacctggtcagggaggttaggagaaggggcatccaggtccaccccctccaactggctgctgctttcctggcagggctgcactgggacacctcacttccttcccacttccccttcctcctcccattcgctgtctctttgcacacccctaatatggcctttcatagtaagaggtcaatatgttttcacacttgggaaatctcattcaagaatttttgtcaatggacaagtcataagaagcccttccattttagggctcgttgacgtcaccaagaggcgataaatatctgttgatataattggatgtgagattcagtgttgagatagcaaaattctgcccctcgttccttggcagggccctatgatttatgcaggagcagaggcagcacgcaatcgagctgtcaagagagcgtcagcttattaggcaaatgctgcgtggtttttgaagagggtcgacactataaaatcccactccaggctctggagtggagaaactcagagaccaagtccattgagagactgaggggaaagagaggagaga

SEQ ID NO: 40561 - DNA, 2300 bp, Homo sapien
cacttacacaatatatattttatgtgtaagttcctccatgtttattcaaacaaagctatgtttttacttaggaataaggccattgctatgggaattatccatttggctaatgtttctcttcttagtaaatgctcacttaagaactagttccttgttgaaacccctattcttagtctaattcattaatttaactgaaaacaggtacacttaaaggggaattttgcatcttaaggagaggttaaaaacaatgattaaaaatgattagtaattaagtaattagtaattggtaatgaactgctaattaaaagtaaaattcaagagtatatgtatacctttttcctttcatgattaataagtccatcatcacttcctggtgggagccttgattataccacaggctgttagggacctgtcagattctcctaaggtaacatgagttattactcatagcaaactggctggaaattctttttttattattacaattatctataacttaattgcttctggatgaccttactatcactccattcttggtctctctttctaaggtcagggtaatagaaaagaattattcatcataagttttaaaactccccttttactaatcttgtctgtctccctgattggatctctggaggatcctctttttctccagcttgagatatggggggaacccacccccagtatttcaacgtaggttctttctattttgcataagtgtcagtcagctgagaaataaagagaaagagtacaaagagaggaattttacagctgggctgccaggggtgacatcacatatcggtaggaccatgatgcctgcctgaggctcaaaccagcaagtttttgttaaggatttcaaaaggggagagggtgtaaaacagtgagtaggcacaaagatcatgtgcttcaaaggtcaaaaagcaaaacaaagatcacatgcttctgagggaacaggacaaaggcaaagcagaactactgataagggtctatgttcagctatgcacgtgttgccttgataaacatcttaaacaacagaaaacagggttagagagcagagaactggtctgaccacaaatttaccagggcagagattttccccaccctaataagcctgagggtactgcaggagaccaggatatacctcagtccttatctcaacagcataagacagacactcccagagcggccatttatagactgccccccaggaatgcattcctttcccagggtattaatattaatattccttgctaggaaaagaatttagtgatacctctcctacttgcacatccatttataggctctctgcaagaagaaaaatatggctgtttttgcccaaccccgcaggcagtcagacctcatggttgtcttcccttgttccctaaaagtcactgttattctgttctttttcaaggtgcactgatttcatattcaaacactcatgttttacaatcaatttatacagttaacacaattatcacagtggtcctgagatgacgtacatccttagcttacgaagataacaggattaagagattaaaataaagacaggcataagaaattataaaagtattatttaggaactgataaatgtccatgaaatcttcacaatttatgttcctctgctgtggctccagctggtccctccattcagggtccctgacttcctgcaacaaggagatggggacagcacagatacagctgtcttcatgccttcccaggaggccagccccagatgagcaggcctcttccagacttaatttccttgataattttgtgttcatcttgttccactagatactctaagatacagtttcttctgcagcccttcagccttccctctcagctttttaaagtttatacccttcaagcacttacaaacagtatgtcactccactggtcttagtttagaaaatgcacagatatatttacttggcttttggagtgctttttaaaaagccaccttcctgggcccttgaactcttcatggacgggggaaagagaagtttcttcaccaaactgcctgaggctgggtggtttggatttctttaaaagagctgttgtttccttcctgctgtcatttctgcatctaatcatggaggcagctcctgatcaaagagcattgtactggtgaggcactcattctcccacatatgggctgaccccctggtgctgagtgagtgaggtgagcctggtcagaatggggttgggggcaccaagaaagagatagctcaatgtagggcccttgtgtccatgcaagtttcattcacatccccaaagcagtgtcaagcccctga

SEQ ID NO: 40562 - DNA, 2300 bp, Homo sapien
aaggtccaatgacgttacattatatagtcaatttctttttacctttcttccccagtattccataaggtctcagttatctttgcacctagtgtctgccacatggtagccattcaattaaatgtttgtcaagtgaatgaatgaatgagaaaccaagccaagcccatagcagtcatatcaatacactcaactctctcctatggcaaatcccaaaggtttaaggctcaaggcagttagctaatatggtctttgacctagccttggctacatgggatgactgatgttaaagccttgatgctgaatgttaaagtaggttcaaggggaaaaaaaaaacagcaaattctaaaatgcttctggatgagaaaggctagcacaatgctgaaactaaactgagtctatttgctaattgctattaagttaatttcattggttaattctccagcataaccccctctaggataaacctggcccccagtgaaaggaagataaaccctgtaaaccacgcaatcaacagtgcctctgatactcaaatgtacatcctagtcacctacagatcttattaaaataaaggttctgataaattacatctagagtgaggcctgacgttctgcatttccaacaagctcccaggggatattatgctgctggtatgcagaccacactttaatgagtatcaagagcttggacgacattgcagagaatagatctacagacttaaaaccagagttaagatatctcttgttcttatattccctaactgcataactttagataagtcatttcacctctctgagccctccttgtttcatctgtgaaaataatatagttaatacaataattaataacatagttaatactaatagctaacacatactgagttcttaccatgtagcagtaactaatgttttatgtttgtcaatttataaataaggcttagatcaaacatcctctccaagtaatggtgacctgatacctgattgtaggccgtttgactcatacttaacaccatgtagcacttacctcccagagcctatgaaaatgaaataataatcggtatttggctaatttgtactgagtactcatacgctccaggccctcgtctaaccctcccttggacgatattaactcatttatcttataaccaccctaggaagtattattatcattatctcgcaggccttaaaacggcctcaacaagtaaaattgctgaaggaccaacagtggcacagtcaggattggaacccaggcagtgtaactgcagagcgtggcttagtttcagcactgtactagattaattgaactagactaggttctgtaactgcagaatcccggatctccgagtcagctagctcactagggtcggtgcacacccgcgcccactcggggtggcttcattgccagagccactgactcccaaaacaaaacgaatcttctacaattagctctatgtgtatctttgggatgttatctttctcgggccacaactaggaaccctgaaagccgactatgactccagtgaaactatttggccctaagaagggtgattgtctaaacatcttcacaacggatttacactgaaattgtaacacgcacttgattggaaccccacaccacaggcagtcccaggaatttgtacccgccccggtcccggaccgcgcccctggacaaaccctccggcccgcccctccggattgagccccaagactgtccccggaccaccatcctaagaccactccctgaactgccccccccaagaccgccccctagatcgccccccgggaccgccctctctagaccgcctgcgagactgtccccggaccgccccctggaccaccccctaggcggccccccgagctgtccctggaccgccctctagaccgcctcccgccccctgcatcctgggaatcgtagtcccaatcctgctctggaactagcagtgcggcctgctcgggccagctccgcctctatctggcgccagcctaaaggtcccgcttctaatcccatcatctctccataccgccctctgccggcctttcctctggtcgcccggattgcgagccgcttccggacgctccggaagcgaacctttcttttccggattgggcatcccggcatctgcacgtggttatgctgccggagtttgggccgccactgtaggaaaagtaacttcagctgcagccccaaagcgagtgagccgagccggagccatggagggccagagcgtggaggagctgctcgcaaaggcagagcaggacgaggcagagaagttgcaacgcatcacggtgcacaaggagctggagctg

SEQ ID NO: 40563 - DNA, 2300 bp, Homo sapien
tgcagtggcgtgatctgggctcactgcaacctccgcctcccaggttcaaacgatactcctgcctcagcctcccaagtagctgggactacaggtaccagccaccgtgtctggctaatttttttatttttagtagagatggggtttcactgtgttggccaggctggtcgcgaactcctgacctcaggtgatccgcccgccccggcctcccaaagtactgggactctacaggagtgagccactgcgcacggcctgctttgtgtttttcagaaagtaaacaaaaataatctgtaccaggtatccaggtaaccggcttcaagtacaatttctacccagtagtcagaaagttaaaagtcacactagataagacatctttattacttaatctttaaaacagtcacttgcctattcaattctgaaactgtttgttttctttccctcccccgcactcccgctctgatacacaaacttgttgtaaaaataatgcagaaacatatacgtcaatctaagtctctgaaatatggccaactctacctcgccgtatatccaacattaaaaagaaaaaaaaaggctgtttaagaatagaactcattcccggtttccaccaaattatttccctaattcttaaatcctcaaataagttcttaatctccaaagtctcggttgtgggaaaaacattaatttgtgcagtccaacacttacatactttcttgacggaagggcaatcctgtccctttaaactcaatgaaggcagcggccaggtccttctgagtccccgtataattgcctagaacttaacatttagtattcatagtccttggtttacagacgggtccgacagttagaaactattacttcctcctctttcctcctgggcgctgtcctccttttctcttgccacccaagccaggcggcccagaattcatcttgcctcccaagccccctttcctcttccctccctggctgggcgggccccctttcctcttgcccccaggcccctgccggcctccctttctcttgcccttctggctcattttcctcctcttggcggcctcctcctggtcctcctccctcatctgcttattggtggccctagtcacatccagctgaggcttcttgctgttcatgacacgaagcagctccaactggttctttttctcggctgcaaagtccccgaaaaggggttgaaacttccttttcttgccggagccccggggcaccttctccttggggaggcgctcctgaaagcgccccacagaggcggtggagaccttggccacttgcatggcgcggcccagctcctccttactctggtgtccggtagggtgcaagccggccgcgctgggcagctgcatcttgtgcgcgcgggccaggttacgcagccggttcagctcgttcttggccaccctttccttcttggcctgaatccgcttggcgaactggtcctccaaggggtcggcattgccgggcacctcaatcagccattctttggtgtcgtcccgggcgcgctggtagccccagcgccgccgccactggccactcacctcgtcccacaccaggttggtcttcttcttgggacggatgcccttgaggcgcgcgaactgctgccagcgtgtaagtggccgcggtcggggcagaggcttctctcgcggcaggcgtgtggtgggctccggcagccgcgccactatcgcctcttccacgcgctccgtgggcagctgccacagctggttgatgagcagttgcgtgttgtcccgcgccagggcctgtagctcggcctccggcgtgggtccggcgcaccgcagcccggtcggggggttccggtccgacgccagcaggttgcccaggtcaaactgcagctccagctccttgtgcaccgtgatgcgttgcaacttctctgcctcgtcctgctctgcctttgcgagcagctcctccacgctctggccctccatggctccggctcggctcactcgctttggggctgcagctgaagttacttttcctacagtggcggcccaaactccggcagcataaccacgtgcagatgccgggatgcccaatccggaaaagaaaggttcgcttccggagcgtccggaagcggctcgcaatccgggcgaccagaggaaaggccggcagagggcggtatggagagatgatgggattagaagcgggacctttaggctggcgccagatagaggcggagctggcccgagcaggccgcactgctagttccagagcaggattgggactacgattcccaggatgcagggggcgggaggcggtctagagggcggtccagggacagc

SEQ ID NO: 40564 - DNA, 2300 bp, Homo sapien
aattaatgtttttcccacaaccgagactttggagattaagaacttatttgaggatttaagaattagggaaataatttggtggaaaccgggaatgagttctattcttaaacagcctttttttttctttttaatgttggatatacggcgaggtagagttggccatatttcagagacttagattgacgtatatgtttctgcattatttttacaacaagtttgtgtatcagagcgggagtgcgggggagggaaagaaaacaaacagtttcagaattgaataggcaagtgactgttttaaagattaagtaataaagatgtcttatctagtgtgacttttaactttctgactactgggtagaaattgtacttgaagccggttacctggatacctggtacagattatttttgtttactttctgaaaaacacaaagcaggccgtgcgcagtggctcactcctgtagagtcccagtactttgggaggccggggcgggcggatcacctgaggtcaggagttcgcgaccagcctggccaacacagtgaaaccccatctctactaaaaataaaaaaattagccagacacggtggctggtacctgtagtcccagctacttgggaggctgaggcaggagtatcgtttgaacctgggaggcggaggttgcagtgagcccagatcacgccactgcactccactccagcctgggcaacagaggaaggggccatctcaaaaaaaaaaagcagttcaattataatggtttcagtgataccacttctaaacttatacttcttttggtatcaaatataatattcaaagtagtaaaactgatgtctgttttttaaaaagattttatgcctttcaacactgaacacatggatttcctgtaaatgatcaatttgggcttcattgactaatggtaataatcctcattaatccagaaaacacttaaatctttctctacgtttatatccccagttgtttgtgtgtgtgtgtttgtttttaagcttgacgtcaggtatagttttgtttgggggaagaaagaaacagacccataagatccttaattaggacattattatctttttttaagttccggagtagatgtgcaggatgtgcatgtttgttacataggtaaacgtgtgctgtggtggcttgctgcacctatcaacccatcacctaagtattaagtccctctgcccccttctatcccctgcccccaggccccaatgtgtgttgttcccctccctgtgtacatgtgttctcatagaacattattttttgattcatttgtcaagttggcctgagctggtttgattaggaggtgaaatgtttatatagctgtccttggtcttcctgtccatcaatcttttccagtttgatcgcagtaaattcatttctgtaaaacttaatatctcccataaaggattcagatttcataataacagattactaaaaatgcaaatgtttagttgttactgtctttggatactttctgataaagttgagctttatcgttaatcagcttttccactgggacatggcagatatggcacagccaagccctcccggagcatagtctaatcatggcaagttttaactattgatgtaagagttttaactattgattttgctttcatcaaaagcaaagccattcacacagtatttaacaaaaaccctcgggctctgctaggttcttgtttactgttaaaacagtttaaaggcagggtcttgatcacttaaaatactcttagaagggaaagtaacattttaaaggattaacagtggaaaaagaatatccctgttcctcttccttcccccaagtcctcaacatgtgaaaaatagagttgataagtaaggagatttaaggcagaacccgaggcctacggagcagttaccttctacggcaatttcaagggtggatggtgcgagcgccgctggggcagctggcgttctggttcttactccgtgggaaaatggccctgagcccgactggcttgaggcttagacaggtgaccccgcgaagcgggtgggcaggcgcggccgaggggcgggaggcgggcagcctccgtgattggccggcggagggggcggtgtagcgacccgaggagggaagaggactccaagcgccatggccgctgccgcccgagcccgggtcgcgtacttgctgaggcaactgcaacgcgcagcgtgagtgcggggccggcgggcgggcaggggaccgcagggtgcccacgcagccccctgggtgtgacccgctcagatcctgcgcagtcttctccgcttactttcaagaattcggagaatttgga

SEQ ID NO: 40565 - DNA, 2300 bp, Homo sapien
ggtttcgtcacgtggcccaggctgctctcaaactcctgagctcaagtgatcctcctgccttggcctctcaaaatattgggattataggcgtgagccactgaggctggcccggttaagtacatttgactttggagtcaaactagggattaaatcctaattctaccacaaactagatattttaatctcacaagagttactcagtggctttatgcctcagttttctcacctataagatggcaaatataatagctagtcttattgggtattcgtagatattaaatgaaattatatatcagactacctaacttatagcaagcatttaataagtggcaactctcattattattatttcatcaccatcagtattagtatgaagaaatgaagctgtaacagtgtaataaaatgcagtgggtttggcatgatacatatgtttcaaccataaccttatttgtgtgtatatacatagagaatatataaaatacagggcatacataggatatcatatgcatatgatatcgtatatctagctgccctgagattttgttttcacctgtgtctgtagcaatggcttgctgtcacttccattggtgtactggactgttggtactgaattaaatgagacagggagtatttagctgctctcgccttccctctgatggattgtttctcagtgattgatgtttatccttgtgcctctttcccccctccaaaaaaatcaaataccatcaaaaccaagagtccatcagaccccagagacctgaggataaaccgtagtaaggcagcacgtgactgtccttcccctcctgcctaagacgccacgttaaggaaacagtcaaggacaatttcactcacccttggaaggaatcacggtggtgaaaacttctatgttctcgtcactgcagctgtaaatctgatgcatcatttcagcctcctcttcccaaagtgcctgggaactggaggcctctgtctctggacccctagtctcgaggcatcctaatccagtccggctcagggatcattgtacatgtatcacatatacgatatcatatatacagatgatatatatgatatcatataaacacatgatatatatgatatatatacacatgatatatatgatatatacacatgatatatatgatattatatacacatgatatatatgatatatggaacagtatataacctgtgacctctatatgtagcataataggatttataagataataaatatataggataaatgtattaggatatatagggtaatacaaatatatatagggtaatacaaatatatacatatgctatatatacatatatcatatatacaaatatatatgatatatatacatacacaaatatatatgatatatatatatacacatacatatatacatatgatatacatacatatataataaatatgatatacgggacagtatataatctgtaacctgtatatgtagcataatagggtttatataatatattaggatatatagggtaatacaaatataactttctataatttgctccttgaacatggggcactgcctgttgccatgtctctgtgagcacctaagggttatacgcggaggtaccaaacacaggacccttgagaaatgtcagccttgtcatgtaatggcatgaggggaaaacactggagaaacagtccttttgtttaaaatagaaacttctaagagagccaagttagcacatgacaaattactgaatatcccgttctcctggaggggagaaaaaaaaaaaagccccttcatttctgaaatgagaaagggaattgctggtaccaaaattcacgtttcctttttggtggaaattctccagccaagcttggcgctaacagagtaggcgatttcacttcgtcgtcacctcacaaaaggcttccaaattcactgcggcagacaccgcaaaataaaaatgttaaatacatcctagctgggaggggattgaagcctccaggctcaatcaaaggtttgcaataataggattcatttaaaaaaaaaaaaaaaaaaaaggacagatgggtttagaaaatgttgcagtgaagactggaacgagatgagctcatagcaccagcctgtcttttgtggacccgcacaatgatccctgagccagactggattaggatgcctcgcgactaggggtccagagacagaggcctccagttcccaggcacttcgggaagaggaggctgaaatgatgcatcagatttacagctgcagtgacgagaacatagaagttttcaccaccgtgattccttccaagggtgagtgaaattg

SEQ ID NO: 40566 - DNA, 2300 bp, Homo sapien
ctgactgagaaactctcaggtgcctggaaatggggcagtccccagtcctgggcctgggagaattggctgcctccaggacttcttcagagatgtcctcaggcacctcagaaccaacttgttcaagcctttcctcttttctcagtgggggccattatccaccgtcccagcaaatccctgggatgtttcccctaatgcctccttgtcctccccacaccttcgacatgaaacactgacggcatccactcctaggtatttctctcctagccctcttggtacctacctcaagccaccctggctcccactcccttcatctcggctgtgtagagaacatcgtcagtgaagggcccagcctccagcccctcccaccaggctaccagagaggtccacttggagcagaaatctgcccctgtgctccctcagctttaagtgctgtgtccgttcctggcccctgccctccagaccacactgacctctccaaggctacctcctatgacacccctgtccccaccgttctatcacgtagaacagccctgagctgggggtagttctgtgacagctccatgatatcctgcttcccagcactttccctgacactgttctctcagcagattgccttccctgtgtctctccacctggcaaactccaccttctcctagccggggtagagggttactcagtcaagcctccttaaccctgcaagaccacccaaagtcagtttgctactccctaaatcacccttacctggcttcatcataactgttatgtatctctaaagcctcgtttccttgactagaaagtgcggactattccaaaccagcctgggcaacatggcgaaaccctatctccacaaacaaaaattagccgggcgtggtggtgtgcacctgtggtcccagctactctggaagctgaggtaggagaattgattgagctcaggaggtcaaggctgcagtgagccagagattacgcatgccactgcactccagcctgaatgacagagtgagaccccgtctcaaaagaaaagaaagattgtggtgaggattaaatgagataatacttttacggtttatgctcagcacagtgcctggcgtacagacaaaaatgtgagctgctattattattagttacgccagggctccattcattatagtttaatcttggtagtcttgtaatactttattttatttgcattgaggtgttttcttgtggaaggggagttatttctagatgctgtagtacaatcagatggggcttgtcctgggacatctgcccccagagagacctgtgctgaaagccagctttcccctacgttttatcagctacctcagctcaacacttgaatccttagaagcttcagagtaaaaagtactcagaattaggttggggcatcaggaataaaggcattagaaagaaggttctctaaggttctccacccatacatctcgtaaagccagtgtcccaggattctgatctgatacactccagtccttccatgttatggggctgcacttccttcccagcacaggcatgacttctctgctcatttttagaggggtgtccacagcaccgtgttaaataactgatcccagctataaagacttaattccaagaacctgtttaatctcttgtgatctgaggccttgggaaggaaggaagagctgaaggcacattctgagcacctactgcatgcagacacagtgctaaatgatccacatgtgtgatcttatttttaaatagactttatttttagagcagttttaggtatacagcaaaattgagctgaaggtacagaggtttcccatatacctcctgccccctcatacaagcacagcctccccccatcaacatcccccaccagagggatatgtttgtgatagtcaatgaacctacatagacacactgatcttatttaggccttagttccagctcccctagaagagtgacagttgccttgtggcctgaccctcctgcctggttttgctgcttggtacaaaggcctttagaaattccctggcgtggttgattggctaacaaggtaattgatgcagggccagtgggaggcagaacacagagtaccactgagtaatatctcctctgttcaacattgcagtggggatttctgaacccaaaacatcaaatctgtgtgggaatcgagcatatggaaaatctctggtaagtaaaataagcctgcttagttgtatctgttgtgcattaaacttctggtcatgtctgattctcctgtgccatgaagagagactcagtgttctttgttccaggcctgaggattattagaaaagcataac

SEQ ID NO: 40567 - DNA, 2300 bp, Homo sapien
gctgagatggacggatcacctgaggtcaggagcttgagaccagcctggccaacagggcaaaaccccgtctctactaaaaatacaaaaattaggccaggcatggtggctcatgcctgtaatcccagcacttcgggaggccgaggcgggaggatcacctgaggtcaggagttccagaccaggctggtcaacatggtgagaccccatctctactaaaaatacaaaaaattagcctggggtggcaggataatttcttgaacccgggaggtagaggttgcagtgagccaagatcatgccactggactccagcctgggtgacagagtgagactctgtctcaaaaaacaaaaaccacaaaaattagccgggcatggtgacacatgcctgtaatcccagctgcttgggaggctgaggcacaagaattgcttgaacatgggaggtggaggttgcagtgagtggtgatcgcgccaatgcactccagcctgggtgacagagtgactgtctaaaaaaaaaaaaaaaaaaaaaaaaaaagacctactatttgacagcacaagttgactagagtcaataacttgattgtagattttaaaataactaaaatttataataactaaaagtaacacaaaggataaatactcaaggggatggataccccatctccatgatgtgattatttcacattgcatgcctgtatcaaaacatctcatgtaccccacaaatatatacacctactatgtacccacaaaaattaaaaaacaaacaaaacaaagccactataaatgttttgcaaaatggctgaattctgcatgcctaacagcaatgtatgcaagttgtacttgctcagcattttcatcttcaccaacatttgtatagtcagtcattttccccgctcattctaacagaagtgtagtctagtatctcattgtggtttaatttgcatttctctaatgactaatgaggtggaacatcatttaatatgcctgtcgtgtgtgtgtgtgtgtgtgtgtgtgtgtgtgtgtgtgtgtatgtatatatatatctcgtttggtgaaatctgtttaaatcttttgcccattttttaaatgctttttttctcactgagttttgagagttctttatatactctgaataaaatctctaaacgtttgcttaaaaaaaaactcatcttagtttagaatacatctgagtatgtgtattcaaatgactgtgaaccactttaattccacactttgccctgagttttataactgatttcagtaatttcacaatgttatctttctgggaattgcttttctctatatgtaaaaatgagggaaatttgttttactgtcaaaatctaaaacatttgtcttcaagctctaaaaaaggtattctgtataaaactgaatacagcctaaaatatagcagaagctctgcttcctgttagatataaataagtgaagtaatgtacgacccaggggtaaataagaaaacagtgaaacagtgattccaaatgacattgggaacataatgaaatttgggaactcatttctaaattattttttatttttttatttttactgaaccagcaacccagtaaggaatgatctggaagaaacgcttggccaggtgttgtggcgcgcgcctgtagtcccagctactttggaggctgaggcaagaggatcgctgttcgaggctactgtaagctatgattgtgccactgcactccagcatggggaatagagtgagacctagtctcaaaaaaaaaacaacaaaaaaaaaaacaggagagaaaaagaaaagctgttttatcttcccttaccttcccagaatctataccttgaaaaaaggaactgttaaaaaaaaaaaagccagtgtgtttaggttttgacagcagtgcatgcaagcttctctcttaattcagctcctcttaattcactctgcacctgcatctgatttgcaaaagatgaagcgtaaaatttcaaaatagcaagtgtttgttacagtgttaacatgtggctcagtgctctatgcaatagaccatgttgccttgcaaattttccttagccaagtgtaattgttactgtagcaaatctactttaatgctacttgaaatgaacagttcgtagttattagactggaacctcaagtagctgcaaccgctagaaactcctccggtggttcccccctccctggtctctccagagggaagaaggtcaccttctacacttaactaccatgctcattcatctggacgaaatgcccagtccactgtcttcttcacgcgttattctccaggacagggctcctccgccgcgcacgttat

SEQ ID NO: 40568 - DNA, 2300 bp, Homo sapien
ttattcaacttcccagcccccaatatccctggacatttatttactgtacctttttcactgagagcctttccactcccctccccttctagtagtcgtgaacttcagaccctcgcttcgactcccactgccataactgtttttaaccaagcttccctgaatcctcccctccgcctaaggaggaagtgcagctagacgcaccgcacggcatcctaggaaatgtggtctctcagactctttgccttgggctgcagagtggggaagacgacgaaggagagcccagtaaaactacaactaccggcaggcaacgcgagtcaccatctttctttcgccccttttcctgttgccgtcctcttcctcctctcctctagcgctgaaccgcttggcctcacggtacttgtagttccttctggactcaagatcctagggcttgatggccagcacagaggctggaagactctaattcccagagggcagagcggaagctgcgcctgcgcacactcaatgagggcgtgtatgtctgtgtctgagggagagagagcgagagtgagtgagtgtgagtgcggggtggggtggtggccgttacgttcggggcaacggctacggcagtggagaagtaagaagagaaacaacgtccggcgcttccgccttcgcttaggaggaggaagagctggtagggaaaggaaagtgcttcgccctgggcctggactggaccgagtcgggttggtgggggtctgggctatgagcttttgagggtcgcctgggacgcggagcgagacacgagagccaggagctatgtctcagccgccgccgccgccgcctccgttgccgccgccacctcctccccctgaggctccacagactccgtcgtccttggcgtcggcggctgcttcgggggggcttttgaagcggagagaccggagaatcctttccgggagctgcccggatccgaagtgtcaggcgcgtctatttttcccggcctccggttctgtcagcatcgagtgtaccgagtgcggccagcggcacgagcagcaacagctgctgggggttgaggaggtgaccgacccggacgtagtgctacacaacctgctgcggaacgcgctgctcggggttacgggggcacccaagaagaacacggaactggtaaaggtgatgggcctttccaactatcactgcaaattgttgtcgcccatattagctcgctatggaatggacaaacagacaggccgggccaagcttctccgggacatgaaccagggcgaactgttcgattgcgccttactgggtgaccgcgccttcctcatagaaccagagcatgttaacactgtgggctatggcaaggaccgctccggaagcctcctgtatttgcatgacactctggaggacattaagcgggccaataaaagccaggaatgtctcattccagtgcatgtggacggggatggacactgcttggtgcatgctgtgtctcgggctctagtaggccgagagctcttctggcatgccttaagagagaatcttaaacagcactttcagcagcacctggcccgatatcaagctctgttccatgacttcattgatgctgctgagtgggaggacattatcaatgagtgtgaccctctgtttgtaccacctgagggtgttcccttgggcctgaggaatatccacatatttggtcttgccaatgtgctacatcgtcctattattctgttagattccctcagtggcatgagaagctctggtgattattcagccacctttctacctgggctcatccctgcagagaagtgcactgggaaagatggtcatttgaacaaaccaatctgtattgcatggagcagctccggtagaaaccattatatccccttggtaggcataaaaggggctgctttgcccaaactgcctatgaatttgcttcctaaagcatggggtgtgcctcaggaccttattaaaaagtacataaaacttgaagaggatggtggttgtgttattggaggtgacagaagtttgcaagataaatacttacttaggcttgttgctgctatggaagaagtctttatggacaaacatggtatccatcctagtttggttgctgatgtccatcagtatttctacagaaggactggagtgataggagttcagcctgaggaagtcacagcagctgctaaaaaagcagtaatggataatcgccttcacaaatgtttgctctgtggtgccctttctgaacttcatgttcctccagagtggttggctcctggagggaaattgtataacctggcaaaaagtactcatggacagctgag

SEQ ID NO: 40569 - DNA, 2300 bp, Homo sapien
aagaaaaatatcccaagataggaaaaatcacttctcttgtaattaaggtccattatggaggatttctctttcaaatatttattttcaagaaaattgtagcaattaggtgcacatcaaaactaataccctttatgggcctctattttgcagatggttcatttcaaagcatcaagttctacatacatacatacacacacacacacacacacacacacacacacacacacaacctaatcaggcggtttcctgggcagctacagaagactcaaatgatctcatggacttcactaatgtttctagttggtgccaaatgtttcagaaattttgaggtagtccacttacctaaggtgatactaaacttccagaaagcaagaatttccgtaataagtgaaagaggatgaatgtacaaaaataatactagctttcaattaacatatgaatattgttctgtatgaagaggcagtttcctacccaagtgaaaaaagaataaagctgttgcctccttaacattaaacatcccttcatcactaagaggagactctaaggcctagcaaaagatttgagcctaacattttgggttttttttttttttttgagacggagtcttgctctgtcgcccaggctggagtgcagtggcgtgatctcggctcactgcaagctccgcctcccgggttcacgccattctcctgcctcggcctcccaagtagctgggactacaggcgcccgccactacgcccggctaatttttttgtatttttagtagagacggggtttcaccatgttagccaggatggtctcgatctcctgacttcgtgatgcatccgcctcagcgtcccaaagtgctgggactacaggcgtgagccaccgcgcccggccgggattttttggtaagcagcagcgtaaaaatcactctcaaggtttgagattgggatccagcataactggtgacttgaccttgggcaagtcacttaattccttttagtctcagtttccctgattgtaaatgaagtcaacaccacctggtaaaggtattacaggactggtgtgaggatgagatgatacatgtgaacatattattaaatatgtaaactataaggcaatagtaagcaaatgctagttactattctatgtaatacaggcctaacctttcctgcctatgtcctgatctgtaaaaagaagacaggttgagatctgaatgtctatccactcacttatcagctgcgtgaactttagcaagtcatttcctttctgggcctgtttcctaagaaggttattttttaagatcaaatgatatcgtgttatgcaaatgctgtccagacacatattaagaacttaacacatgatggctcttattattctctggggagtagggtggtaaagagcaaatgaaattaaacctagttaagagaatttgtatatgcacacaaaactctacagacatccaaggtaccgttatttgcactgtaaactgccaaaacatgcaggaaacgagaaatcaaatggcgcctcagtgattcgcactagagagggggagaaggcagagcttccgagaatcaactgttttcccccttatggcctccagcctagattagaccatttattcaacttcccagcccccaatatccctggacatttatttactgtacctttttcactgagagcctttccactcccctccccttctagtagtcgtgaacttcagaccctcgcttcgactcccactgccataactgtttttaaccaagcttccctgaatcctcccctccgcctaaggaggaagtgcagctagacgcaccgcacggcatcctaggaaatgtggtctctcagactctttgccttgggctgcagagtggggaagacgacgaaggagagcccagtaaaactacaactaccggcaggcaacgcgagtcaccatctttctttcgccccttttcctgttgccgtcctcttcctcctctcctctagcgctgaaccgcttggcctcacggtacttgtagttccttctggactcaagatcctagggcttgatggccagcacagaggctggaagactctaattcccagagggcagagcggaagctgcgcctgcgcacactcaatgagggcgtgtatgtctgtgtctgagggagagagagcgagagtgagtgagtgtgagtgcggggtggggtggtggccgttacgttcggggcaacggctacggcagtggagaagtaagaagagaaacaacgtccggcgcttccgccttcgcttaggaggaggaagagctggtagggaaaggaaagtgcttcgccctgggcctg

SEQ ID NO: 40570 - DNA, 2300 bp, Homo sapien
cccaagtagctaggactacaggcgcctgccaccacacccggctaatttttgtatttttagtaggacgggatttcaccatattggtcaggctggtctcgaacttctgacctcaggtgatccaccctccttggcctcccaaagtgctgggattataggcgtgagccactgcgcctggcccccactcattttctttataccactaatcatcaggaattatatgattacttgtctgttgtcatccttccccactagactctttagtaaggcttttcataagggcaggcagtttgttgattgttggattccctgtgccaggcatatatagcctgaatagatattgttgaatgaattaatggctatcatctatggcagtgtgtttcagcctgatattcaagcataagttcctggagaatccaccatttggttgcagtttaaaaatgtttatgttgtcattttgatgctaatctaaagcaaagtcatattgtgatttttccagatgagtaccttaaaacatgaagttttgagagcctgaattcacaccaagtttaggattttgtttttatcagttgaaagccaatgaacattgtgacaaaacgtgtaaggtttcacgatcattttgagaaaagaggtgggagagttgagtcatcacatgtcacacagtagcccatggcaaactcagtgctgtaactgttggtgccacgttcctactaaaaatagaaattgcacataacacacatgcacttacatatatttgcaacaacttagtcactgtaagtaaagtagtaaatacacaatgaggaatttttttttatttcccaggaaggcttaaattagataccatataattcagatttaaaatagtcgaaaaaatactaaccttatcttaaagtgagtagactctaatcgagtgatattcaaataaaactggctttccagggttttgtagtgccagaatttttgttaaaatttgagatctgattatttcaaactagcaacagaagaccaggaagttaataatgcagtgtatttgtgcaaacagctgtttttgcattgacattattaaatgtacagagggcctgggagcagtgactcatgcctgtaatctcagcactttgggaagcttagactggaggattacctaaggccaggagttcaagaacaacttggtcaaccccatctctacaagtaataaatttaaaatttttaaaagttagccagctgtactggtgtgtgcctgtagtcctagctactcaggaggttgagacaggaggactgatggagcccaggagtttgaggctgcagtgagctatgatagtaccactgcactccagcctgggtgacagggagagatgctgtctctaaaataaaaataaacatacagagacacatttaacgtagaaatagatcagaagttgaatcttaatgctcataaagctaacactttacaattcaagttactattgattttattttatttaatttatttatttatttatttatttgagacagagtctcactctgttgcctaggctggaatggagtggtgcaatcttggctccctgcaatctccgcctcccaggttcaagcgattctcctgcctcagcctcctgagtagctaggattacaggcatgtgccaccatacccagctaattttcgtattttattttattttatttttgtagaaacggggtttcgccatgttggccaggctggtcttgaactcctgacctcaggtgatccgcctgcctcagtctcccaaagtgctgggattacaggtgtgagccaccgcgcccagccgagttactattaattttaaatggcaaaaccaaacaaccaatattgttggagcagaagaatgcttatcactgcaattctattacctttgcctgttacctgtctttattttccctttatttagaacctgaagggtgcttttagggtggaagaatataaagtttaagaatttgcttaagtgaaacacttgttatatcttcattctagtaacattctagtttttgtagaagggcctgatccctctctctgacccatttaactctgtctcctaaacacagtctaattcagttccttttgtatgacataaaaatcagaataagaagtacctgacatactttctacatctgtagttgcggaagacattttaataggtaagagcaaaagcacaagcctgcatacttcttttttaaccctgtggatcatttaaataaatcctttcgtattattccaagatataagtgcattgtgatgatgtataagaatttaaatataaggcagtctgcaa

SEQ ID NO: 40571 - DNA, 2300 bp, Homo sapien
aaatctgtctctactaaagatacaaaacattagctgggcgtggtggcaggcacctgtaatcacagctactcgggaggctgacgcaggagaatcgcttgaaaccggaagttggaggaggttggaatgacctgagattgtgccattgcactccagcctgggcaacaaaagtgagactccatctcaaaaaaaaaaaaaaaaaaaaaaactaatttaattacagtgaaaaagtccttagtagtttgtgaatatatttacctcctctagctttttgcaaaatctagctattaaattgcagctctcagattgtaaaggcaaaatgcctaacatgttgtctgttgatcaaatgaacccagcctgggcaacacagtgagaccgtctcgtctcaaaaaaaaaaagaaaatacataaaatgtttgtgggaggtgatctctgtgtgtgtgtgtgtgtgtgtgtgtgtgtgtgtgtgtgtgtgtgttcttcacaataggacaaatttatctagaaatgtaatggttcccagatgtttatttttttaaaaagtcaagatgtggtgatagccaggtatttgtctctaaagtgagaatgatgttattccacttggagtttattgacacagaacttccttttgtctgagaaatcttcagcactgtgaatatggctttaattaagagatacactcatcacttgttgattttgttacaagggaagaactcctctaatgtatgtggattgctttgtggaccacagtaaaacatataaaggaccaccggcaatgtattgttttgtatctactgcattcttatattcatttctgaaaactactgtttagaaagttctgtaggattactgaagtacaaaaagtatttggattcacaatccactttttaaagagaggccacattgtggttattgacattaaaaatgaatgtcctaacccatacttgtggggctaaatctttgaatatcattttaaaacatgaggaaatgtcttctgaatttagggaagtcacacatagatcccagttcctctaataacctttggcagtttatttgttcatagatttgtggcaaattctctggaatcatatgatctaaagtacaaatcattgtctcaaaatctaaggcatgatatgcacatgggaatctttaagtacttgtctgagtctatcttcaagtgatatctgataagacctaaattacagtagtgttgtgggacgaagaaaacaacccactctacttcaaaatcttaaccacttgactccacatccattgaaccatgtaattcttagttctccactcagcttctctatctgttaaaagagataaacagatctaaaacgcagcttctgtaattcaagaatgagtaataaggagctgtaaagtgtgcactcagctgacttggagattaatgggaataaaaaaaagagtcagtagatctaaaaagatgtgtggaaaggaaatttctctgcacacaggatctgccaatttgtgaaagttctcgactgtttataaacacaagggccgtaactctgctaatgacaaaagtggaaaactgtccaaataatgctaaatgaatcacagttgttctcaattatttggatatttaattcactcctctgagtttccagtttacaccaagccaacccccccaacaccacgggcccacccggggggtcctgatccctgcacacaccaggtcatctctgttgggccccggcgctctggcccgcgccggtcttgggccccagggtagcggccactgcgggcggagcagagggaaacaccagagtctgtgactccagacaggacccactgtgtcctcttgaactttgcacagcgcgtgacgggggcagacggtgcaccgtggcccggcctttcgcgggggtcctcggggaagagagaggagcgcgggtttcctcggaggcctgagcgggacgcagcctgcagcccctccccgcacgggctgcccccggcccgccgctcgcgccgctctgctgggatccggcgccttccccggctgtcctcggcctcccgcgcgctccgcgggaggagccgccagcggccgtgacgcgtcaaggaggaaacgccggcgcccggcggccctgccgggaaggaggaagcgcagtgcgttcggctccgcgcccgccgcgccgggagcagcaccgcggggccaggtaggtgcggggccggcgggagggtccgcgcgcccgggactccgacggcggcccggggcgggaggagacggggcggggcgagggctgcccgggcctcggccgctgcctgtcctcggaaaaagccgta

SEQ ID NO: 40572 - DNA, 2300 bp, Homo sapien
cagtgggagggatgttagttgtaagttgtggattctgtacattgaggagacagtctgtccaacagatgagtacacaagagagtgagttggagattaggtgggaaatgtaggttaggatcagatcaaacaccctgagttctttgaatctgttctttatacagagatggcagtgaaaatggaagagtcattgaagactctaaaggagaaagccaaggacctggtgaccaaacgtgaggactgagagggaagagtcaaaggttttgagttagggcaagaatgatacagtattacccccttatccaaggggataccttctaaaactcccagtggttccctgaaactgcagatagtactggaccccatctaaactatgttttttcctatatatacatgcctacaataacatttactctctaaattaggcacagtaagagattaactaccataactattaataaaatacaacaattataacaatatgtcagcatcacgactcttgcactttggggctatcatgaagtaaaataagggttccttgaacacaagcactgtgacacctctacagctgacgtgataatggagatgcctactaagagactagcgggtgggtagcatctgcagcatggacaaactggacagagggaggcttcacattgagggtagatggagtgggatagcgtgagattttatcacactgctcagaacagcacaccatttaaaactcgtttatttctagaattttccatttaattttttcagactgttggtcaaaaaaagaaaagggaaactgttgataagggtatgtgtcggggactggtgtactattattattacaaacaggaaagttgtaagggagaggttgaatgagtgatgccggagatccctgaagctttttctaaaaattcccaatttctctgagtggctcctgactagacaatacttccctgcatcctttcccctctcctatgagttgagcctggcaggacaaactttagagtatgagagggcatttagagcccatgaggtcaccaggctaaatcccctcgttttactgataagcaaattgaggacttcagatattgtgacttcccttaaggctacagagctaggctggcctcttggcattattttctgaaatttttgtaataaaggttaccgtatgtcaatcctgcttgctggcaaagtgagccctttgtttccctgccatattcattagttacattatttttattttagaaacagggtcttgctatgaggtccaggctggcctggaactcctgggctcaagtgatcttcctgactcagcccatggagtagctgggactgtaggaactgcgccctactcggttattggcttgatgcttccagccgtttttcactgtccagactcagatgcattaatagttaaaacaagtcgtttcgaggattctggttttcctttatctgtacacgcagacgcaaaccttagagtagcacactacggacattcatgccaaacccggccgcgtctgctctctcgtgatgcgcctgagctgtttgaagggaacgagattgattaacaatttaagctcggggtgaggattcttactgggagccgactccccaatttttgaagtaaaggatgtgtggtggagactagtaaaggaattgcttcgtttctttgctcctctgaatcccattcctaatgacgtctcacgcctggagccctgaattcgtgtgtgactcctaccccgcccgaggaaaatgagattatgccagtgtcttgaatgagcgcggttgttttgagatctacactttagcgggaacctggggagagtgccttctcattccttgcccccgcccaaggctctcttcaccttccccgcgggggtcctctcgttttctgtctcccaaatgctggcttcccgcctttcctcccccgcttatttacttaattaaggccctggggctgcaccccaccggcagctccttcgggggtgtggccgaagagctccgagggcggggctgaccgagccatattcgggcgtggccggtggtgattggtgagggcggggcctgccgcagggggcggggcctgcaggtttggcccccgcagggagcgcagctggcgccgctgggagctggtggcgcggcgcaggtcccggccgagtgtggcgcagcagtggcggcgcttcccattcgccatgcgccgggggtgggtgcccgaaggtaagcgtgtggctcatcgagcttgcgcgaggaacccttggcggagaacagccccggcactgcgcgggccaggtggagggaccccgggggcg

SEQ ID NO: 40573 - DNA, 2300 bp, Homo sapien
tactgtcccttccaaaaggaggacctgaggaattctgcttctgtgggctatagcacagcaaggcacaaacagataaagtaccagcaggacctgccaccctgagccccacgttctcaagggagaggtgtggaaagtgtagctcataaccttcaccttctgaatgtctctgctgtaggaggagaagcatgggttaatgtggcttctgaggttccaggacagggccagtctgccttagaagtacaataggttccacctgctctcatgcttagacagtagattgctgtgacaggtgggccaggctctggtcaggtgcttccctggtcttactggggcaaagcagctactattatggggctttagaatgctataatttacagacagatgttgtactctttgttgaggagagaccaattacatgtctgtatgttctaacaactaattcagctacgtagaaatctttctgactgctgggcgcagtggttcacgcctgtaatcccagcactttggaaggccgaggcaggtggatcacctaaggtcaggagtttgagaccagcctgaccaacatggagaaaccccatctctactaaaaatacaaaattagttgggcgtggtggcacgtgcccgtaattccagctacttgggaggctgaggcaggagaattgcttgaacccaagaggcggaggttgtggtgagctgagattgtgccattgcactccagcctgggtgacaagagcaaaactccatctcaaaaaaaaaaaaaaaaaaagaaatctttttgactgcatttccagcagcaaatccaacaagggaagctttgaatcatctcaaaggaagcattcttataatcagttaaaactcattatacctgaatattcaatgcctgctgatatatattttaaatcattacctgaatataatttatttatagtgatcagatctgttacagtgacttcctgaaactaaacatccagggcaattatccaagcaaactgacactttaaaaagtattatttagtctgggtgcggtggctcatgcctgtaatcctagcactttgggagatcaagttgggaggaatgcttgagcccaggagttcaagaccagcctgggcaatgtaatgagaccctgtctcttaagaaaaaaacaaaaaaaaagtattgtttgagccaggtgtgatggtctgtgcctatagtcgcagctacttggaaggctcaagcaggaacattttttggtgtgctcttgagcctaggagtttgaggctgcagtgcagcatgattgcacctgtgaatagccactgcattctagcctgggcaacatagcaacaccctgtctctaaaagaaaggtattatttggtgtcatgtggtgtcagagtatgggctgctgtgtgtagcaaaggtgacatcagtgtgacatctctagccctttgttcatggggtgggatgatattaacatactacatttattttgtaggaagatctactgtagtgtctctgaccagaggttcagtacaaaagaatcatccacagttataatgcagcatagtacagtggttaagagttggaactctggagtcagatggcctgggttcaaatccgggatgtacgaattatttcacctctctgtgtttcagttgcctcatttgtaaaatgagtaaatagttatgtactatacaggattgtaatctgaattgttcagcacacttgaccagttcatcctgatacaagaagtctgaaaaccacactttggttacctccaactagatcttttctaggtgagagttagtccctagcctacgtgaactgaggtgtgtaagttcctagaatttcctaatagtaagaaaggtagatgggctgcagatatttgtggcttgtagtaggaacataacaaactaaatctctaacctgggctgagactgatgagcaaaagtaggttcctatcagaataaacgaaaattagtcccatgcttaaagaatgacagtcatagtattttaaagttgttttgctaatcacttttttttttttctgttggttaaggttgcatgatggaatttgaacattacttcaagaggttttgtattttggattagttaattgggtttgtcctctgctgactgtttcttcggatgcattttttggtgtgctcttgagggattaaatgcaaagagatcacaccatggactacaaggaaagctgcccaagtgtaagcattcccagctccgatgaacacagagagaaaaagaagaggtttactgtaagtatttaacataaagcatgtgggaaaaaagttgaatgtagagaata

SEQ ID NO: 40574 - DNA, 2300 bp, Homo sapien
catcctcattgttgttgtaaattgatttctactctgaaaaagtattttatctcacaactaaaatagattatattctcccagagaaacaaactctgaggtgttttgccactcctattatatatgaaaagggatgacctcaattactttttcatggaaaatgatccaacccaatgcaatggagcagagttgataactgtatcaagaacactaaaggttgaggccaggcacggtggctcatgcctgtaatcccagcacttcgggaggctgaggtggatgattgcttgagcccgggagtatgagaccagcatgggaaacaaaatgagacccctgtctctacgaaaaaaaatttacaagtttgccaggcatagttgaagtcttagctacttgggagcctgaggtgagaggatcacttgagccaggagattgagactgcaatgagccctgattgggccactgtgtcctgggacacaggtagaccttgtcttaaaaaaaaaaaaaaggaaatactaatggtggagaagcaggtacaatttaagggtttggggttttttggtaacagtttctttttttttttttttggagacagggtctcgctctatcgcccaggttggagtgcaatggtgcgatatctgctcactgcaacttctgcctcctgggttcaagtgattatcctgtctgctaatagtattaatccagagtagctggaattacaggcgcgcgccaccacacctggctaatttttgtatttttagtagagatggggtttcaccatgttgtccaggctggtgtccactcccgacttcaagtgacccacccgccttggcctcccaaagtgctgggattataggcgtgaaccaccgcacccggccaacctcaataagatttaattcaagtactgtacaattcaactatttaaaatgtacaatcaactggctttcagtagattcagagttgtgtgactatcaccacaatcaattttagatcatttccatcacttctaaaagaaaacctgtgtgaattcatgaacaacaaaaaatatggtacacacacagtggaatattattcagccttaaaaaggaaggaaactctaacatgttacaacatggatgaaactggaagatgtttggcaaagtgaaataagcccatcacaaatggacaaatactgtttgattctatttacatgaggtacctggagtagtcgaattcaaggaagcaaagactgatggttgccaggggatgaggaagagaagaatggggagttgtttaatgtgtatggagtttcagtttgggaaaatgaaaacagttctacagatagtggtgatgagtgcacagtgtgaacgtaggtagtgtaactacactttaggatggttaaaattgtatattttatgtatattttaccacaatttaaaaagaacaagaaatcccatacgcattagcaatcattctgcattctcaaccaacctctgggcaaccacaaatctgctttctttccttatggattcgcctattctggacatttcatataaacaaaattacacaacatatggccttttgtgtctggcttcttacatagtgtttgccaggttcatccatgttgtagcatgtattagtgcctcatcacgttttatggccaaaaccattccattgtatggcttacaccacagttatccattaatcggtgatgggcattcatattgtttccactttggggctactatgaataatactatgaacattcgtgtagaagtctctgtgtgaacatatgttttcaattctcttgggtgtatttataaatacctaagagtggaattactggatcatagggtaactttatgttgagtccttcgagggaatactggaatgtcttctaaagtgactagacattttgcattccctgaagcagcgttttgaattttttaaacataacatcatttgcctgagataacaacaaaaaccaaacgtagacctattttttctctgcttcgctgggagggagcaagagtgaagctattaaaacgtaagggaacaagcccggctagttcccctgctgacccgagggcgcgggcggtcccggcaggccccgcgacgcagccaacggccgggacgtgcgcgcatgcgcgctaggactccgctccgcctacgctgcaggcggagagcaaccgccaagcttggtgggagtcaaggtgagtgcaaagcactacagcgctggggtcccactaactcgaggtcaccgctgtcagtgggaggggtcctcatgagtctggactcgctttcatccgctttggttgtgaagtgttttc

SEQ ID NO: 40575 - DNA, 2300 bp, Homo sapien
tggcctcacccaaccatttaattaccaatagtcgcccttcattccaccccagaaacctaatgttctagtgcagcaaagatgtgatgttctgaacacaacacacattttgagatcattgtccttatggccacggagaaataaacgctaaagtttcacttttatgttgtagcaaaaaggacagtcttaattggttttctttggaaagtagcctgaactccacgtagtgggtgtgtggatccagtagtgtaaaactgataatgagggtggaaggtgacctccatctctggaacactttctctttctcttcacctctcctccaattagtgaaatagtcgtctatcaaatgtcaccttaaagtagaattcataccttcttccctatgaccccaccatcttcaatgaaaatgtcttaaaataatggaaaatgttatgacccatatacaaggatgaccccaaattttgtgaaatatttcatatatgttgttcctttcatgctacctggtatattcatatttctattacagcacttaaattgccatgtaactgtttacatatatgtcttctctcactgcactctttctgaaggatagggacaatattttactcatcttagtatccttaagtgcctaggacaatctagtatccaacctatagtaggtgccaaataaatatttggtaatgaggccgggtgcggtggctcacgcctgtaatcccagcactttgggaggccaaggcgggcagatcacttgaggtcaggagttcgagaccaacctggccaacatggtgaaactccgtctctactaaaaatacaaaaattagctgggccgggtgacacatgcctataatcccagctacttgggagactgaagcaggagaatcgtttgaacccaggggtggagactggagtgagccaagatagtgccactgtactccagcctgggcgacagagttgggactccatctcaaaaaaaaaaaaaaaaaaaaaacaacctggtaatgaatgaataacgtgttagtcattatttctgacttctctgtctctgcctagcaacttcttgaaaggcaggatccaatcttaatcattttattttagcacctattaatcattttatttctagcacctgttacaactactgacatatattgtttccaattagtatttgctgtctttcaatgaatttcacatattccattctttactcattactgtggtttaatgttttatgttggtcactgacacaatatttaaaattggaaggggctttaatcatctgatacaacactttcctttcctacagatagatactgagccaagagaggtcagatgatttccccatagcaaccaggaaatgctgggtctagaaccaagttctcaggtttcccagtttaatactaattctactatattttgttacttagattgaatttatgaaacaacttttaccagtttcattttttaaacaacacctggaaaggaccctcatcatcagatattgtttatttcaacaaacatttttgggagtacctctgttaagagacatttgaggttcctgtttttaagttttcgatcttgtggaggatctcataacagtcttgataaaaatgttatttgggctgggcgcgatggctcacacctgtaatcccagtactttgggaggctgaagctggcggatcacgaggtcaggagatcaagaccatcctggctaacacaatgaaaccccatctctactaaaaatacaaaaaattagccgggcatggtggcacacacctgtagtcccagctacttgggaggctgaggcaggagaatcgcttgaacctgggaggtggaggttgcagtgagctgagattgcgccactgcactccagcctgggcaacagagcgagactccatctcaaaaaaaaaaagaagttatttggcaaaagaaaacaaaagttttgttttcattgggtaggaatgtttttaagttggaaattttgcctagttttagttcactgtcaactttaataatttgtaaagtcttattagagattttcaaaaataaaattaattttatttctaggttttcacatcctttctatgagtttcgccatctatagcttttatcaacaattgtggtttaatcaattagaaatattaaccaggagaaaatgtcaaatctaaaaatgaaagaggcggccctcatctatcttgacagaagtggaggcctccaaaagtttatagatgattgcaagtactacaatggtacgttcagcaaaggtgagttatttttaaaactttcaaataaactcctacacatagcta

SEQ ID NO: 40576 - DNA, 2300 bp, Homo sapien
acctgtaaaaattatggacatttttcttctttctttttttgagaaggagctttgctcttgttgcccaggctggagtgcaatggcgtgatcttgactcaccacaacctccacctcctggattcaagcaattctcctgcctcagcctcccaagtagctgggattacaggcatgtgccaccacacctggctaattttgtatttttagtaaagacgaggtttctccatgttggtcaggctggtcttgaactcccgacctcaggtgatccacccgcctcggcctcccaaagtgctgggattacaggtgtgagctactgtgcccggccatggacatttttgttatgttaccagaatgttatcacccttacaaaagtaacaataattcccttggtattatgtaatatccagtttacatttaaatttgcccaattgtttcaagaatatcttacaataggtttgttccaaatcaggaccaaaacaaggttcacacattataattggttcttacatctcactaagtctctttcaatctagagccatttcctctccctccctttttagaccattacctttttgaagaaactaattggtcctacgttatataatcttgatttgtctaattgcttccttgtagggctatttatcttatttcccaacctcatatttctaaaatagaagatgactgtaaaggctttttagattcagattcaaatcacttgacaagaatacataatagtataatgtattacatattgtgctatatcaggaggatatagtatctattgttgcacttttaacagtgtcacaattgattagtgggttcctgtgatgtcattctcatctctccattatacaatttcccatcaactttcacctaatggttttagcagccattgatgttcattgcctagaattcgttatttcattaggagatgcaaaactgtaatttttctaattttagcattctttctgaattagctgaaattcttctgtaagagtaattttctctcatcagctatttagttactctgaaatacaatttgtacaggaaaggcagggtaaatgtttgattctttgcctttataaagagtaatgagttgaaatctagcagcttccaataatggccaatattttttgagggggagggtttccatttttaaatataaggaactcatgaacttttaaatatatatggtatgtttcagtgaatctttgtcattccttttgatgctcatattagcctaccttttgtcactgggggtcccttcaaggttgctcctatgtccttttgacacaggccatttgttagaccataccccaagtccatctgctatattttctatcccaggcctgaaatcagccatttcccccaaggaatcctgattccttttagtaagaaatgatacttaacaagagatcacaatctgggcactaggcgtgcttctttgctacctggttgacattgttttattttatttatttatttattttattttattttgagatggagtctcactctgtcacccaggctggagtctcactctgttgcccaggctggagtgcagtggcgcgacctcggctcactgcaagctccgcctcccgtgttcatgccattctcctgccttagcctcccgagtagctgggactacaggcgcctgccatcacacccggctaattttttgtatttttagtagagaaggggtttcaccatgttagccaggatggtctcgatctcctgacctcgtgatctgcccgccttggcctcccaaagtgctgggattacagggtgagccaccgtgcccggccctggttgacattgttttttaagtcttttcagtggatatggtcagaaattgtgtatatttaaggaaaaatttaaagttcataatgctattttcaattaaaatattagattacaggatttttacttctttaattttatacttgaatgttgtttctctaatgcttaaaattttggttcctaagaacaataacatatcattacttgactttctttataatatacttactatattgtaatacaagtcaaattggatttgcaattttcattaataccatttttatgttcttattagattaatatagtgctgaaattaacacatttacctcccctgccaagttatggtcttgatctttgtgagtttccacttgattatacatctcagagattttatatgatgcaaggaattgtgattgcaatgacaactataaccaagtatacacaaggggcaagatttctttgttcagatgaagcatgccctctttcaaaaggtaaatgttaaa

SEQ ID NO: 40577 - DNA, 2300 bp, Homo sapien
ggcagtggccccttcctaatctgtccacccggctcagctatttcttcccagtagaggtcaatgaatgccctgtgaatgcctgcaggagacaacacaaagctgttagcaacgcaggagctatcctctctggaaccatggcaggggaattgtccatgtttgcctccagttatcatatggccctgcactcagtgacaccaagaacttgcctaaattgttgccttagcatctatggatttaatgtccaaactaactctcacttataccttttagtaatggtggctcccacagcttccccttcacactggaggtgacagcccaggttgcaaaattaggttgtggaagcaacatccagccaggaatcttagtccaagaagcaggttgaggtccatgtcactacttaacaggagaaacggcttccatttggaggcccaagcaaagatttttaagctcctgtaaaatactttgcaatcctttgttaaaggaggtacaatcacaatttgttttgctaggcttactaggcttagatattcatactctatgttacttgagacaaattgaaattttgtaccggattttgtattcgtttcttagatttccggtgtctaaaggagagattggccaggcgctgtggctcatgcctgtaatcccagcactttgagaagccaagtcgagaggatagcttaaggccaggagttggaggccagcctggccaacatagtgagacccccgcatttctacgaaacgttttaaaaattagcagggcatggtggtgagcatttagctactcaagactgaggtgggagaatctcttgaggatcctagaagatggaagctgctatgagccatgactgcactactgcactccaggctgagcaacagagggagaccctgtctctaaaaacaaaaccaaccaaccaaaacacaaaaacaaattggccgggcgcagtggctcacacctgtaattccagcactttgggaggccgaggcaggcagatcacgaggtaaggagatggagtccatcctggctaacacggtgaaaccccggatctactgaaaatacaacaaaattagctgggcgtggtggcgggcgtctgtagtcccagctactcgagaggctgaggcagaagaatggcgtgaacccgggaggcggagcttgcagtgagctgaaatcgagccactgcactccagcctgggcgacagagagagactccgcctcaaaacaaaacaaaagccaaaaatattaaggagagatgacctatctttaagtgagtagattgtttaatcatatgctttcatgtgtattctttctggcaacaagatcataagcctttctgctccagcatcaagcccagtgctttgcagtcaggattctataatacaatgagaaaaacagaagtaataagacgtgaaaatcaacagcaaattataacatgttcataaacaaggtaggtaactgctttatgaatgctatatatatgttttttggtttgtttgtttgttttgagacggagccttacccaggctagagtgcagtggcgcgatcttggctcactgcaacctccgctgcccgggttcaagcgatttctcgtgcctcagcttccgggtagctgggactacaggcacgcgtcaccacaatcggccaatttttttgtatttttagtagagatgggggtttcaccatgttggccaggctggtctcgaactcctgacatcgggtgatcctcccgcctaggcctcccaaagggctgggattacaggcttgagccaccgcgcccggccttttagggcatattctgctcgtttgcatccactgcaaactggtaaattaaacattgactagctctagcagagttactcctgagcctgaaaagcccctgcgggaagtcacaaagcccccacataaacttgctgtgtggcacacagcgtcgccgcaccgcgcaaccagggaagagggctaaggtgcgggtctcatctcccctccgccccctccccagagccggtgcactcagccccccttcgcacccgcggaggggcggggccgcgtaccggaagaggcggggccaccggagtgcctaagagctgtcttccgatgtcgctcttcctttcccgcgcgaccggcgagggaggaagaagcgcgaagagccgttagtcatgccggtgtggtggcggcggcggagactgcgggcccgtagctgggctctgcgaggtgagagtgatcgcggtcttaggtccaactcctctacgtgccgggttcctccgccatatgggtgcccagcgcggcccctgtcccttccccgggc

SEQ ID NO: 40578 - DNA, 2300 bp, Homo sapien
ctccagccttccgagtagctaggatcacagccgcacgccaccatgaccagccaccctttgtatttttagtagagacggggtttcaccttgttggtcaggctggtctcaaactcctgacctcataatccacccgcctcagcctcccaaagtgctgggattacaggcatgagccaccatgcccagccattcttttatttcttatccttctgtggctttttattctgttaggtaccccctctttaaactccctcccccagtgtctgaatctgaattatgagtttcggaatcactgaattattgtacttctcaggacaaatcttacctctgatgattctttctataccatctttactagtttttcttccctcttttatccaaactagttggcatagctactaacccactatttcgctttccttattttctccctccctaccatttatggcctcatggtttaaataatcagctttatattggagactattaaaacctttctcacctcacacttaatgtatgtaaaccaaactcatccacttcccctcaaattactcaccatctctcctctttccccagtattgttcctttatcatagctaacatctgggaattatcttcaacttctcccctccctttatactatccagtctctattaaatcatgcttcaaaatatctcctaaattttttcattcttttccactttctttgccttcactccaacccaggccaagattgctctcacaactggacttaagcaaaaatatcctgaatggggttagggctcctttgccaccattcccccaccttcctaggatactcttattgtaatggtcagggggataaaatgaaaggagaagtgggcttgaaatcaggaggccaagaagttccctctctgtcaccccaggtgtgaccttgagcatgtttctttcttcttttgagccctgggaatttccttatctgcaaaatggcaatttggattaccctcatgagctctaagctgccttgcattctaacaatcttctgctctgacacgtctttgctcaaagaatggcaatgacgaccttttctccaccagaatcacagctggtactcaaatgttttccagcttgcattgtcccttacatccagactgctcacttcaccatatccctaatgagccccaggctttccactataaatgtcagttccctgtactattgttcttcttctgcaattaaattactcattttgcaaacatttatggagtaactattaatgaacaaggcactttgctaggtcctggaaatagcgaggtaaaccacataatccttgccctcaaagaatttaccacctcattggagatatggctaagtagctaacatgtaatattgtattaagtgctatgctggaaaaagtaatacatctcagctgtttggggggaagaaagggcattacttaacaagatgggatacccaggaagacttcggaaaggttgcactaattccaaactgagtctttaaatcttaaaaggaaaaataagactgaaggaggtgagaaagtgtgtgctatgcctaccttgaagggcggagaagagaggggaattattattatttttattattaagaacagggtatactgaaaaacactggagtgtagagggcaggcggcaagcggtgaggttggtcatgataaatggccctcaatgtcaccctaaggaatttgaggtttcaccgaggaaaggatggagtacaggctgtattctgaatcagataattcctttcctggtctgttattgggaaaaggtggttgttgggcactgaaacggtcaaagccgatggcaggataatccggtagggggaaatggtggtctgccaaaaattgttccggctactaactggtccactaaaacaatgcggtgaccgatgcctcacggcctcttcaagctaacaggactctagtcggagtcggcctagtgaccaccgtcagtgcccatcagcgcccggccgccgcctcacaggggaaggacccaccggggagggagcagcctgcgatgtcgcgagatttctcgtgagcggcgcttggacagcgcgtctggtcgcccagcaaccgccgctggtctgcgtagggacccggcgccgatgaaaccgaccaaactggagttagctaccggactgtcccgcgagcggtgagctgcccgcggggaataagcgtggggaccgaggaaaccctagaaccatgtttctcaaacttgcctgccagtaagactttccgggacatttgttaaaatgcagatccttgggccctatctttagacatacagaatt

SEQ ID NO: 40579 - DNA, 2300 bp, Homo sapien
gaagaggttacagcggccacctggagcgggaacagcatgacagacctccgggccggggctccgcccctcaggcccagccctccgctcgcccttcgccaaccgccgggtacggccccgcccccactgcaggcggccgcgcggcaagacatcgccccctgctgtcctggaggccgcatagctgcccgctgctctcggttcgccagtacgctggccggggacttggtcaactcgttctcctgctgtgcccaggggctattaaactgtgggggccacttctcaggctaaatctattgcagcctctccagcctcccatgcaccagccagcttaggaacagtgtaagagcctggaaagaaaaatggggaggggtggtagtgagaggaaaagtgttggcatacctctcagggcattactcctagcccaggagtgtggtcaacgttgggtcctgggctttcattaccattttcaacatattattcagttcaccccaatacaatcgcatatggccatatgctaccactagaaaagagacctctagtttcccaggagagtggaactaagggtaggtattaatgtactattttaccctaaatttctttgtaagatggttttaaaggaaattttcttcaacggaaagtcagtgccaaaacagcaagctgtggtgtggattcaataattctaatgtttttgtcttaactgattattacaacgcattgtaacagttatagaagcacctacggagacttacagacataatggaaggaatggtaattggagcgtcaagaaagagttcgtggtcgatctcactggactgcatttttaaagattaataggagttcccaggcagaaaatttacgaaagagcgtttcaagcaatgctgaccacatatgcaaagccaaagtaaagatatctgcattgctagaatgaaaagtttcaaggggggactaaaaagagatgaagctggaagaggtgcataggggccaggttgttaacagctgtggtgctatcttttcttttttcttcttttttctttctttctttctttttttttttttttttttttttgagactggctctgtctaacaggctggagtggcgcaatctcggatcactgcaacttccgcctcctgggttcaaacgattctcctgcctcagcctcatgagtagccgggactacaggcgcacatcatcacgcccggctaatttttttttgtatttttttagtagagacggggtttcaccatgttggccaggctggtcttgaactcccgacctcaagtgatcagcccgcctcggctgcccaaagtgctgggattacaggcgtgagccaccgcgcctggcctgtcatgctatcttttcaggaaataaaagaaaaaaaaatcttgaacacctatgctaggtgctaggagataaaacaaggaacgcagacctgctccctgtgtcttgaaacttaaaatcttgcacggatggaagaatgagatggagaaaaaagaaaacctaaaacacgtgaactaataaaaaaattaaacattgtattaactgtaggaagaaaacaaaccagttacccagattaattacgctttgggaacaaatgcggttcacaggagtgccaaagatttaactgtaacctgttacgagaactgagtactggacattttcagatcagtaatggcacattatatatacgtagatgttaacttttaccaaagcgcaaaaaagcaatcaaggagtacccactgcctcctcgcatcgatagaaaaagcccatctgcaagtgaagtgccaagccaccacgagcccgttagcttttacgcatgtacagtgagtcatcttgaagtaaacgggaatgccatgtttatcttcctctcaaccagcttccagaacgacttttagctcagttgtacaacagacagccttaccttttagtctttcaacaaacttatctcatttaaggtacctatacccacacaaaaacactttccgccctccacatcccgctcttaaggctccagctacctttaatatggcggaggccgagcctgcgcattagaagcagagaaggcaaataccagtttctggaataacgttacatgcccttcttccggtgcggaagactataccactcccataccctataactttgtttgttctatttcacacatataattttccgagacaagatgttctcatttaagcaacaagaagattcgtctctcgctattactgtaactgctgtttatatcgtcatgtcccggaaaggtccctgtcttccctgaatggtctctaccaacttcacctccggt

SEQ ID NO: 40580 - DNA, 2300 bp, Homo sapien
ggaaaattatatgtgtgaaatagaacaaacaaagttatagggtatgggagtggtatagtcttccgcaccggaagaagggcatgtaacgttattccagaaactggtatttgccttctctgcttctaatgcgcaggctcggcctccgccatattaaaggtagctggagccttaagagcgggatgtggagggcggaaagtgtttttgtgtgggtataggtaccttaaatgagataagtttgttgaaagactaaaaggtaaggctgtctgttgtacaactgagctaaaagtcgttctggaagctggttgagaggaagataaacatggcattcccgtttacttcaagatgactcactgtacatgcgtaaaagctaacgggctcgtggtggcttggcacttcacttgcagatgggctttttctatcgatgcgaggaggcagtgggtactccttgattgcttttttgcgctttggtaaaagttaacatctacgtatatataatgtgccattactgatctgaaaatgtccagtactcagttctcgtaacaggttacagttaaatctttggcactcctgtgaaccgcatttgttcccaaagcgtaattaatctgggtaactggtttgttttcttcctacagttaatacaatgtttaatttttttattagttcacgtgttttaggttttcttttttctccatctcattcttccatccgtgcaagattttaagtttcaagacacagggagcaggtctgcgttccttgttttatctcctagcacctagcataggtgttcaagatttttttttcttttatttcctgaaaagatagcatgacaggccaggcgcggtggctcacgcctgtaatcccagcactttgggcagccgaggcgggctgatcacttgaggtcgggagttcaagaccagcctggccaacatggtgaaaccccgtctctactaaaaaaatacaaaaaaaaattagccgggcgtgatgatgtgcgcctgtagtcccggctactcatgaggctgaggcaggagaatcgtttgaacccaggaggcggaagttgcagtgatccgagattgcgccactccagcctgttagacagagccagtctcaaaaaaaaaaaaaaaaaaaaaaagaaagaaagaaagaaaaaagaagaaaaaagaaaagatagcaccacagctgttaacaacctggcccctatgcacctcttccagcttcatctctttttagtccccccttgaaacttttcattctagcaatgcagatatctttactttggctttgcatatgtggtcagcattgcttgaaacgctctttcgtaaattttctgcctgggaactcctattaatctttaaaaatgcagtccagtgagatcgaccacgaactctttcttgacgctccaattaccattccttccattatgtctgtaagtctccgtaggtgcttctataactgttacaatgcgttgtaataatcagttaagacaaaaacattagaattattgaatccacaccacagcttgctgttttggcactgactttccgttgaagaaaatttcctttaaaaccatcttacaaagaaatttagggtaaaatagtacattaatacctacccttagttccactctcctgggaaactagaggtctcttttctagtggtagcatatggccatatgcgattgtattggggtgaactgaataatatgttgaaaatggtaatgaaagcccaggacccaacgttgaccacactcctgggctaggagtaatgccctgagaggtatgccaacacttttcctctcactaccacccctccccatttttctttccaggctcttacactgttcctaagctggctggtgcatgggaggctggagaggctgcaatagatttagcctgagaagtggcccccacagtttaatagcccctgggcacagcaggagaacgagttgaccaagtccccggccagcgtactggcgaaccgagagcagcgggcagctatgcggcctccaggacagcagggggcgatgtcttgccgcgcggccgcctgcagtgggggcggggccgtacccggcggttggcgaagggcgagcggagggctgggcctgaggggcggagccccggcccggaggtctgtcatgctgttcccgctccaggtggccgctgtaacctcttcggtccgcgacgatcctctagagcactgtgtgtctccccggacgcgagcccgctcccctgagtaagagtcagccagccgcggatggggagcgtgagtggcgaggtgtggcctggggtggtgtaggttgaggg

SEQ ID NO: 40581 - DNA, 2300 bp, Homo sapien
acccagtttttttaagggagaggatcttgctctgtcatccaggctcgtgtgcagtggcaccataatagcttactgcagcttaaaactcctgggctctggggatcttcctgcctcaacctctcgactagctaggactacaggctcaggccaccatgcctaatttttaaattttttgtagagatagagtcttggtatgttgccccggctggttttgaactcttgggttcaaacgatcctcccttctctggctcctaagtagttgagactataggtttgtgccactgcatctgtctagttgtagttttaattatttgttttgagatagagtctcgctctgttgcccaggctggagtgcagtggcgcgatctcggctcactgcaacctctgcctcctgggttcaagctattctcctgcctcagcctcctgagtagctgagattacaggtgcctgccaccacacccagctactttttttgtgcttttcatagagacagggtttcaccatcttggtcaggctggtctcgagctccttacctcaagtaatccacccaccttggcctcccaaagtgctgggattacaggcgtgacccacagcacccagccttgtagttttaattatcattcctctttgtcttaggtttatcctattgtaaactaaatcacagatactcttctacagtttttattcattttgtatgagtgaaatgggtccttgtagtgatacctttatagctgaaatttaagagtacagtgtctcctcaattagtcacatctccttgtaagtcacccattgtgtaaaggcctattattatttcctataatttgtcttttgattatttttacataatgctttttcatggtagtataataatgaaaagaaagtaaatgttctatggtaatttgtttcatagagtaattatgatgaatgctctgttagaaggtaaattaattatgaagaagttatatactttagtcttaagtattttatgtaagccacaactgttatagaaaccaaatacttctaattactatagttctgaagcataatgttaactatcttagggtcattgatgttatacttgatgaagtgacatcacttcaaatgaccctaaaatgacacaaatgctttacttgctgctagatccatcagaagacaacaggcacaataagtaagcctcaccgtgttccttagctcattaagtcaattgagatgctattgttaatgcatggtttaaaagaataggatatttacattgttctatacagttcctaattttatgtctgtgacttacctctaatgccataaaatgttggtacaagatgacaaaataagaattaaaaagttagtgttttctgttgactaaacattaaattaataaagttataaataactcagaaggcattatatattgttacttgtcaagacaattttacaatactatttgaattaatagtgaaaaacaaatactcttagtaaataaaaatttaacttaatatgaataataggccgggcgcagtggctgaggcctgtaatcccagcactttgggaggccaaggtgggcggatcatgaggtcaggagtttgagaccagcctggccaatatggtgaaaccccgcctccactaaaaatacaaaaattagccaggtgtggtggcaggtgcctgtaatcccagctacttgagaggctgaggcaggagaatcacttgaacctgggaggtggaggttgcagtgagccaagattgcgccactgcactccagcctgggcaacagagtgagactttgtctcaaaaaaaaaaaaaaaaaatatatatatatatatatatatatatgtatatatgaataataatgtaaatgaaaatgaattatgtttttctttccattcttccacataaacccccaagtagaattgaaaaacagcagtaaaagccaccttaaacttacactttttgtaaatttgtaaattgcttgttcctggatgggcaggtagtgtgttggcatcatcctggcagcattgttgtcttttactccttggcacaatagaacatccattgtgaccctgtgtgactagtgatatgtaactttggtaactacctctctctatgcagtcagaccgctaacaggagaaatggaatattaagtatagtatattgttccccctcaccttttctcatttcttcctctgtctcaggcactcattcatatattcatttgcagatttattcaatgaacattttcttgggttaaagttatgtgccagcattataaaattgaatagcgcatgggccttgccttcatagatttt

SEQ ID NO: 40582 - DNA, 2300 bp, Homo sapien
ttaggtgtatgatccattaatagcttaaaaattggtattctttgattttgatggaaaagtgacccctgtgaatgtgatttttttttccatggagtaggaagaagggggaattgagtattgaatatgaaattttgatgaattataaatgatgttttctttaggcatattggacttgaagaagtgattgcatgcaaattgctaactaaaagtactaaatattaggcttatgcatatttaataatgttgtgagaaagaagtgttggaaaaagccctagtatataaaatcataggatgtgttagaagattaaagttcttttttttttttaaagacagagtctcattctgtcgcccaggctggagtgcagtggtgcaatctcggctcactgcaacctctgcctcctgggttcaagtgattctcctgtctcagcctcctgagtagctgggattacaggcacacaccaccacgcctggctaatttttgtatttttagtagagacggggttacaccatgttggccaggctggtttcgaactcctgacctcaggtgagccaccgcgcctggccagattaaagttcttgtagctcaaaaattaatagcactagatagagcaaccttgaagctagaggaagtacagacaagaaaaacaaaaatatgctgagtagtatgatccatacctaaggataactaaaatctgttgataactttaaaccagagacatgaatacctggttcccatgctgctgttcttccctgcctcattcatcgggcgtgtggactatctatctcttagggccttctttccttcaaatcttaggctctagagtactcaacgctgcagactccaggtagcattcaagatgaaacttaattgtgagtccttgtgacctaaatcctcctccacctaatagttttagttctttctccattaacctctatagttaggaaataacaaagggcatttgggagaaatggctcttgcattaaaaaatgattgaatactaaaatactaatttcactgttattttagaataatcaattccaagaattttgacacataatagcagcaatcactatagaataatataatcatgaattagttgcttagaaccttctatataggaggacttttatgttccttacattgtttcactttaattctttaagcactcctttgagatgtaggcgttaataactgtgtttaccagaaaaaagagaaaactgaggacaagcaagtttcttaaggtcacacggtctgtttggtggaactggaatttaactcaaagcttttaacagtacagtaaatcatgtagcctccctgaaaatacaggagactgaaaaatttaggaacatgcaaaaagagggtacaagtgttgagtttatatactatcaggaaaaaaataagtgatattctaacttttcaatagttttacaagataaataactaagtttaattctttagattgaggaaaagaaacaaagagaggaagcagagcgagagagactgagaattgcagaagaaaaagaagaaagacggcttgcagaacagagggcacgaattcagcaggagtatgaagaggaacaggaaaagaaaagagagaaagaggaggaggtacatcttttttccctattgtattttactacttagtctgaaggtgaaatctttgacttgaaaaggtatttcttacttataaaggagaacagtgttggagtacatttagaaaatatcagatcaatatacattctttggatattattttattaaggtgaaagggtaatttaagaaaggagataagtgatgactttaaaaatatagatgtaggctgactgaagactttataaaagatgcctaatattttatttttaagcagacaacttatgttaaagaacaccatatcatgtcatctatatctttatctcattttatcagataaataaggcagcacatttttgaatgtactatagaaggaatatatggaatgcatatttctctttttattttaaagcaaaggctaaaaaatgaagagcatattcggttagctgaagaaagacaaaaagaagcagaaagaaagaagaaagaagaagaagaaaaatataacctgcaacttcagcactactgtgaaagagacaatttgattggggaagaaacaaaggtaagtttcagacaaaaatgtcaatcaaacccatagtttaactcactttcactgtgagagttgtacagttgttagaaaaggggagaaagaggaggaggtgcttttgttcctgttctgtcttactgtttagtctgggcacaatgtactgaa

SEQ ID NO: 40583 - DNA, 2300 bp, Homo sapien
cggggtttcaccatgttggccagactggtctcaaactcctgacctcagatgatccacccacctctgcctcccagagtgctgagattacaggagtgagccaccacgcccggccttctctctctttctttctttctttctttctttttctttctttctttctttctttctttctttctttctttctttctttctttctttctttctttctttctttcctttccttccttccttccttccttccttccttctttcttttcttttcttttcttttcttttcttttcttttcttttcttttcttttcttttcttttcttttcttttctttttctttttctttttctttctttttgttttaagagaccaggtcttgctatgttgcccaggctgatctcaaatttttgggctcaagttatcctcctgcctcagcctcccaaagtggtgggattgcaggtgtgagccaccacaccctgcctcacagataattttttattgtaaaattcatcatttaagaatttaaggtcgaggcaggcggatcacttgaggccaggagatcgagaccagcctgggcaacatggtgaaaccccgtctctataacaaatacaaaaattagctgggcgtggtggcaggcacctgtagtcccagctactcaggaggctgaggcaagagaatcgcctgaacttgggaggcggaggttgcagtgagccgtgactgcactgtggcactccagcctgggtgacagagcgagactccatctcaaaaaaaaaaaaaaaagaattaaacagaattgttagtttcccataattatatttcttgtaatttcttatgttttttaaaaatgctattttttaaggaatatatacttttatgatattataatttaattgtaaagtaccataaagttttaaatcagctttatcccatttaatgcatttgcctttctgaaattaacattgctatcattttctttcatttatgtatgtctgatatatatatatatttttgtctattccttcagttttacctttgtgtcaccatattttttatttagttagcttctatctttagtttgttgaatttttaaaatcctaatctgagttataatctttttatttttatttatttatttatttatttagaaatagagactcgctttgttgcccaggctggagtgcagtggtgcaatctcggctcactgcaacttccgcctcccaggttcaagtgattctcctgccctagcctccccagtagctggaattacaggtgcaaactaccacacctggctaatttttattagagacggggtttcaccatgttggccaggctggtcttgaactcctgtcctcaggtgacctgcctgcttggcctcccaaagtgctgggattatagacatgagccactgcacctggcctaatcttttaaaatagggatatctaaatccatttatgtttatcaaaactaatgtctttgcattaattgcatttctgacttttttgtgtttttcttccttgatagctttttggtcttttgttatgtgtactatggcttgtttgctccatcctctacagggatttagaatgtctatgttgtatttacaatgaagtttttggactataaggtttaatacactataaactgaaatatagaaccccatcgtgatcttgaaaagtccctcatccatgatgctgttagtgattagatctagattttcgaggttgatttgtattgctttccagaaggattttgttatttaatttttttgtattgtcatggtacctttttattattaaagatgattctttagttttgttatattttttcttttttgttgctttacttgtgtttgttgattttttaaatcctaatctgacagtcatactgttttaataaagatgtctaaatccatttatgtttatcataaccaacatgtttgatcttatgtaattgaatttctgacttttgtagaaagcattttattaaataaaagcaataacaatctaaacttcttagatgactttcttaactataaggggtgtgtgtgtgtgtatatatgtgtgtgagtgtgatgaagcaaatatgctcttaaattttttaaatttttcagcacatgagacagccttctcctatagttcctgctcttcagaacaaaattgcaagcaaactccaaagacctccttcagttgacagcatcatacgttcctttattcatgtatgtacttttgtttttatttgttcatcctagctcagttattttggattgggggatcgaatgaaattttctttttcattatatttggataggt

SEQ ID NO: 40584 - DNA, 2300 bp, Homo sapien
agttcccatgtggcggcagggggagggctgggggatgggttgtggatgcaggaagtctggtacgtttggggtaggagcttgtgagagacctcctctgccagcttctggtttctcactgagatgggaagaaaagtcatctaccatgtgagatttggaagaatgttttagctacttgagaagtgaaaacttgagctggttggccaggagtgtggcctaggccaaggtctgccaagggctgggctagcaccgagcccgctggtttagagagaaaccagtctgctttctccagtcacacatgatgacatggccattttgccagccagttactaaaaagaagaggaggggttgtgaaagagaataattaaaatgatgcatggactccatagcagttgagaagagaagggaggacttgaggggctgaggaacgcagggccagggagttgggagtccaggagggtctggactaatgggaggtggtgcttggggacgaggatgcgtactggaaggtggaccttcccttactttctgttaggttagatcaagctgagtatctgtggctttcttgtaaaactggtctttggggagcattgagttgtaaatcaagtaaaattattgtgactgtgtgtatatgctggggtggtttgttttccaaagagagatgcggtggactttgatgttcgcgttgatactcaagaccaaggaatgtaccgctttttaacatcacaacaactttttaagctactggactgcttattagagtcacatagatttgcaaaagcgtttaattccaacaacgaacagaggactgccctgtggaaagcaggtaagctgcacacgcctcacatttaatgtttactgttgatggatgtgggacaggtacatacaggtctcagaactcattgactgtctgctataggtctgtgcatgtcactatatgtactctgaccttaacagtaataaagtaacctcacaacgaggcccttttctggtctacagtaagccagataactgcttgggtggattttttcccccttggtctattatttgacttacattgttctttcatcttgtttacccaacctggaccttcttgttgatactcattggcatgacaaaagctgtcttttcattaggaaataaatatgtgtaaaagtcgcacacacaaaacctggcatgtgtatttgaatggcttctctgtttactgggagtggccagagctcagagtgaaggtgaatttattgggatgtgaggtatatttgttctagaacaagttagacattttaaacaaaaaataagcttttattataaaccaaagtgacattgttaattttttaatttaaaaaatagagccagctgtggtgactcacacctgtagttccggctactcgggtggctgaggcaggatgattgcttggggccagaagttcgaaaccaccctggccaacatagcaagaccctgtctctacaagaaattaaaaattagcggggcatggtgtcgcatacctgtaatcccagctactcgggaggctgaagtgggaggatcacttgagcccaggagtttgaggctgcagtgagccatgatcacactactcccctccagcctgggcaacacagtgagaccccatctcttaaaaaaagaaaagaaaaaagaaagaaatataattatgagttgcaaaacagtgctgggaggatgaggggctgcagaataaggcagagaaaaagaaggggctgatacttatcaaactgtatcaaaagggtttggtgcttaatgtttgcttatttgaaacagctgtgccattctctttcctttacaacctaacttctggaaagagtagtctgtacttatttttcccctttttttctacccaagtttttgccaccattccactgggcctcttcctgctgagctgatagagcctccttgtgtccacacacaccggacccatcagacctctgacagagcagttctcacctcctgggggttgcccctgtttatctgaggcccctggcgcaggcagagcacatggccccttccacagctttggggattcaagtgcagtttcatgtgaagggttccaccttcccaggccacaagtttttttatatctcatatccccagcttgaatagggagggaattctggacatggaaatcaccttcacatcaggctgctgtggctccgttttgtaagcagcagatgctgatggctgagcacaaacaaaatgtgcctccatacgggctgtttcacctttacataagatgccttcccaaactaatcccagaaacttcccttttctgcag

SEQ ID NO: 40585 - DNA, 2300 bp, Homo sapien
ttgagacggagtctcaccctgtcgcctacgctggagtgcagtgatgctcactgcaacctccacctcccaggttcaaatgattctcctgcctcagcctcccgagtagctgggattacaggtgcccaccatcacctccagctgatttttgtagttttagtagagacagggtttcaccatgttggccaggctggtctcaaactcctgaccttatgatccgcccgcctcagcctcccaaagtgctgggattacaggcgtgagccactgcgcctggccatgtcatcacttctttactgtgtttatcctaatttggacatcctctggtagatagatgccctcttgcagaaggtcaagaactctgctgatcctgaaatgtcagctttttccgccaacgagcacctgagtcttctttctccacccccttctgcatgccaaccaaccccatgttctgtctgcaaaagtagggcctagcatgccttcctctacccatctgcaacgggaagtagtgaaggaccgttgctttctaagcaggagcaccccacttgtttttgttgttgtttttggttttggttttttttgagacagagtctcactctgtcacccaggctggagtgtgatctcggctcactgcagcctcaacctccaggctcaagcgatcttcccaccttagcctcccgagtagctgggactacaggcacacctcatcacgcccagctaattttttatatttttttgtagggacagggttttgccatgttgcccaggctgatcttgaactcctgagctcaggccatccacccacctcagcttcccaacatgcttggattacaggcttgtgccacgacgtctgtccaggagcaccctattgtttttcttttttttttttttttttttgagacggagtcttgctctgtcacccaggctggagtatagtggtgtgatcttggctcacggcaagctccacctcccgggttcacgccattctcctgcctcagcctcccgagtagctgggactacaggtgcctgccaccatacccaattaattttttttttattctttagtagagaccgggtttcaccacggtagtcagggtggtctcgatctcctgacctcgtgatccacccggcttggcctcccaaagtgctgggattacaggcatgagccaccgtgcccggcaggagcaccctactttttaaggagcaacccttttctccacactgcaccccaaccttagtcggcctgtgcccatttccctcactgctgcccacacccctgtctccatacagggatccacaggtcacctgtattcctcccctcaccttttcacaaaaaagaggaaccctttacttttttactggatcaattcagttccatttgctgaaggaaaattacaacacctagaaaagaccacagcctccttagaggagaacaggacagctttgagaactttttaaaacctgaggtgaaatttacataacagaaataacaatatgcaagtgaataataattcagtggcatttagtacattcacagccaccacctctatctagatccaaagcattttcatcactcctaaagggagccccccagccccataactgttatacagccacttcttcttctcctcttccccagcccctggcagccactaattagctgtgtttgtgaattgcctattctgcatatttcatataaatggaatcatacaaaatacaaccttttgtgtctgtcttctctcacagtgttttcaagacgcatcatgttgtagcataatcagtaattcattcctttttattactaatagtccactgaatgtatagaccacattttgtttatccatttgtctgatgatggacgtttgtatttgtttcacctgtagttgtcatgaatagttctgctacaaactgttgtgtacaaatatcatttgaatacctgttttcagttcttttgcattatctacctaggagtggaattgctagctcatagggtaattctatgtttaacttcttgaggaaccaccaagcaattttctatagccagtggctgcaccattttacattcccaccagcaattccagtttttccacatctttgccagcgccttttttgttgttgttaaatgataaccattctagtgggtgagaagtttacctcattgtggttttgactggcacttccataatgattagtgttgttaaccatcttttcatatgcttgttgaccatttgtatatcttatttggagaaatttgtgttcatgtcctttgcctgtttttaaattttgatgaagtccaatttttctgt

SEQ ID NO: 40586 - DNA, 2300 bp, Homo sapien
aatgccattggtaagtatgggcatttattctacttcggaactggcttggggctaaaataactttaatgttgagctaaaaaaaaaatgtatttatattacagtggattttgtccgttggctctgtgctgtgtctatggatgaattactttccacgacacacccaagaatgtttagtctacaaaaaatagtagaaatatcatattacaacatgggaagaataagattacagtggtctcgaatttgggaagttattggagatcattttaataaggtatttgaataactatggtgtttgtttacatttgtagtatattttttgtttagaatgtccttgtaatcaaattgagcctttttcccttccaagcaattatttattactttttaatattaaattagaaaaccctgtgaatggtgtttttctttttagaaatgattgctctgggctttaagaatttgatttaaaatatctgtttttcttgttgagaaatagttttagcatacttaatgcctttatggaaaatcttaggatttacctatctatgctattctatactttttctaaaacaaaaaataaagaattgtagatttttactgctgatattaattagcatcgtttatttctgtcgccattacaggttgggtgtaatcctaatgaagatgtagctatttttgcagtagactccttgaggcagttgtcaatgaagttcttagagaaaggggagcttgctaacttcagattccagaaggatttcttaagaccttttgaacatataatgaaacggaacaggtactatatttgttgaattgcttaatagaaggaaaatcttgttgttttccacagcagggagaaaaacagaagaaagggggaaaaactgatgagttttatcggtttgcatatccaagcaattatattaatatttttaggtctccaacaattcgagatatggttgtacggtgtatagcacagatggttaattctcaagctgctaacattcgatctggatggaagaacattttctctgtatttcatctagctgcatctgatcaagatgaaagcatagtggaacttgcattccaaacaaccgggcacattgtcagtgagtattctcttagctgtgttcaagtaaaaggaaaaaaaaaaagcaaccttaacgtgttcagaagatgattcaagtaacaataagattatggcctttaagtttaccaagctttgtctacagaaccagagtaaataaaaacaattaaattactattatagttaacatttattgagtatttaccatatggcaaatactgtgtgcacttttcacgtaatttctttaatcttcacagttaaacattattgtccatcccttttttcaaaatagattaggaaactcagccccagaaaggttaagcagtctatgtaaggtcacagaactagtgatggagatggtcttgagacccatggagtattaaagcaaagcctttatttttgaccagtaagtacattgcacagccttcttcaaggaggagtccccttaagttcaagggggactgactgaaatactaagattataagttaagcctatatggaagatgacaatgatgaccatcaacatcaagaatcatggcatcatcatagctatcatttattgcgtgcttgcttaagtattacactaagcacttcacttatattattttacgtagtgcttacagctatctgtgtatattattattatttccattttatatcaagaaaccgagatacagagaggttaagtaattttgtatattcattcaaccaaagttgaatcagtacctaccgtgtaccagtcactgtattaggtgctatgtttataatgtaaacaaaacagacaagttttactattctcaccactcagggcagtcagttaagtggtaaagatagtcttgaacttcgtatctgttggatgtcagaacctgtaacaacctttaagaggaagtgcattacatctagatgttggtgtatttttggtacagctaagaataattgaaaaattatagtaatatatatttttctctattttagcccttgtatttgaaaaacactttccagcgaccattgattctttccaggatgcagtgaagtgtttgtctgaatttgcgtgcaatgcagctttcccagacacaagtatggaagcaattcgacttattcgccattgtgcaaaatatgtgtctgatagacctcaggtatagcgtcatttagtaaacaaaattttgcagagtattctttccaatttgaaatcttaagtttgtttgggaattgagggtatatgaag

SEQ ID NO: 40587 - DNA, 2300 bp, Homo sapien
atctttagtggagcattactagaaatagagtgaccccctcagagactatggcagtgagtaggaattgggatgccctttctcagaatggatgctcccccaaccttccaccatcacaacagtccacaggacctgtcttattgctgatgatagttctctctcctgttgcctttgttctccgttatgtcaacaccttcagaatctattgcttcccttccctgtggttctatctctgcttttgttctttctttacccctctactgtttgccatttgctttcttctcagttaaaaactctttttttctttgtttttgtttgtgtgccttttcttgttctcctatactatttacttttgactgtattcatggtgtggcttgtttacagccattgccttccatgagaatacctctagtttgagaaatcagctgaccaaattcgtagtctggcagttttcatttttgttttgcgagagctctgtagacgttgtatatctttaatttctgggtccagtctaatccctggattaagaggggccatattacttttgatttttccctcagattgtgttttctgccagattttggaattactgcttcattctgctgacgaacgatatagaaaatcttaagacatttctttagcaggacttcacattctgagtcatcatgttacccgtttctaaactgtttttcctatattgttttttactcattgtcaggacacatagacatgcaaggacactagggttaaaaaatcatgatatactcagaacatttagattgtgatagtaggaaaaaagggttgaatataccttttgctcaggtaagtgtgaggcagtatagaaaagtggttaataggatagactgtaatcaccctgtcctggtttgaatcttggctctagcacttactagttctgtgacttagaggaagttattaaatatctttgtgcctcagtttctgtgtttataaaattggggatttaatagtacatgcttcataaggaatttgtgattatcaaatgagtgaatattgatattacactagaaaagaacccatcttgtgattggtagctattactgttactgctatgactactgtgacctgctcctgcctttaaagttttcctttttatcatgcaaatcctattttgtgcattctaagttgaggaatgtcatccttcttgaaagtgacgtcaaactcttggttgcaaacccagaatatgggttaaaatgcagactttaaaaaaggaggactaatgtgtttatgctgaaattttttatgaaactttgaaacaaaaaaagagctcagcaaagaagaatgggcaaagctgggcagtgttagcttaactccaaacatttgaatgccctaaggaaagtggtttggccaattcttgggtaaactgagactatttgcaaggttatattaagtcacttttagtgtaaatgaactttctaatcaaatatactttactggtaaaaatacgtcaaatttttcattttaagaacttgcttaatgctagacaataatcaggaaagaatctgtagtgtgccaattattagttttacaaattaatatttttcttattcttagaatctcatatctatccggggtttgtaaatctgataaaattacagcagtatatacttaccctaataataatattgaatgtaaactggttcacatggagtagaggtggaggggagggagaaacatccagactacacttgttactaaactaaatgatgaaaaatactcatttgaatacccaattttttgttcccttaaaacataaaaatagctagtaccccatgccacatacttttcaattggaataagaacagtaacttataaattttttaaattgtgttttattttccctagaatattcacaggatctacaaggctagatggaaatgccattggtaagtatgggcatttattctacttcggaactggcttggggctaaaataactttaatgttgagctaaaaaaaaaatgtatttatattacagtggattttgtccgttggctctgtgctgtgtctatggatgaattactttccacgacacacccaagaatgtttagtctacaaaaaatagtagaaatatcatattacaacatgggaagaataagattacagtggtctcgaatttgggaagttattggagatcattttaataaggtatttgaataactatggtgtttgtttacatttgtagtatattttttgtttagaatgtccttgtaatcaaattgagcctttttcccttccaagcaattatttattactttttaatattaa

SEQ ID NO: 40588 - DNA, 2300 bp, Homo sapien
cctctttattcttccctctcctttccttaagtatgagaagggagtctgttttggagctacaagctatgcttgggggaggggtgatgccagcactcccttagccactctagctggtgtctcagtaggttgtgtatcctccacgtccactgcctccaagcccagcacagctaggccttgcctaggagttgcagtccttgtggcctagactgactttcaggtttatttagggccccagaacattttagtccatgctggtgtggcttgctggaactcaggttcctactgctaggatgggtgatgcctgtctggctgtggctcgtctgaatgcttcctctgtgggtgggcatcagctcagttcagctcagttttgctttctactgtgacaggatggcactgagttcaatgtaaagtctcacagttgctgcactgtccctctcccaagtacacagattttctctctgcagcatagggccgctgatgggagacgggggagggatggcgttgggatttaagactgtctttcctaccccttcaatgtccctttcagtgatatcaagttaaaaccagctactgtgagtgctcacctgtttctcggttcttatgaaggtgttttttttgtgtgtagatagttgttaaatttggtgttcctgcatgggggatgattggtggagctctctttttggccctcttgttcctgcatattatccatttttaagaattttttaatgtattgccaaacggtgttccacaaaggttcgtacagttatgagtgcacagtttaactattgcctggatattatttagttgtaatttgataggaggaatcattgtctttgattcctaaaggagttaaacattttttttttcactgccttaagaaccgtttgtatctcttcttgtataaaatataacacaggcttccaaatagatacactgtttctccacagaatgtgtaagttattgctgtcatatggtactttgtagtttagaagtacggcacttatgtttctctcagcttctctctgtagtggcagttcaaatataatagatgaagaaaagtgaggttcagagagattaaataagtggcggagctgagactagaacctaggttctatgacttatgttttttttgtttagagattataaatgtttacttctcaactttctgaagtttagaaacaaagctctgggtaattgttttccttagtaatgctaaatgctttatagatcttttagaaattcgattgtaatttctatagcgcactgatagaaacatttttcatctttatggctatatggctatatagtttttctttatgatgaccacttaaaagcagttgaatactttcacatgagacatttcaaggttatgtattttattagaattttcagtggccaaaaagtagcgtcttttttgctttatattgtaacttcattcaggattcaaagttttgatagtaaaatttcagtaagtatttgttgtcttccacagtgtataatgaggaagtattttatttaactactttttaaatattgtccaactggaaaccagaaatatcactgatgtctcaatgtaaaatatttaactattttttaaaaattaggctaaatgatgttcagggaatgggcttaaagaaaagataataatgttgtttgttgcaagtaggaaaatgattaacaggatcttactggaaatagtgtgaaatattgcaagagacaaagcttacaaagagagaggagttctgaagtcgggtaaaactaatatttttatgaatattgattatttccatttttaaattgatgtgaataatttataggtacagttcttaaaatatgcctaaggtcctctattgaatgtattattttgctctcccatttattcaagcccaggcagcattatatagttttccccctttgtttaagaaagctttctagataactgccaagaatttcatttctttttttcagaacttgtattgtctaaaagatttgagaaattttaatgtgttatcataatctttaattaaaatacaatttttaatttttgtagttggcttggacgccttttctggctgcattcagtgtgggtctacaagattgtgatgatactgaagtagcctctctttgcctggaaggtataagatgtgcaatcagaattgcatgcattttcagcattcaggtaacagagaattttgtctttgtagccagtttggaacattaattacctatgccattacaatagtttaaattacaataattgtttatgtgtgacattaaaaactaatttcaagtttatgatg

SEQ ID NO: 40589 - DNA, 2300 bp, Homo sapien
atattattcctttcaggatctagatataaatacagtttttgccactagacaactgtcttctcatacaccgggaacagtcttttgttagctacaaaaataacaaaatgcaaacttctggtcgataagtaaggtgaaaaaataatcttaagcccctaatactacacattcaaatgttttaagatgaaatttcttcgacgtttttcatattaccaattttaacgatctaggaaaaaaaaactacagtatattacagcaaattaaatggtagtcttccatttaataattaaaagctaattttaagttgtctagactccttaactctagcatactttaagttattgtggatttttcccctttcaagaatgcttttttgtaaagcccatttaacaagcttccttttcttgccaatttgacctagtgtatttccagtgctataaagtgtaaacattaggaatgtatctttgtgttaaatgttctggtctctcaaacgatttcaactttgatggatgcaatagatctaacaatgttccccctttaacaactcctcatctgcctaacctcataggtaggaggtattgtttggattttccctgctgcgggcttcattacactagatctcttccatctgaactataaatcacaattcaagcttgagagcagctgccactgtccagacatgtggctggtgggtgtcattgtctttttcattttcctcatttcaaaccctcccttcccttgtcacctaaagccattttatctaaaggttctttgcttccctgctttcatgccgccacccccaccctcaccccttaaccaccggtcttgttcttccaggtcagcccagtcagatacaatattactctatgtttttcctgtggcggaggcggagagatgtcagaacgggctgcacctcttgcaaaccccttctcaagactgtcaacaaggaaacaacttcagcagcctatctccccaaagtacctcgccaaacgaaaaagttattgttaattatgatacggaacctttcccacacccaatcttgacataccagccccacctcaatttccaagctaataaacaacagctcatcttctgcttcatcacaaagggtggtatccagtccgcacctcacggaccaccaacaaaatcctctcactctcaagtcgatccctcgaacccaggtgccccgcgatcctaagccctgccgcgtttcccgagcccagctcactgcccttcctcctctaccccgcctctgccccacatccagccgagttcctgtcaactccagacagggaacagagggctccgcgagggcttcccgaggtcagaggcgcgggcctcgggcaagccccgggcgaccccacccccccacaggcgcccccctccccgccccacaacaagcaccccatcccccgggcctcctccccgctcacctaacgccacctcgcaagctttgcgcagctgggagtgatgcgccttcttcacttccttgtcggccaatatcttctccagagcccgggtcaggaacatgttcttcgtcttcttcccctcatacatggacgcagagaaggaggcggcggctcgtccgacccgcggctcccagcggctggaggggaggaggaggagaggaaggaagagaagagagaaaggagagggggtggaggtgggggattggaggcgtggagggcagcggcaggatcaggaaggggcgggcgagcgggaccagccgcggtgtcggcgaagggcgtcgaggtcctcgccgcccccaagaagccgtacctcgagggccgcgcccgtcgggcctccgcttctcccggcccgggggtcgcgtcccggccgcccctctcactcgtccctccggccctggtggcggtgagggagcccggcccgggcggctgtctgccgggaactgagggacgaggtggcggcggctctcagaggcaccgcgagagaagggctaccctggctactgtggggattagcacccgccgcggccgcgaactggcccccatcaccgccgacctgccccggccgccatgttgggaggaaacgacgcgtcacgcagcggccgaacggctgcagacgaggaagcggcggcggcggcggcggcggcggcgctccctgcccagagctgccgcggcgccgggaggctgggggcggagggcggcgcgggaggagcggcccgagccgcagcgctacggcggcccggcggggcctccagcgttcgcctgcagggcggcgtggggcgtggcgggcctctggtggcaccgcgcccagcacttcgggctcttggtggcggccga

SEQ ID NO: 40590 - DNA, 2300 bp, Homo sapien
tttgtaaagacagtgtcttgctacgttgcccagtttcatctgcaaatcccggcctcaagccattctcctgccttggcctcccaaagtgctgggactacaggtgccagcttgtcttgttcatcaatgaatcccaagtatgttttacgataaagctgacagctaaacataaccgaagagtctgcttcgttcatgtaaagtacaaaatagttattctagatggttcttctccaagagttccaattcagaaactaagactcctaacttgtggttctgccatcttcagctgtggccatagaagggaaaagagagactgggcatggtggcttatgcctgtaatctcagcactgggaggctgaggcaggaggatcgcttgaggccacgagttcaacatggtgagatgccatctctaccaaaagaaaaaaaaaaaaaagggaaacagcatgaaagattgcttgtgggaatttcttgttggttttttaacaataggttaagcctggatggctacacctaacttcaagggaggctggacaatgcaattctatactaagaaagaagagtaaatgggtttggtgatcagctagtaccctcaacagtacctggcacaacactccattatgaagaaacaaagatgaattagaaatggatcaacacctgtgaaagaagggaagaaaaaaataaaagaaatggaacttgttctaaaaaagtttattaacgtatacacagaaatcagtattatatctgatctaagagtataatgaatccttcatttccaggaatctagagatagtctctaaaataaaattaatgaatttatagatttgtttctcaggacaataaagtttaaaaaaattaatctatttttccactttaatttgtcaccttcaagttttccattttatttcctctgggttttagccttcctaaatctggtcacttcactaagttcacagagtcacttaagtttctccttccttaggtttggatggttacgttaggacaagcctatagttaaggcaatctaatagaacagaacagtgacagatgcatagtaaacattagggaacctgtgtgcgtggagccacagaagcttagaacttggagacgtgaccctagatcaccatatataatgtttgcaaatatttttatggtattctttttctgctcagaaggaaactgtagaaattaaatactgcagaaatttgagttctacactcagactaaagcaaacacatggtcacgtgtgttaatctgtttgtacttaaagcttttccattctaaactggtttacatgtcctggactaaatcttagtattaaaggcacagaaacacagaactctaagggacctcattcacaaccattcaccttaactgagtcaattcagaagggacctgaaatctagagttgaccgatttatccgacagagagagaaaaaagtgaaacatttttgaacccttatcaataggttttggcttacttttcccaaaacagaatcctccctgaggtagtcggagagcagagtcctggacagcagttccgtgcactagggaaggaaattttagagtcgagtgatgcaggcggagaccctgcggctgagaacgggcgatgcgggtgttgctgtgacccctggaatgcaaaggactgcacccccatcagaaagttagaaagccagtgcagagtagccaggagtcctgttcactcggcaggagcaggggtgccgagtggggggatctctggtcccgcagctcggccgccaccaagagcccgaagtgctgggcgcggtgccaccagaggcccgccacgccccacgccgccctgcaggcgaacgctggaggccccgccgggccgccgtagcgctgcggctcgggccgctcctcccgcgccgccctccgcccccagcctcccggcgccgcggcagctctgggcagggagcgccgccgccgccgccgccgccgccgcttcctcgtctgcagccgttcggccgctgcgtgacgcgtcgtttcctcccaacatggcggccggggcaggtcggcggtgatgggggccagttcgcggccgcggcgggtgctaatccccacagtagccagggtagcccttctctcgcggtgcctctgagagccgccgccacctcgtccctcagttcccggcagacagccgcccgggccgggctccctcaccgccaccagggccggagggacgagtgagaggggcggccgggacgcgacccccgggccgggagaagcggaggcccgacgggcgcggccctcgaggtacggcttcttgggggcggcgaggacctcga

SEQ ID NO: 40591 - DNA, 2300 bp, Homo sapien
tcttgcagagcagcctgaccagtttaggaagacaaaagtacaaggccaggaagtcaggaaagaaggcaacataaaaaagaaacgaaaccagacatgatcacccggggaacttccactctccaaaagcacccatagtgttctctgctcccaaggtgctctctcctctatctggacacagaagcatctatgttaatgtttgttaaatgaatttcttccctggttcatcgttcatccaacagacatcgttgatcactccttcaggaaacattgtattccctcgaggaggtataaggaagtgcacaggaagaccaaaaggatacagttctgtattcaaggagaaagcagcctcatgaggaaaccagacaagaaatttgatgtggtaattcctacagtagaggacatgccaggatttgtgagggacacagaggaggcattaaccaaactgatgctgagaaagttgcagaaaaattcagagcatcatttcaaatgaaaaccatttcagctgtttcatgaacctgacattgaatctgtcaaaggagttttggttcaactccccaggtagagaagatgggaaagattgggtgctctctcttctaacagggactctggctatagtattagagggtacaggagttcttggctatgactctccaggaagcctgaaaagttttgtgagtgtgatgaggaaatagtggctcactctctgttttagagcacaaccaggactgggcatgaaaggtaacaggaggcaccctaggtgcctatgcttatttaatagggcgaggcacatcccctgtaatgggttttgtggcgtattggaataggagcaagtggatgcaaataataattttaaaaagctttcatcatcaacatgggaaaaaagagaaggaaatggttttctccaaggtttgcttggaagaaaaagcagacctcattctaaagtgaagtcttgctactccaagtgtggctgaagagccagtggcaccagcatcacctggaagcttctttagaaatgcagactcggccaggcgtggtggctcacacctgtaatcccagcacttcgcaaggccgagacaagcagattgcctgaggtcacgagttcaagaccagcctgaccgacatggggaaacctcgtctctactaaaaatacaaaaattagctgggcgtggtggtaggcacctgtaatccgagctactcaggaggctgaggcaggagaatcgcttgaacctgggaggcggaggttgcagtgagccgagatggggacttggcactccatccagcctgggcaacaagagcgaaactctgtctcaaaaaagaaaaataaaaactcttaggcccctgttccaacctacgtcagagctgcagtttaatgagatccccaggtgacttctatgcatgtggagctctgagaagccctgctccagaccagcatggtggttgaatattggaatcacctaaggagctttttaaaccactgatcccaccaccacggtttctattttcaaggtctggctccctaaatgattccaaatgtacagccaaggtggcaaagcactcgaaggcctcctattccccacgagaacctctgaaacagcagcaggtctgggtgctgctgatgcagaatgagtaccaagatctccctgaagcccaataaagccactgaccactcctgtaagtcaggagcagtgaactgaagccagctgttcggatctgggtgctataggtacccccgtgcacgttctcatcatgattgttcattgtgcatttcattaggtggaatccgtttaggaatctgtcatgggagatcaaaaaaacattaagcttggaataatccatgtctgcttgtttagcccatcagacaaatcatttgcaattaggtaggatcctcatgctgaagaagatagagaaagaaagcttgcacagaaaagttagaggcctcaagttgggaaagcaaacaaaccaaaagcagagaggagtcacccaaaggaagcagcacccagtgaacccctgccgtgagtcagcacgagggaggcccagccctttctaggggagcctgattaaagatcaggctcagctgctgctgctgctgctgctgcttgtcccaagaccaagtcgtaatagcaacttcccttcctcagctgcctgaactttttttttcccttgtagctggagagaagtgtcacattttgctcactctcaaccttcctcgcccacccccttcccggagaacctgtgcggtgtgtagagggtgctgtgagccacctccagcctcgggtggctgcttaagtaactttcaactc

SEQ ID NO: 40592 - DNA, 2300 bp, Homo sapien
cagttacatgtcactttgaccctcttcctgactcaactgtaagtctttagatggtggttctcaaacgttagtgagtttaagaacaatctgaggaccttggtaagagaatttagggcagatatctgtgggattctcattcaacaaatttgtggtggggtccagcaatgttcattttaacaagacctcgggtgattgtaattcaatggtctgtgagccaccttgagaaatatgtgtctgcagatcagggtctctgtggctcttgggccttcgcagtatgcactgctcgtagagatcctcagtgcatgtttgtggaattgaggtaaatgatttggatgggtaaaaccccattaatgattcaaactcaagtgtcctgctttcagagatgagcttgcagccctaacggattgtccatagactaattttttgatagaaggaagttgcataagcagttctttactggggacaattagtacaagagattctattttatgtaggagaacaactgatagaaagttgctttatttatttgcttttttccctagggaaaggtgcagacctggggaggaagaaatgctgcctgtagtacatggggagaaggttcagtcatgcttgcatttcccattcatttctggatgtgtgcttcctatgtcttccgcttcttttgtttattgtttactaggtgctgtgaggtctgctctttaatatgctttgccctttgttcttctgccacagggtgtgaagccatctatgttgtttgccctttgctcttggctacctctaaatagtcatttgtaaaagaaagaggaaaatcacatcttgcccatcagctttgtgtacatcattcgaaaattttatctttaatatacaaagaaagtacaatccttctttgtgtggttacagaggggaatggtcacactatgctctggaaagacatcatctggaaaaccaataggtaattattttaatgtaaatatagtgaaaagcatctttatgttttagagttttgctaatgctttcagtgactgcaacaaattaacataccactttcttgcaacaactctattcactcttcagtttatttaaatgccattagttttagactgaagttgatctgtggaaaatatatgtgtataataccaattcaaaaaaatatataaattgttttgtttgttaaatgtattggaaatatttaaggcttagtttccaagtgagaaaaggcaataaactttaactttaaaatcaagaatgttctgtgtgtctatcttcaaaaatctaagattatttccgttatctatctagctttctatcttctgatgagcattcaacaacagctttatcttttcaattagtgacaccgtcttaaatcacagcagctcttagaaacaaaactggcacaaataccctcgcctctcaatggatttacatactatcttgatgttgaaaaaagttgtagacatggaaaacagcacagtacaagggtgatgcttattttatctggggtttattgcatgggcagaggctgtcattttcccatagtgtcttcatttattatgctaattgactttccaagctcagactggagggtgtctgccctgtgaactattctcagttggagggttttaaaagcaaacctgttttgtgcctgaatgaaacaaaaaatcaatgtgtttcttttcaaagagggagggtcaataccgtggttgtttttgttcccatccagttatgtaaccgtggggacttgtttctttgctttcaggatttgtacgaaacacattaaagttaaacaatagcggaggcttaggagtaaccctcgagctgcgccttggagtgtgtgtccctgggattgggaacctcctgtgagttccatatcaagtgctgctgtgtgtgtgtgtgtgtgtgtgtgtgcgtgtgtgtgtgtgtgtgcgcgcgcgcgcgtgtgtgtgattagccagtacgcagtacttccccagggttgtgtttcctttttcctgagatttggcgaagggtaaagggtcggagtcacatggatacaaagcttttgattaatgtccaagtcactgctgtggctgccgaagccgcttcccctccagccccggccgtgtgaggccagagcagcggggccgggcgcgcagggcctggccggagcccccactcccaggagtttcctctgcagagccccgcgccccccgcgccgggatttcagcccgatcccctcctctccctgcgcccagcctctccccagcatgtaaagtcttctgtctctcctcggagttggcggaggcggcaactttccattctcg

SEQ ID NO: 40593 - DNA, 2300 bp, Homo sapien
actcttgtcaattccataaattgggtatctgcgtaaattttatttgaaaatatttgttccttattaaagaaataagagtctagcattgcttgcttaagccataaaaagccacagagaggctgacacaggagtccccagctctgcagagggagtattgttgcaaatgtgtctcctttttttctgagaatccctacagacctctgacttgactcagtttgcatgtgtactcataactgcagttattcctgaccctgattttggaatcccaggggatttaagaagggatagggagattaaaaggttacatcatgacaaagtggttattctaaattactcatttctgattagggatgaactcaggtatttgaactgacctcccaaaagaaagcatcgtggatttatcctttcttagccagaaggtcagtttagagccccttcaagcagtggatggatgacctcctttccgttttctggtagattatctccacaaagcaacatgaaaaaactgttaactcatgtagtagatacattggcattgatatttgtctgtgttgtaccatcagctgaaaaattctgctgggattttctttgatttagggtggttttgtttattcagaaaagatattatatggattaggttgtagtgttaggaaaagatacattgatgttatttgtggagcttgaaattattgagttggtcaatcaacattgggttcttagcaagtaatggccaagggattgtgagtgatggttttctctcactatttcacattatgtaaattcatattcaactccttagataattggactccaaattatggcctgcagactgacttgaccacttgacatagaggcacctgtggtgcctctactctttagagtttctggagaagcctgcatgtctcacttatggatttgtgatccagcataacttttaaaccttgtcttgggagtgatataatatgtattcctctggtgttagctctgcagaacaaggtgtgaacataatgaatttagggtccgagtttatggcagagttttcaacaataacagaactcaaaagaatataacaactgcatattttcccactgtttgttgagaatttagaaaattcttttcaagacttgcctcaggatttctgtaattgtgttagttacgtgatgatggcaaccatagtaaggaaacacatgactaattaaaaagcaatgtggtcccaactgtctagacagtgggtgaagatgtttaattttgtgcttttaaacaactaacaagggctttcaatatgtttaagagattaaggattattctagttttgatgaatgggaaaaatataaataaaaagaccctccaaatcccctaaataccaaaaacaaaaaaggaagctattgaggggtatatggcagttcatttgtcacatagaataagcctgagtaattggggaaaacagcataaatagctcctttaatgatggagtattgtagaagttttaaattaccttgttgtagtataagacattattttaaaattttactttgtttatgacatagttttatagtttctcaaaaatattagaaaataggatttctaaattatttttgaaattatgacatacttaaagatttgttattctgttaaagaccctagaaaaatgaaattaacatataaagatgtgcttctgttagaacaaaagtcaaattattaaaaacataaaaatttatcctcccagtaagatatttgaccattcgaaaggaggaacctaacttaatttttaaaaacaaagtaagtttgaggaaaaattaaagtgactgcaaaaatgtgcatttgggttatacttactcattgattcaaacttttatttttgatcttagaggaatttgtgatgtcacttatggaagtggctctcatgatctttgcagttttcatttcctggtcagtctgaacctgctgtaccagaaagctgaagatcaaagggcgatttgtttttttgtgtataaacaggagttgctgaagcggactccacggaaacacagtgactatgcagcagtgatggaagccctccaagccatgaaagctgtctgttccaacataaacgaggccaagagacagatggagaagttagaagttttagaggaatggcagtctcacattgaaggctgggaggtacattcactttgcttgacaatcgagcttaagatagttttatgttgcaggcctcgtgcagaattactggcgttggatggaaccataaatggtcattttctcagatattacttgaggactgtagtcaattctgaaaagtg

SEQ ID NO: 40594 - DNA, 2300 bp, Homo sapien
ttggtagagatggagtttcaccaagctaggctgatctcgaactcctgacctcaagtaatttgcctgccccagcctcccaaagtgctgggattataggcgtgagccactatgcctggcctctttttaattattaatataatatgcttataaacatatatttgatagcacttatacctgtttgtcagttactttttcagaatatctttacatttttatgaagaaggaagtacagcaaaggttacagtgattttgagaaggtccttggttatcatttttttgggggaaattccatcctgtttccctatctccagatcactctgtgagttgtcgtggagaaatattggtccttgaagaacaaactatgaacggaagaaattacatcatgttaggggattaaacctgtaatataaagctgaaaaccttcaaaagtttcaattttttttctttaaagtaaagcaccaacacagtaattttatctaagcgtttattataaaatattgagttacatcaaaagtttttcataccaaagtctgacagtaaagcatgaacagtgtagctcatgcctggctttattgatgccctatcatgctccttttaaaagacaatttggtggagggaaacagctgtagcagaaatattgtgtgaactttgggaaactgcttagatcattaagtcaatctaaaataggttctgagctaggcgcagtggctcatgcctgtaatcccagcacttcgagaggccaaggtgggaggtattgcttgagcctaggagttcgagaccagcctggacaacatagcaagaccccgtctctacagaaatttaaaatagtaacaataaaatagattctcacttctgttgctaattatggcttccgttgtttttcaaatttgtggttgatagtttcgtttgttaactcaagttgccatccagtctttcaaccaaagatcaataaagccattcatccagtcaacaattatttgttggagctctgtaaaaataatgaaaccaaatagctatcccttttgactgcttactatatgccaagttatttatatttattacctcattttggttttaagcaacaatatgtagaaggttttattgcccccactttacagatgaggaaactgaaactcagagggattaagtaactttcttatctcatttccagacctggaagttaaattcaggcctgtctcatcacaaaacctaactttttctgctgtgccctgggatcactttcttttagtctctggcttaatgaatcaaccttcaaggtattaaggacagagaaataagaaatagataacttttttttgtaaagtattttgacagctgtcaggatctcactgaatacaaattcttcatatcagtatttagccttatttttaaaaatactaacaaaacataaactttatttcatcagtgcattccaagaatcttaggggatttggggggaaatgctaatgttcagataagggggaagaaacagacctttctagaaataaggttatttgagaatattgcttttaaacagaaaagaaacaggaattcgtggaaactgaaatcacatttaacccagaaggcatatttctggtttgaagtattggaacaaaagtgaacacaatgagagttgttcacacaagaaggcaacacttaacccatttgaattttcccataattgtgtgggatattaaaaacatgtttaaagtgtttactacaaattgaaaacaccataaatttctatgttttggaggcacgcatttttggattcattataatcttttatttaaatttggattttaatctggaaagcgaaggacttggttaaattttaaaaagttagccttagaagaaatactatttgttttaaaaaattcaaaatcctgtgggtaaaagtaattgaaaggagacattggctcgaaattatagaaagagaaaaaaaacaaaacccggggctacttgtgaatgtaactagtcctaggagtataaagttgaggttatgggtgcaggtattaatttgtaaatgtcactgctattgaaaatgagtgcgatttttgaattagctgaaataatttgcatctgtctttttctgtagtccttgaaaaaagcgaattcaaagatgaacccctacttttccgttttttttcggatgaggaaatggagggatcaaatatgaaacatcgacttatgaaacatgacttaaaagttgtggaaaatgttatagctaagtcattattggtaagtttattgatatgttatataagttttcttcttgattagacactagcagaagactg

SEQ ID NO: 40595 - DNA, 2300 bp, Homo sapien
gcctcctctcccattcattaaaatggttttattatgcttgttttcatctttcccaagtggacacatgtaataatggagagttcctcttgaagaaggccattattgaagaaacctggcgacatcttgcaaatcatcatgagaaatgttaaggacaatatagactgtgtgctatacattttcagtcccccatttgcaagagagaaagtcattaatgtgtaaaaggtggaaaagcatgctttactctttctcctaagggcttatttcttattagaggagaagaaagctgactaaggcctccagcaggactcactttcttctagctgcctttgggcatcctttattcttgtggacagctctagcaaatcaatgctatttttggtgtctgcaatgggcatggcttccttgggccatgaatactgggtgctgtgccataatggccctggggatcagggaagtgccctggggatcagggaggggaaccaggatgaagaaggggactgtaagcctattttaaaactaaacctttaagttagatacctaaaactcttaattttatgaaggctctcatatgagaggtcagactcttcaaagaatacaccatcatgagaatttttctgttaagatatatgtataagatatgaaaataaggctttatttgtactttaaaaggaccattaggggacttgtaatttatggatgcacaaggtgtattctatccttattctaaagtatatgtaatgtttatcatttctacattgatgcaataacattgtttttagcatagtaaatacagtaatatttattttaaatccataattttcaaacaaaacactcatgattgtgataattatatgggtttacactaatttagtatgtgaaatgcttttcatatctaaattatgtgcaaactattattaattttttttttattttttgaaactgagtctcactctgttacccagactggagtgcggtggtgcaatcttggctcactgcaacctccacctcctgggttcaagccattctcttgcctcagcctcccaggagctgggactacaggtgtgcaccaccatgctcagctaatttttgtatttttagtagagacgtgttttcaccatgttggccaggctggtcttgaactcctgacatcaagtgatccacccacctcagcctcccaaagtgctaggattacaggcgtgagccgctgctcccggcccattattaaattttaatttatgaaatttgatcatggttttcaaactattattaaaacctttatcattaaccattatgtattgaataacaaaaataccatgttacatgtgtaggcaatatgtgtatactactaggtaaggtaataataattgttatttggcacagaagctctagagacttttgtgagaagtccatatacaatgaaaaacaaggaacctaacatcagagttttcaagaaaaagttgaacattttgaatttaataaagatatctttacaaaaataaccttcaaggatttaacatttgtaggactaataaaggaacacagctgattagctagcaagtcctttcatattgtcatgactgttttctcatcaccatcctggaagcagtaatcctcattagaggcatgcaagggtcattaaaatgatttcagttgtactttgccatatttcatggggcaaattatcagctatattgtggtatttataagctaacatattttatatttttaaggatctactttcttcataatagaatgtgcttcatattatttttagggttaaacataagtgtgtcgtctatcatgcttggtacttactaaatgctcaaaaattagtaatggtttatattaacatcagtcactctaacttctgatcgtaataaaaattgtagctaacacttattaagggattactacatgcccagtaatacctccaaatgctttgcctgtattctgttgttattgcttcacttaatcctcataataatgacgtgacatggtactctttttatcgcgcccatttttagagttgaggaaccaaagcaaagaataacccagtgacttgcacaaagtcacatgattgacaaggggtagaaccaaaatttgaacccaggaagtctgccttcttaatgcattatgctacttttccttatcaatataagaactattgtaatattacgatgatttgtaagtaaatttggagttatgcggcatgtgttgtcattaaattatacatcttgtattaaaaaacggtgaatggaaatatgtaaatgctttaattatatgaaaattatagtgtttcc

SEQ ID NO: 40596 - DNA, 2300 bp, Homo sapien
agcccagcatctgatgccattatttatatatatgccgattgcctcaacaagacgaagcaactgaggacaaagacaaagcctttcacctttgaattcccagtcttaacataatgtctgtcactgagaagctatgcaataaatgtttattgtagtaatgaagccatgtttagggataaatagaaagaaccaagaagtgctttatgaaggaggtgatatttaatgttggccttgaaaagctttgaaaatactccctgaattttaaatgtgcaattttgggatgctcagagttttaacatacataaatgggtatgcatatcctcatgttgctcttctttctttgtctcttgctctctttcttcctttctttcttttgactgagtcttgttgtatggcccagcctagatgcagtggcacactcatagttcactgcagcctcaaactgcagctcaagggtcctgctgtctcagttttcccagtagctggaactataagtgtgcaccactatgcccagctaattaaaaaaaacaatttgttttagaaatggggtctttttatgttgcccagtcttgaactgctggcctcaagtgatccttccacataattgggattacagacgtgagcctttgtacttggcttcattctctctttaaaacatacacattttgccagctgaagctttgtctcttctattcaaagccctaagtgcaatagtctgagcatggtgaagacttaataagtgtctttatttcatttaaagaagcatcctcctgatgcctcttaaaagagaaagactcttgatttcaggaagcgtaccatcttggtaccttatgtggtatcaaaaatagtaggctttttagctgggtcatagatggccttccttatggctctacgctataccttttagcaaatagaaatgttggtattcactctgtgtatttaatttctcctggacacattaaaaaatacataagtaaatataccttcgaaccaaaatggaaagcacgaggcaaccctggacacctcactgctatttaacttaaccctccctaggcagatcatatgagtccgattgtaaaagtattaatgtggacatctttccactctggatcaagtccatttcaggttatcagggatggttaagctcctagctattctagcagatttcttatgtcttaatgcatgaaattaataatagttcctgggatattccacacttatctattacatgtttccacatatttaaaatacagaaggaaaacatgaacaccaataaagaaactatgagtaacagaaatccagaacacagtgaagaaagaaagaaaaaaatatatactgctgcagtcagcttttaggaaaactgtttccatcattctgaaaatttatatttattagaaataaatctaattttggcagcacatcatggttaggagccagggaaattgtcattgggaccttagtattgtatttcacaagaaagagagctctgtgaggaagcctgggctatctgcaaaccttcgactcggaaatccctgcataataagaaaggtattggctaaatttgagcagctcacgcagtatctagaggaaacattatgaagtgggatagtgtggtgtctgagatgcagttataggtatacagacatgactcaaggcgtggattaggaaggccaactttggaggggagggctggctcgctcatttctcttctccctgtcaaatgctgaaaggctggttccagcctttgagctcctgcactttgagagttttcagctgggttctcaggctgcgttcacccgtcgacttgctccaggccaaaccagattttgaaaaggaaggcaacttctttttcgcggcaaacccttaaacccacgcaccttctcaaaactctgcccttctcaacccctgcgctagagtaggcagggcagaaggtgctgaggagaggctcagaaggggcggtggggacgatcccctttcgaactgcatttgtagctgccaaggagtagccaacaagcaccagatttatgtgcactttgaaagaagcaccttcaccattggctttttaagcggcgctgtcgctagggagcggctggtagggcgagcagcctcggggagcagcccgggctgtttgttccgtcaccggggaaaggaggtacacacagtcgcgcgcgcacggacacacacacacacgcacgcacgcacacacaccggtggcgagttcgagccccgcggcccctgtccgcccgcgtgcgcccctcgacacagctcgcctcccgccccctgattcctgctgctgccgccca

SEQ ID NO: 40597 - DNA, 2300 bp, Homo sapien
ctaacatgaaacaagtaggctacacgctagtaaaatcttccaattttgtgaaatacgtataattgtactctcaaagtcaagctctatcatgatcaaaattgttgcataaggaactgtgttacatccagcttttattaaaagagaatttattatccatttttctcccttcaattatttaaagtggacatcaaaccttaaaaaatgcactactcatcactgcaatctaagctaatgccagtgtatgtcatatgtattcaataaaatacgaagcatggtggtgcttgttttttggtgaggggacctaaagcttttatgagacacgttgctatcacttaaaattcttcagcgcataacttgctggtgagcatcaaaaggtgggggttagggggcacttcataaatatccatttgagtttattttctaattctgcagaaagtttacatatattcctaattttattattattaaaatcttggggattttaagataacaaattaaaacagtatttattaaaaacaattcatttattctcccaggctaattgtactttatactccaggagagtagagagaaaacacacactctaaatgtatgtattttatgattctttcgatgcaattaatacactgcgttgcagaaggttttaggcttctgcctttaaaaaaattatataggattatgtataatcaataatcattaaactaaaggcaaagaaaagaaatctggtagttccatcaattttatttcgctcttgcatggattgcctttgttaacatttttggcagaaaaaagaatcaaagcaattgtaggactctgcaccccacaatgcgagcttcaattgaaacaatggtcttatcgtctaagacagatcaacgttaaagttgggcaaaaaaacttaggagatcttgcaaatcttgttatgtgaaacccgtcctcccaaaagacctattggaccacacctttgtcctccgcgccctttttttgcagggtcattaactcgcattatttttttgttctccacagttctcacttgcttctcttcagtctttgctaggttttccgcgatctccagtgcagccccttccacttgccgcgattctgcctctctcagacactgacacgtaacctcctccccataccaagccctcaccccaaaccaagctgttaagaacagctacaactgcttctgggagacgtggggggcgggggcaaggcgggggcaaggcgggggcaaggcgggagcacctcgaccctcccgcgaactctcgccgccggtcagtgccccctgaactggatgggaccaagggagtccctccgcaagggcctccacttctgactacggtccgcacgccccacccctgctcagcaccctggcaacccgcgggacgctttgctggtgccaggcttcaatctcttgttctcattttctcgtgtcctcgcgctcttccttctactgtatttttgtcttaaattctttaatggcgagagagagaaaaaaaaacaaaaccagctcagagctatagtcttcttccacaaatacgtgtgtgcttttcagaacctttctccgtccctttctcctgctaacacatgtggggtctgcagtgcaaaggactctcctttcgtccagtgaccaaatggcagtctctcagtttgccaatttcattcatcacgcccgcaccgactgaagcctactcctcaccagttcagctgtcttccagttaattgtattaactgctaagcacctcctccaccttttcgggttctattaccgccctcattaaaaaaaaaaaaaaaaaaaaaaaaaaaaagaaggaaagaaaagaaaagaaaaaagaaaatccaacacgaacactcaagatagcgtgaattcaaaaaagaaagtgtgcgtgtgcaacacagtctgagtgtgtgcatccgtatgcgtcgcctgcctcagcctgcccgggtcctgaacatgtagctgagaggtgcaggacagtcagagggccaaaacttcccctgccaggctgaggctgggccctcccgagctcacctgtccgcgttcaggtaactggctaagtgcccgcccggccgcgttccaggacacctggccgggacagagcgaatgccagtgaatcccagggcgccctctcccgcgcgttggttctctagccctccttccctgggaggggtgggattgggagtgttctgttttcattactgcaccccttcccctaaagacaacgggactgccctcctccacagcgccttacctcaaacaggggaccgatcttgttcttctccaggtaagcctggatccg

SEQ ID NO: 40598 - DNA, 2300 bp, Homo sapien
tcttatttaatctccatggcaaccgtatgatgtagctactattgtttttcacatctaatagatggaatatgaatgttaaagtaggagatgaaggattcaaatagtggctattaggctgggcatggtggctcacgcctataatcacagcactttggtaggccaaggcaggtggataacttgaggtcagaagtttgagaccagcctggccaacatggaaaaccctatctctaccaaaaaatacaaaaattagtcgtgtgtggtggtgcacacctgtagtcccaggtactcaggaggctgaggtggaagaattgcttgaacccaggaggcagaagttgcagtgagctgagactgtgccactgcactctatcctcaccctgggtgacagagtgagactccctatcaaaaaaaagaaaagaaaagaaaaatagtggctatcagatttcaaagactgagtgtctaatcactagtttcctgtatcttcaactgcatgttgtttatattaattttattgatataagtatgaactaaatctcctgttggtgacagctgctaatatattttgtttgcgacttgtatgtcccagtttaactagcctgtgagtgcacagagtatcgtattaaaattaacacctacattttatcaatccctgagtacttagtctaaaatgtccacaaacattttgtttcagggcaggagtgctcttatcactttgttgttctattaatttatatacacccacagcctgaaaaattccttttctcccagggaatctcatgtcacaacccttgcactgatggtaagaattgaaggtgaggctcttctgtctccctggaagtgccgtttcctactggtgttcagcttatgtacctgaaactgacttgatgttctagaatacttttttcctatggtgaatgattcctgtaaaactttctgcaattgatttctactccaaattaacatactagctgtgcaacttgattctcacctttccaaatctatcagtccctcaggtctacctctgcggctctaatttctagtggtggaaagaaatcaatctttttattgccatgattggcaaatctaaggatttaaattttcatgtctgggaaaggggtttctgtcaagttcaagtcctcagaatcattcaagtccagcagatacatggattaagtgagaagcagggtaattactcttgcaaatacaatcatttaaaactagactcttgtccaaccaagacacccaacatgccctattgcaaacatcgactatgatcatttcgctcacgattgaacttgtcctgtgtctttaatctcatatattcattaatacaatacaaatttatccaaaatagttaatagactgatactatttttaaaacttaatagtaattacttggtttattatgactaaataatccatcttctaaagaaaaatgtaggaatacttcagtttattaaaaaagaaatctagaaactttccatctactctgaaaggtaaattcaaaaacaaaacaaaaccatgagattttcagaggtgtcaggatagaaatggctgtggctttaaagttccattacctgacttaattttgctttacctgagtgtccagacattctgtgacaatagcaatccagttgtaccttctatttatttttctttttattttctggaaccctttataatgtaaaattagttcaaataaagcataatacataatagaggtaaaatccaaaatgttttagattgcattccacagatgtatacttatgatttaactgaactctacattactttacaattaccttcacaacagtagcagatggccttttttaatttattattataattgaaatattaaatagcacaaatgaataatacctgtgacaactgattgtttgcttacttgtttttcagaatataaaaagtattacacttgtctaataaatatcttgcatcataatgtatttatggtaaaaatcctttgatctttttacttctaactctgtgttccatcaacgcattttttaaatatgcagaaatatttaatccatgactctatgatcaacttgggatcttgttatctgcaaaatccatttatcctctgcccaggtaaagccatgttttcctacacttaaaaatgtaaataaatatcccttagataatctggacagcagtttcttatatagcatgtctgagcactatattttgctgggctataaaaggtttaattgttgtttattggtacaataagggattctagttactaatatctacctgtagtcaataaagcaaacattgattgg

SEQ ID NO: 40599 - DNA, 2300 bp, Homo sapien
ttacttgtggggggctggcctctaccaactagatcacagtagcactccccaccccaccctcagttatgacaatagaaaatgtctccagacattgtcccaatgttcccttgttttaaggggagggaaaaatcacccgtggttgacaaccactgccttggatgttgttttatgggagaaaataaggtgtaacatttgaaagcatttagtccatttggctgaacaaagtaccatggactgggtggcttatcaacaggagaaatttatttcttacagttgtggaggctggaagtttgagatcagggtgccagcatggttggggtctgatgaaggccctcttctgggttgtggaccactgtctttttttttaatccttgggtggcagaaagaaggggagagagctcactggggtccctcctataaggacactaatcctattcatgagtgttccactcacatgacctaattattcccaaagggcccacctcctaataccttcacatcagggcttaggatttcaacctctgaattttggtagggacagaaatgttcagtccattgcagtacctaagagagtgattgaaacacagtagacactcaacaaatgatatttttcctctaaaaatgtgaaattgggctgtgcgcagcagctcacacctgtaatcccagcactttgggaggctgaggcaggtggatcacgaggtcaggagttcgagactagcctggtcaacatggtgaaaccgggtctctactaaagatgcaaaaaattagctgggcgtggtggtgcacgcctgtaatcccagctaattgggaggctgaggtaggagaatcacttgaatctgggaggcggagcttgcaatgagccgagatcacgccattgcactccagcctgggggacagagggaggctctgtctcaaaaaaaaaaaaaaaaaattgaaattggagagtagtttctcacacacagagttaagtagatataacttggtatgaattgaaacacagaagacaaataatattatgttaactaacaaaaacactagtttgagaaatcatctgtagaaggtgcatgtataacacttcagcggtatgtacataaaagctgacccttagctctaaatttagacagatcaaacttcaattcttgtctcttccagttaatacttgggtgccttaggcaaaccctttagactttctaagggatcttatctataatatgccttatctataaaatggagacaataatgacatgtatatcatggtgttgtgatcattcactcattcattcaatatataactagtgtgctttgatatttcaaggacaattctaggaaatagcgatacagcagcgaatatagacagttcctgccctcctgggaatttatttatttatttattattttttgaaacagggtttcactctgtcacaaaaaatgcaatggcacgatcacagctcactgcagcctcgacctctgggaatcaaatggtccttctgcctcagcctcccgagtagtggggaccacaggcatgtgccaccatgctcagctaatttcttgctttttttttttttgtgtagctggtatttactacattgcccaggctgcctcctgataacttattagtaaatagacaatgaacaataaatttataatgtaatttcaggagataataaatgctatggggataaagaagtataacagaataaagaatgatagaggttgctctcttacataaaatagtcaaggagatctcttagaaggtgaactttgagcagacatgaatgtagggagagaacacagtatgggttagctaggtaaaggcttctggggttgagaagggagcaagtacaagagacctcagggccgtaatattcttggcctgctcccagtatagaaagaggctagggctgctggataaaaggaatatattatgtagctaattgatacctttttatatttttaatttttaagttttctcttatcaccaaatactcacttttaggaaattcaaaatatgtatctaatgtgggaagtgagatgaggttgtgaggtgacagaatgctgcatgagatgttattaaggaagagctcacagaggcaactctccaagaaaatgaaacagaattgaaaatggtcttgtaaaattccacttggggtggcgatgctttgtggcttgaagtgtaagggatgagaacagcatgtgaattccaagaaagcaacacagaatggaaaatggatttacaatgtgtcagacagggaggcaacatcctgtggcatgtggcttgcatctcagcggtgggaaaggta

SEQ ID NO: 40600 - DNA, 2300 bp, Homo sapien
tccctttcactttggttataggattgaatattcagggtataggattgttgatatggtttgtttctgtctcccacccaaatctcatgttgaattgtaatccgcagtgttggaggagggccctggtgggaggtgattgaatcatgggggtggtttccaatggtttcgcaccatcccccagtgctgtcttgtgatagagttctaacaagatctggttgtttaaaagtgtgtggcacgttccccttcactctttttctctcctgttctgccatatgaagatgtgtctgcttccccttcgccttctgctttgatcctaagtttactgaggcctcctgagtcacacctcctgtacagcctgcagaactatgagccaattaaagctcttttcttcataaattacccagtctcaggtagttctttatagcaatgtgagaatggactaatgcaattgtgaaactaggatttcatcctgggtagaggattgtcagcctaggttgagagctcttttcttttgacacctgaaaaatatcgtgccacttccatctctcctctgtggtttctgatgagaaatctgtcattttaattgcttttctcgtattggtcaagtgtcttttctctgattgctttcaaaattttttctttgtttctagttctcagatgtttaattacaagggaacttggtgtgaatatctttgtgattaccctgtttagggttcattcatatttattcatattctgtaggtttatgtctctaatgaaattggtagattttagatgctattttttggtgtacatttttattttttatatatttatgtatttattcaacttttattttagattcagggtgtatatgtgcaggtttgttacatgggcagtgtagtactggggtttggtgtacaaatgattccatcatccaggcagtgagcaagatacccaatcggtagttttatgaccctcactctcctcccagtctccccctccaagtagtcctcagtgtctattgttctcatctttgtgaccatgtgtacttggagcacatttttagacccactctatttctcttcttccaggtctttgctagatattttgttatagtccacagatcttggaggctctgttcattttcttttcctttatcctctctgttgtttagattatgtgatttttcttcttctatcttaaagctacctgttttcttcttctgtctcttctattctgctgttgatatcatccattaagctttcacttaagttattacatttttctgttctaaaatgtccagtggttcttctttgtgtcttatatatctgtgctgaaactctgttttttaaatttgtttcaagcatgttttgattgttgaagtatttttaccacagttgctctacaatctctgtcagattattttaatagctctgccttctcactattggcatataatgaatttactttttatcctttttgaaattttccttgttatttgtatgacaagcaatttttgattgaaacctggtcacattcatattacgttaagagtctttggatcttattcaaactttatcctccagctgcttttttaggcactgctttgaaagggggaaaagtggctcaacacagctttctactggaaggtagaattcacttccagatccttcacttctcctccactgacacctgactctgctgagagaagcaggtcttaataactactgggcatagatatttgtgctgcctctccatgtgatctctattgacaccatagtggtggtggccttgttactaattagtggtagtgaatgtcctcacttcccactgggatcctctgatgccattccatcagggaaagaagggctgcctcgtcactgccaggtagcatgaaagtccaagttccccatatggtctccatttacactgcagtagactcttgttactggctaacagaaatgaaagttttggctcccttttccatgtcctctgacaccactcctgtaggggtattgcgggcacctatttacagctttgtgagggtggcagtttagactccccacttgggctttgttagcatgagtgaaaatgaggccacaagttttttttgtttgtttgtttagttttgttttctggatgtggttggagtagagcagttacagcctgaaagttttctgccttgatagtctgccccttttctgctcctttgctagagatggcaatctttcattgcagctttttctccatccaatgttgtttctggattgctgatttttcatctccaagtctgagatatatgatggaaaagaaaacccagg

SEQ ID NO: 40601 - DNA, 2300 bp, Homo sapien
tataactgggatggtaataatttagttcactttaatgttataaaaagaaaacagaatatgttaaaagacttgtaaagtcatgaagcgagtagctcacaatacctgacctgaagataggctttccatatccaagattactcttcctgaaaacaggctgagtcacattaaacagagaaaagagtaaacctttgggtccagtaccacgtcacattgtttctttctagttcataaaatccaaaggactcagctaaaccaggagaacaattaaactcatcatttcttcattaactcatattccaaggtgaaatggctagtctaaatacagcactgtttaaaggaaatatttttgtgaattccaaagaagctcttgaagactactgtctttgggtcatttgctatttctgtttatttgaatttaaacatctacagacactcttggcaaaataggctattttcttttgaattcttaactatgtcactgattaattatcaagatagaattacttctgaggttaaaacagacccttgagatttggtggttcactgcattcacttcctctaaaattctagtagttcatgcttgtgaaatttccttaacttgacctaagttacttgatatggaaaataaactacactaatcgaattatttaagcatctcactatttccctatttgggcaacctggaaatcatgtcagttagcttatttaggactctagtattgtgagtggcagaagacctaaggaatttaaacagaacaaaacaaagtggaaaagccatatcaaattaaaaataaaacaaataaaaatactggtcattctaaaacatccctccaccaaacacatttgaaattcaggcttatattttattttttccacatggatgagaaatatgaaattggaatttgttactttttcttagtgtgcttattctaatgcaagcctcgtcgtactaatgagtagcagaatttcaggactcgtgtcttctagttcacttgtagtggcagtcgtttcttactacaaatcctttttgagggaggataatattaacaagtcatttaataaagcacttgtaatccccatgcataatacaagtttgacaattgtgagacactagagcagccgtcgacctactgatattaaataactcctttaaatatgaaaaagatattatgtatttttttcttacatcacaaatgaaatctaatctaactccaaatattttaatgtgccttataaagatcttttcctcaacaaatcttatctgcactcttcctgaaataaattgaaatcattttcaaatatttactgtgtatcaaataaatcccttgccattccatctatacctaaaagggtgcggtttgatcattttatttttttctgaacattctataaaacatattatgtatctgaaccaccataaaatactgttcttgcaacattgccaatttcaaaatgctctgttgaatagtttatcatcggtgttctccatttcctttcttgatcctctttgagaatcagccaagcaaatgctagctaaatttatttgcacttattaatgtgtcttagtctgaacatttcttactgaaaggaaatcatggggccagaaagaataaaacccaatttttggctgaggctctaatagcatgggggtgatattagatgaaaaatagagacggagggaatgtaaacgttagtttattcagttcaactgattttcttcctattaaggtgcattctgttagatagttttcctcctacttactaaatagttaagccctgacatcataaagaaaactgcaattcacatcactaaggctaatgtcacccaaagataacttgctattttaaataacatggaaactgcattgggatgacagataagtataacaatccattttatttttaactgcttttgatgtgttccagactttgaatattcagacagaagaataatggaaaagttattttttccccttaatcacacctccacaccccaaactactattcctccacaccccaaactactattcctccaccctcacctctgaactttttgaacaaaattgatggatcaaactctccttttcttgccaggagaatagtcctggactgagcttcagaagatctcagatcactgacgttctgtctagaagaatactccaagatatatttctaagtaatattccttctcttgttgggggaaattagagaagatttctacctggtgccatatcaactcaaggatggagtcaaatactgagaggctctgtcatctgtctttggatctccttctgtgagta

SEQ ID NO: 40602 - DNA, 2300 bp, Homo sapien
actctgcctggacaaatccaagtttgtgttattaaaccaccataattatttcagcaaaacatctctttcattaggggattgtagaaggccagttaatagccctccattgcagcagctatctctaaatttattttggaaagcacaatacctgaatgggcctcattctgtgagccgtggttcctgcccttccatctcactgggcagcatggctgctgtcattttattaatagttgatatggtttggatctgtgtccccattcaaagctcatattgaattgtaatccccagtattggaggtggggctggtgggaggtgattggatcatggggtggatttctcatgaatgggtcaccaccatcctcttcatgctgtctcacaagagctggctgtttaaaagtgtgtgacacctctccccgcctccctgttgttcctgctttgcccatgtgacaagtctgctccccctttgctttcctccatgagtgtaagtttcctgaggcctcctcagaaaccaagaagatgtcaacaccatgcttcctatacagctcacagaactgtgagccaattaaaccttttttctttacacattacctagtctcaggtattccttcatagcaatgtgagaatggcctaacacaggagtgttaatcaaactctgatttgtgatttggttctgccaaccagattgtccttactcacggaaagaaggaataaatacgctcaacactgccatgtgcgtctcaggccctcattccttgctgtggtcttctcgcctataatctacttgtttcgcccttagtcccatctcaattagctacaatttaattccacccaaagcaatttaaaacatcccgtatttcttcctgagaaagaggacatagaacactcagattgtatcacttgttgtgtgcagacacagggacatagactgaaagaaatcactcgtagagaggaaaggaagcccagcagcacactttttccaaggcatgctagagaaaagcaaaagccttagcaatgttattgataaaaactgccctgcaagaacaagcatagaagaggcttaggactatctgaaaatggcactaaaagcctgcaagaaagatacaggaaaaaccaatgtgttttcctactgtctctcaccattcagtacaatacttctgacaccagaggtgcgggggtggttttccctacacaccaaccaagtaatcaattctgcagtagatcagctaggtgtcctgtaattcaatttaattatgacactatctatcagcatcagatcccacagattgagatctcagtcccacaacactgcccccctccacttcagatgctagtcaaaatccccaggttgtgacctgtgcttctaactgaccagctataaattggggttcccactacccttccttgggttagctttatgtactagatctattcacaaaactcaaggaaacacttaacttgtgtttaccagcttattgtaaaggatattacaaaggatacagataaacagccagatgaatggatggatagggcgaggtatgagggaaggggtatggagtttccatgcccttatcaggcacactgccctccaggaacctccatgtgttcagctctccagaagcttccagaacccagtcttttggggtttatatggaggcttcattacataggcatgattgattacatcactggccattggtgatcaacccaaccttcagctctcacacctccttgcaatttgggaggtgggactgaaagttccaatcctctaatcatgccttaatctttctggtgactagactccatcctgaagctacctggaggtcccagccaccagtcatctcattagcatacaaaagacattcttatcactccagagattccaggggttttaggagctgtatgtcaggaaatggggatgaaaaccaaatatatattttacaaaattgcatggcccaaggcagatttccatatctgcatttaatccatcaggaacaagacaatttgcaacaatttgcaaagaacgatctgcaggctttgactgtataggaaaagaagtgtagactagaccagaaaagacacaattcccagggggtcctgtagctccctggggtcacatggctatgattttctctttactgagggtaggcaaggtgtcctctttttttgttttccaagaactaaggcataataggtggttaatagatgttttgaggaatggagtaatgaatacatgaatccatcttctctcagctgttcagtttgtgaggaattttcaaatccttaattaagaatagatacat

SEQ ID NO: 40603 - DNA, 2300 bp, Homo sapien
gtttgagttgattttccctaacaaaagcatttcagaacaacaacgaaaaatgtgcctttgtggacttactcttacaatactttccaaaggtagcatttacagctactgcagaagcaagtattaagatcatagcaaacaaccacatctattgcatccttgtattttttattttaaagcaagtattaaatcgtgtaaatagctgaagttatcaataaaagagaagcagtgactgagttttaatgaaaagatctacaattaataatagaataaaatgtccgtgttaaaaagcactttaaacaataatgtaggtcagaaccaggcccatttgggaatgcctcatagacagtgtgttacaagcacagggttgataaagcttcttgattccgcatctgtacagtttcttaggttttacttttgtaactcaatttacagtttaagagaatgcgaactaccttaataatgtctctggggtcttcaaaatctatgcagttgaggtaatccagatttccagacatgggtctggttggattaacccccctcccgccaaaacaggaaaaaaaaataccttacaataattggcactattaaaaattttatgatgcccaagggaagttagagccccgttgtgccacttgccattgttgaaaatgtttgtgttgattatgtatctggacttagctgattaggagtagtttagtgaatacacaatatattgtgaaacagacacctcataatcacttctgagaagcaattgagcaaatgaatcaggactttaacttctgattctttttcttccctccttcttctttataactcaattataagaaaaaaatgcactgcagaaaaattagttttctaattttgtacatcagaaaattgcacccagaataatttttaagtatcttaatataataccacacacaaaaattctggaaaaacacaagctagtcaaatcaatgttgctagaaactgaaataattctccttgtgatactagcatgcccatattagataactatttatagtctaaattttaaggcattaggcaagtttaagagtttttttgttttttttttaaaacaatccccctcccagttcaaagaaatacaaaaggtgcaatacttaaaatgttggcttcccacagacactgtcaggaagttggtagtgtttaaaattcctattttctctttcagtttatcaaaattccttagatatctgatggaatttttgaaattgtgagatttgtggcaattaattgatttccagatatcttcttaaagtactgtaacaagtatagccattttctggttcagactgctgtcaaagtacttactttcattaaacagttcagaaaaccaaaaaaaaaaaaaaaatgcccctaagaagaaggtattgaaatgaccaaaaattgaaaacatttcaaagcaaaattgttaatgagctgtttgagctatatggacattataagtgcaattaactagaagccaataaaaataatcaatgacagagtgcagccctctggtaccaaagtgcttttacaaagagatgtctgtgaaagcagcaagtgattaaaaaagccacctttatctatgggagcgcgtgctattttacatgagtagaaacgaaaatgattttcattgactatttctgaagttcagcctgtggcaaacagtgaagagctgtgtgtgggaatagagaagtttctgctcttagctgcgcccccaccccctccttgccaagaatgttggaggcagccacgatctaatcaaagaaaggtaggagtttagatttcaaaatgtagatgtcacatttcagtgccaactactcctacattaaccctttatcagcaagtcaagatgaaccttttatctcctatggaagggaaaacgtcttgctgagatggcccttccatagacgggcagtaaaaatgtttagggtttctgtgcatcccactgagggtccccatcatctcagggggagcacgaggagttgtgaaaagtaacgcacaactggtcatcagaataattcattccctccaccttctctgtagcacctcccacttctcctctttttatagcagtcctttctctctgaaaatctcaggttacttgactgggagttctcagacctccagtttcagccctgccctcagcctccaatccgtaagagacacccagccccagcaattggattgggcagcccgtcttgacacaccactgtgctgagtgcttgaggacgtgtttcaacagatggttggggttagtgtgtgtcatcacattcgagtggggattaagagaagga

SEQ ID NO: 40604 - DNA, 2300 bp, Homo sapien
tgtcactttctaagctgtatgaccagactcaatttacccatctgtaaacgaaaacaaaaatagttctgctaggttaaaaagacatgtaaagcatctaggccagttcctgaaacccaggagggatttgtaaatagtagctataataaaggttatggtcctcacctgagcataacaaaatgagagatgatcctacacttgaactacaaatttgcagtaagatcgctgtcattcctgaagccgaatcctcaggaacttgaggccaaaattctttaaaacctgaattggttttaattgttccaaattagtagaggggggaaaattcttctaattcactgaacaatctgtatgcgtggagagcatgtactgcatagacacaccccaagtctcttaaatgacaccacggtcgatccaactagcacaggtggaatttgaagcatgttacttttaccaaaaaataacaggggaaatgtcattaagaacactttaatacaaagccacaagaaattcagtatctgacagctcatgttctatatttcaccccatatcataaaacaattcaccagagagcagttgttcatttgctgagctgctgttgtgatagcacatattatttcaataatggaggagttcctccataaaatcagtcccagaagccagtgatgtctgaaaaatctcacctttggagaattttcctggcattctgtaaaggaagttgcacttacaggtcctctaatgtgcagcagcaaaggaacaacagatgccaacattcttgtttgcctcatgaacttaagccctaaagtaagctgacttgagtaaagtttagaggctccccttcaagttttagaaaagctttcttgtttaacttatgcaaatttacacaccctcatgaacctattgcatatatccgacaaccgtccatattttagtaccatgtggtggctctcacctatgcccatatagctggcgacaatgcaggtaagatctggtcagctgtcagtttcattcagtgaatactcactgagcacctgctttatgcagggccctgtcctgggccaccagggagaacaacgcaaggttccaaacctatggagacagacaacgcatgcggaatgacaacagagaaacagagtcacacggagaaaagaggggaaattggggaaggcttttgtgggggaggcgggatttgaactgagccttgaaggaagtgggtgtgaggatgggggtatgagtaaagatgggaaatggagaattgaaaggccgtctttagagaatgattcacattataacgtgctggggagtaggtgaggcgggagggcgggatgggaagtgggaaattagtgtggagacagaaattgtgggctttgagtgccaggatgaggaatttctttgcgtgttgggaagcagtggcaggcgcaggacaggataataataatttaaagaaaatatgagtagcaagttgtgggagcggggagggaagcttggtgctcagaataatcagaactttctcagtggacccaggctcagtggaaagagcgctctggttccgtttattgctcccacagagaagagaggagagacccagagaggtttaaaattagaggggtcgacagggcacagggaactcctggccaaccatccttaggaaaacaagagaccaggaataaagagaaccagcagaagcacctggtctgagtctaagaaacatcagtgtttactaagcacttggtctctggaacgcctggctttccaaataccacatcttcccatccactccatcctgccacaggcagctactgtgtcgggtgctcagggagccggaaccacatgcctggaaaccctgagcccctgcccgccgccgtccaagccggccggctgcagcgcagtttgtttgccgaggtttgcatgcacatattcagttgcccttttttttcccccagtcctttcagccgtgtcccgaaattcacccttagtgtaacttctgcctctgctcctcctcttcttggaactgccttttgtttgtctggcagcgttggttctatgggggtgtgtgatgataataatacgcgggcttatataaccgtcttcatcttgcgagcacttcgcagaccgtcgctaatgaatcttggggccggtgtcgggccggggcggcttgatcggcaactaggaaaccccaggcgcagaggccaggagcgagggcagcgaggatcagaggccaggccttcccggctgccggcgctcctcggaggtcagggcagatgaggaacatgactctcccccttcggaggaggaaggaagtcccg

SEQ ID NO: 40605 - DNA, 2300 bp, Homo sapien
cgagtaaattcatgaatgaagcccatgtgtgacaagtggctctccattatagctcacttacaaatttagtagccaactgattcaatgaaaggaaaaagtcctgcgggctttttcaatacccctgaacccccctgttcccatttctgttgaatcagaaatcactttacctatctttgttgcattagcagaaacccagtctaaggtgacttcctataactgtaaactttacagatgttccctcaagctggaggagaaggggttgacaaaacagagtgttttgtggctccttaaaagtcagcctgcctttgaagctttgaggcaaggtcctaagcctgcaggaaaatcagcctcaggtcaagagtttataagagctcagttgcatggaatcagtactgcatgaggggaggagcctgcagagttctcagggtctcagcaatagctttttgaaaaacatctctgtgctggccaggcgcggtggctcacgcctgtaatctcagcactttgggaggccgaggcgggcggatcacgaggtcaagagatcaagaccatcttggctaacactgtgaaacactgtctctactaaaaatacaaaaaaaaaataaaaattagccaggcgtggtggtgggcacctgtagtcctagctactcgggaggctgaggcaggagaatggcatgaacccgggaggcggagcttgcagtgagccgagatcgcaccactgcactccagcctcggcgacagagcaagactctgtcttaaaaaaaaaaacaaagaaaagaaaagaaaaacatctctgattccagtaattaaaaattctatttcattccacgaatatttatcagtgccacatgtgacactatgcagcccagcagggatatagataagcgtgaggaagacacagttgctaacatttaaggacagataaactaaggcaggggttggcacactggtacccacagtccaaacctagcttgccaccagtttttgttaacaaaattttattgacacacagccatgctcattcatttatgtattgtctgtggctgctttcacaatacaacagccaagtcgagtagttgtgtcagataccatacagcctggaaatactatctcatcctcgataaagtaactttgccccaacctctgctctaggggcaggatgggcaagtgtcccaatggcaatatcaccaatagggccagaagtgacaagcacagagcagacgttcgcagggctgtggagcggggagggagaagccttcatatctttgaaggaaaccaggaaaacttcatggaccaaggcttcaaagtgggcctcaaaagatgggtaaaatttctgcagataattgtttagagattgggtttcaggaagagaatatggcaaggacacgtggtcactgtataagggaggcaatctaagatgtgtcctagaaactggagaatgggctacaaagaaagcagcactaaggaacaatgctgcagagggaaactgttgcagaatattgagggtgtcagtgagtttgtatgtaactgcaagcagagagtcactggaggttgggtagtaacaaaataggaggtggctcagacatttccacatgcaaatagattcagtagttcctttttagttcaaatgaaccttctattgcccttattagtgattctataaagtaaaatctacacagtgcagagggtggccttagaggctaacgagcctggtttcctgcctcagctgccctcactgagtgtaggggtgctttctttaatctctggaaacctccactgtctcatctgtaaaatggagataatactaacaccttgatgtgatgtcatgaagagaaattaagagaggcagtgtaagtaaagtccccacatagagcctgggacatacaagccacttcataagtgtcaattcttattgaacctttttattaagaaactaacaatattctatcattctggacctacaaaagggcaatttcatgtggctcaacttaaggtttaggggaagcagtgagagaaatgacaacttgatgcttgtccattgtgacatgacagacctcttgacaagctaagactcccattgtgatgagcctctcacacctggccattccaatggaacagacagggtaaggaccaatctggactgtgttatcttttccaggtgcaagtatgtgctatgggtaagtgccagtttggagaactcccttagccacaggaaatgaaaattcatgtgattgtttgaaggattcagcttctctttgctgctaatccttgggttttgtgcacctagaatgtggtctcctgca

SEQ ID NO: 40606 - DNA, 2300 bp, Homo sapien
aacacatattaaactctcactcggtttttaatattaacctctatgtgcttaataacattgaagaagaagattcaagtagattatagtctgttaaagagttcaaatataaataaataattctcagggtgagaattgccatagcatagatatgttacgtacccatggcagagcgtgaggtggcagcatctaatggttgagggagttgggtgagacatcaagagaaggtgacatatttttttgagtacccagtggaaggcatgggataccatgtggatctctgcagtagattaaatatagacttgaactaacctatcctggaacaataggacaatatccttgtggcttacagaaattattccctgcacctatattgatttgtttattaaacgaatagctttattggtaaacatgtatattgcggaagtagacttggttatcattcccacaagtccagttaaagtaatggcatctatataaaaaactcataaaaactagatatgtaagtaatcaataaaatactcttctcaagtattcaggagaaaaaatgtgttgaaatgatgattcatcattccacataacgtatttgtgactacatttaatagcctcattagcaataaaatttttatgagttaacatcatatgaggatattcccttgtaccttaccgagactttatctgtagatttgtaacataaccataatcatcttggtatgtttcttacacattttattcagtgaacccaaatgaacttctaattacatgttcagctgccagtcatggttttatatgtttgaatatatataccttcagaggatatttgctctttggggtggtgaagacttcatcttcttataaatgcaaacagaagatagttggaagaggaaaatgttttagcagtgtctcaattatctctccttaatgattatttcacaacctcgagatattttcctaaaagactaagtaagaaatatatagtaagattcctttctggatattttcagaactcctagttataactatgcaccaaatatggataaacactggattatgcagtacacaggaccaatgctgcccatccacatggaatttacaaacattctacagcgcaaaaggctccagactttgatgtcagtggatgattctgtggagagggtaagcacatgaacctacctcagtgatagtttttggcccagcttcctttgtgtagacttattcttgccaatcctgtttggttttttccccttcattttccagcatcattttgagagagaaagaaagagagagagtatgtgtttagtggcttaatcatccctcccttatcttgtcctcattccatctacctctccagggttggtttcttatggagccagtaaaaaagaggagagaaaaatcaaatcagcgtagatcaggggccacatcctcaaaggcaataaagaattgatggagcttgtgctgaacttgaactttaagttaagggccccatctaaaggaacagcaattactcagctccagctaaattttgccatgtagaaatgtggatcaagtatcagcaggtcttctgacttttttaaagaagccagaaacacaaaaaattttatttgaaattttctgaactttgaaacatagtataagccaaacaagacgtgcctcaggctggatttaactggatcaggctcagaagcagcctgtttttaacccttggtaattagatatgtgatgataattttaacaatggattttcaaagtacaacctataaagtttgatggtagaggttgttgtgcggggtgtttttgtttttgttctaccaaacaagcaaacaaaaagcctaaaagtagaatgtgctagattccaaaaagttacatttcacctttaccattggacctttccctcccagactgtaagcaaatagaaaatgtggataatgttattaaagcaactcttgccttttaaaaataacaggaaaaagatttgggggcaatcgtggcaacactattgagcatcatcttataccagcacaattgattctgacttgttcctttgctgtatttcagctgtataacatgctcgtggagacgggggagctggagaatacttacatcatttacaccgccgaccatggttaccatattgggcagtttggactggtcaaggggaaatccatgccatatgactttgatattcgtgtgcctttttttattcgtggtccaagtgtagaaccaggatcaatgtacgtatttctctgtttgcaacattcaactgtcgtacctcaagtgtgtctaagataattcaattaccagtc

SEQ ID NO: 40607 - DNA, 2300 bp, Homo sapien
aagcggcgtggacccaaagagtgagcagtagcaagatttattgcaaagagcgaaagaacggagcttccacagtgtggaaggggacccaggcagattgccactgctggctccggcagcctgcttttattctcttatctggccccacccacatcctgctgattggtagagcggagtggcctgttttgacagggtgctgattggtgcatttacaatccctgagctagatacaaaggttctccacttccccatcagattagttagttacagagttttgacacacaggttctccaaggccccaccagagcagctagatacagagtgtcgattggtgcattcgcaaaccttgagctaaacacagggtgctgattggtgtgtttacaaaccttgagctagatacagtgtcaaatggtgtattcacaatccctgagctagacataaaggttctccaaggccccaccagagcagctagatacagtgtcgattggtgcagtcacaaaccttgaactaaacacagggtgctgattggtgtgtttacaatccctgagctagacataaaggttctccgaggccccaccagagcagctacatacagagtgtcaattggtgcactcacaaaccttgagctaaacacaggatgctgattggtgtgtttacaatccctgagctagacataaagactccacgtccccaccagactcaggagcccagctggcttcacttagtggatcccgcacaggggctgcaggtggagccgtctgccagtcccgcgccatgcgctcgcactcctcagcccttgggtggtcgatgggactgggagccatagagcagggggtggtgctcgtcggggaggctcgggctgcacaggagcccatggagtgggtgggaggctcaggcatggcgggctgcagtcccgaggcctgccctgcgggaaggcagctaaggcccggtgagaaatcgagcgcagcgccggtgggctggtactgctggtacctccgcagccgctggcccgggtgctaagcccctcactgcccggggccgcaagggccggccggcctctgcgagtgtggggccagccaagcccacgcccatccggaactccagctggcccgcaagcaccgcaggcagccccggttcccattcgcgcctctccctccacacctccctgcaagctgagggagccggcactggccttggccagctcagaaaggggctcccacagtgcagcagcgggccgaagggctcctcaagtgccgccaaagtgggagcctacgcagaggaggcgcggagagcgagcgagggctgtgaggactgccagcacgctgtcacgactgccagcacgctgtcacctctcaatattcccattgatgctggtcttggatcagctcaacggttactgcatgtatcaacattaaggattttgaggattaaaatttctctttgttatctttagtgttttctgctattagaatataaacctatttcacatggttttggtttgttttgcaggtgttttattcttcccaatgactctatccattgtgagagagaactgtaccaatcggccagagcgtggaaggaccataaggcatacattgacaaagaggttagccatggctatgtgactgtcagatatattccaaactcaaactcggcctgccagccctgctgtgtctggtgggacataccacagatacacatcatctataattatgtgaaaaaatacaaaaaaaaaaagttatttgtctttctccagtgatttaatgatagtcctactgaaaacaatatagagtatgagaagagactgggaactgactcaatggtcttttgaaatctctgtgagaaaatgattcagttataaaagaggaatctgctaatgtttatctataacacatgggttggaatatagagtctatatagacatattctatgcccagtttgtttctatgttaagtatcatctcagatgaatagctgttattacagaacagagaaaacaaggtgaaaagaaaagtactttgtaaagaaaatcctgatcttaatacgtaagtgcttgaaaacatgttttccagattgaagctctgcaagataaaattaagaatttaagagaagtgagaggacatctgaagagaaggaagcctgaggaatgtagctgcagtaaacaaaggtgagcttgtttccatccatgctccactttccaaattcatttccgcacaagccagaggcattagcactgggctcatttttctctcttacctatagaatgtattgtcatagagtacgataacctaagctatttaagta

SEQ ID NO: 40608 - DNA, 2300 bp, Homo sapien
aacatctcttttagcctaaggggacagatttagtgtgtctgatactacataggatagcagagtctagtaattaagagtaaactcttgcccgggtgtggtggctcacgcctgtaagcccaacactttgagagaccgaggcaggcagatcgcttgagtgtcggagttcgagaccagcctaggcaacatgccaagaccaatctctacaaaaaataaaatattagccgggtgtgatggtgcatacctgtagtcccagcaccacaggcggctgaactgacaggatcacttgagcctgggaggtcaaagctgcagtgagccttaatcatgccactgcactcgagcttgggcaacagagcaagaaactgtctcaaaaaaaaaaaaaagtaaactctgtagccagatcccagtgctaccagttgtcagccaggtgaccttggacaaattacttaacatctccttgcctcaggtttttccatctgttaacatgaggatgataataataacctctgtctcaagaggtagctttggggattaaatgagttaaagtacatagtgcacaaggaatgctcattacgtgtacctatcctattaggttggtgcaaaagcaattgcagtttcagaccgtgaattttaaatcattataactgggctcaaacacatctttctcaatcaaaataggaaccattacacccaacgcattttcgccacgagaaataagtttgtttattcctgtagcataaaaattcatgtttcagaccgggcgcggtggctcacacctgtaatcccaacactttgggaggccgagatgggcagatcacgaggtcaggagatcaagaccatcctggctaacacggtgaaaccccgtctctactaaaaatacaaaaaaattaactgggggtggtggcgggcgcctgtagtcccagctacttgggaggctgaggaaggagaacggtgtgaacccaggaggcggagcttgcagtgagccgagatcgctccactgcactccagcctgggcgacagagcgatactccatctcaagaaaaaaaaaaaaattgtgcttcaggattcaatgaactcttggaaagcattttctacgttctgctggttgtggaagtgttttccctacagaaagttgtcgagatgcttgaagaagtggtagtcgattggcgagaggtcaggtgaatacagcagatgaggcaaaacttcgtagcccaatttgttcaacttttgaagcgttggttgtgtgacattcagtcaggcactgtcgtggagaagaattgggccctttctgttgaccgatgccggctgcagacattgcagtttttgatgcatctcattgatttgccgaacatacttctcagatgtactggtttggccaggattcagaaagctgtagtggatcaaaccagcagcaggccaccaaagagtgaccgtgaccttttttggtgtgaatttggctttgggaagtgctttagagcttcttcttgttccagccactgagctgttcatcgcacgtcacaatctgattaagaaatggttcgttgttgttgcatagaataagagaagacaacacttcaaaacgacaatattttttattttcctctcagctcataaggcacccacttaccgagctttttcacctttctgatttgtttcaaatgccaaatgaccatagaagggtcgacgttgagttcttccacaaattctcatgtagctgtaagaggatcagcttcaatgattgctctcaaggtcattgtcaacttccaatggtccaccactacactcctcatcttcagggctttcatctcctttgcaaaacttgttgaaccaccactccactgtatgttcgttagcagttcctgggccaaatgctttgttaatgttgcgagttgtctccgctgctttacgatccattttgaactcaaataagaaaatcactcgaatttagtttttgtctaacaccatttccatagtctaaaataaacatgaagagcaagtaatacattattagcaaaaaaataaagcaagaaatgcccattaaaatgatgattaatataaccacatttattgaagaatgtattccaatatcaaacagcaaatttcaacaatgcaaaaaccgtaattacgtttgcaccaacctaatagttgtttctaaaaaaattttgctgggccaggcacagtggtgcatgcctgtagtcccagctacttgggaagctgaggatcacttgagcccaggagttctagtccagcctgggtaacatagagagaccccatctcttaaaaaatacttgttaggcagcaca

SEQ ID NO: 40609 - DNA, 2300 bp, Homo sapien
aacttcgtagcccaatttgttcaacttttgaagcgttggttgtgtgacattcagtcaggcactgtcgtggagaagaattgggccctttctgttgaccgatgccggctgcagacattgcagtttttgatgcatctcattgatttgccgaacatacttctcagatgtactggtttggccaggattcagaaagctgtagtggatcaaaccagcagcaggccaccaaagagtgaccgtgaccttttttggtgtgaatttggctttgggaagtgctttagagcttcttcttgttccagccactgagctgttcatcgcacgtcacaatctgattaagaaatggttcgttgttgttgcatagaataagagaagacaacacttcaaaacgacaatattttttattttcctctcagctcataaggcacccacttaccgagctttttcacctttctgatttgtttcaaatgccaaatgaccatagaagggtcgacgttgagttcttccacaaattctcatgtagctgtaagaggatcagcttcaatgattgctctcaaggtcattgtcaacttccaatggtccaccactacactcctcatcttcagggctttcatctcctttgcaaaacttgttgaaccaccactccactgtatgttcgttagcagttcctgggccaaatgctttgttaatgttgcgagttgtctccgctgctttacgatccattttgaactcaaataagaaaatcactcgaatttagtttttgtctaacaccatttccatagtctaaaataaacatgaagagcaagtaatacattattagcaaaaaaataaagcaagaaatgcccattaaaatgatgattaatataaccacatttattgaagaatgtattccaatatcaaacagcaaatttcaacaatgcaaaaaccgtaattacgtttgcaccaacctaatagttgtttctaaaaaaattttgctgggccaggcacagtggtgcatgcctgtagtcccagctacttgggaagctgaggatcacttgagcccaggagttctagtccagcctgggtaacatagagagaccccatctcttaaaaaatacttgttaggcagcacatttctgaaattcaagaaaggtcagcaaatttggaacatgtgcccttttgtaaacagaagagtagatgagttgattataaatgggacatctcttctgcatacattctacaagttaaccagagggctatgtggtataaaagatgtttgtggtcacagcctagctcaggctagagtgttgcagagaccatcccaaatcctccaggctgggctcaaggcttctctaaacccttctttgttgcaaaatcccatcttttcatgcttcattggtgacatgtggccatctgccacatagaacaagtgagagtactagttccatatctttattaaataaccatttttcttttgtacaaagaataaatagaaattctgatatttttcttctcatacttccgtcactcacccctctttggaaaccactgcataacagagctaaggggaggataaactaatgtgcctgaaattttactttagtcttcagcctataagagatcactatcttttttcccattttcacctagtttcacagcaaatttacctacggggggaaaggtattattattcttaacatgaaaccacaatatttataagaaagaaattgtgaactttaaagtgtaaagataagggaacactggaatggcaagcctgcctaaggtttttcactctttttgttttgttgtgtttttcttttttacccaacagtgggatctttctgtgcttgcacgagttctaacaataacacctactggtgtttgcgtacagttaatgagacgcataattttcttttctgtgagtttgctactggctttttggagtattttgatatgaatacagatccttatcaggtaagacaatatatgttcattttatgaaggttgttgaaaataggataaccagacataagcttaaatagattgtcctgtctgcattcacagctcacaaatacagtgcacacggtagaacgaggcattttgaatcagctacacgtacaactaatggagctcagaagctgtcaaggatataagcagtgcaacccaagacctaagaatcttgatgttggtaaggaaaaaaatactattttttctattttacctggaaaattctttgtgttactgagctttctgccttggaaacatttaattgcacagaaacatataattcaagatacttagaggagacactttccaggcaattctaaata

SEQ ID NO: 40610 - DNA, 2300 bp, Homo sapien
gatctggtaggggggcgagatgaagtgaggtaaggcgaagagggctgccccgaaggcgatgaggagtccacccacggccagccacaggggccgccgaccccggccgccgaagtagctgacgaacaccaccaccaccaggttcccgatgtcaaagcagctgaccagcagccccgactcggaactcttcagactgtagcgcctttcaatggtggtaattacgctgctcaggtacccagagaccattaacgcctggatgaaggtcagaaagcacatgcacaccaggaagcaacgggaatccgtgaggaccacgtagaggcaccttctctcctggagcatggccaaggcggaggacaccgagaaggttttgctgaggtccaccctgtggttacagtccccgagccccgccgaagtggacggggcagagggactgggggccaacgggttcgggccttgcttcaactcctggtggcccgaagaatccacacagccaaaggccgggttggcgtctccactagtgggactgaggcttggccggcaggaggcgctgctgaggaccggtaaactcttagacctgagggtctccggctcgcacctctcttggacagcttctgcagtggccggcgcctccagctgctctcccgccccgggctgcagtccagtgccttcgtccatggcgcttagaattcagatttgatagctgatggcacccaagcactccggcacgtttcatccaccggcacgaggggccgaagccgggcccagtcagtcttgcccacctgggactggggctgggggcgcagggccgcgcagcagggcatcctcaccagctgcgaggcgcccagtgcatcctgatcacagacacggcttcaaggctccgcagccgcgtgccacagggggcaggggtccgcgcggtactgcgatgagccctactcggcgtccctctccgggcggtagcttgaggcaggcgcctcgcgcgtcccgggctcatcccctccgccgccgccgccgccgccgccgctgggcccgcggccaggagcgagtgcaccctgcgccgggggtgggggggcacttagcgctgctgtccgtacagcatcccacctcgctgcgccaggggtaccgggtgttcgccgcctgggctcgcggcaccctcgggagtgaagctgccgacctgcaaagcagaaagagggcggtcagcgaagagcggctgcggcttggggctagcgtcccagcgccccggggaccagggttaggtgaccccgaaccgtccctagagggacggaggagctagtcaggagcggagccccggaggactaggcagcagccggctgcagtctccagtcccggaacaataagcagcaggcggtcggcggagactctccctcattgtctgccgcggacctgcccccgtcccgccccttctgccttaaacattgcgtttgcttttatatgttaataattatcaacctggcagctctgactcagaggcagtgtcttttaatcgagtgaactaactgcagcctttccgtactcctactccattactcaaaatagaaaatgcccaaaagaacaaaggaaactttttcacagacacacaatgtattccctgtcccaatttttctaaaaggaaaaaagaaggtgggggtaaactacgtgtgtagaaatgtgtgtgcacactggtgtgcgttggcacgtgtgcgcgactagatttgaatctgtctgctccaccagagacacacattcaaagccgaaggcagcagcaaaaaggtcaacatgcttgcctctttattcccaacaccaaaaataaccccctgaccgaaagaactcttcaattacaaataccaggggcattcgaggctgtggcccgcactaagtcccagagcgcggtatcaaacgaaaccgaaaatccgtctgctttgccgagagctagggaagccacaaccaaacaaagagatcccggcacgctgtcagagagcgcgcgaggagcccacggagccggctgggcgcacgcgggccggcggggaggtgtgctattgactgagcgcaccccgctagcgtgggcctggggagcgtgtgcgcgtgcgcggccacacacacacacacacacacacacacacacacacacacacaccggcgtactggaacctctctcgcgatcccgcacccagcttgaattcagcaagaatcgaaaacaggtgtgcccccgtggtaagaccccgcccctaatcttggggacccccactccactcctccagcctggggcaaggacggggggcggaatatgcaccaggtgggagacagcc

SEQ ID NO: 40611 - DNA, 2300 bp, Homo sapien
cctctgttcttcctgctgcgtggaaatgaaggctaatggatattggctactccagtagcaggctgcatagatgtaccacgttgttttaagccatttacatgagtatttcccccacaagccagaggtttcctccgaccaagtatcttgtcttgtttatctttggtcccagaatctactatggtgaatgagacatggtgtgtgcccaaggcacggaataaacgatcagaaatgatttatttattcagagtgggctgtcagcttcagccgctgacttttctagagaccggctccctcggggcttcagcgctcttgggcccccgcagccacgcaggtgaagggcagcggggtggctggctgtgggagggctgggctgggtggctgccctcgcgcctgcgccctcggctgctcctctccgggcgcgtctctgtgcgcgtgtgtctgtttggagcggaggagaggcttgggtgacaggcgaggggtggggggaagagttcagcctgagtcacagtctcattcactgatttctcttcggctggacggaggctgcctcctcacgcggctcccaactattcccgtagctcagtgcccccctcccgccgctctactcagccaggcagacagactgacagactcgctagtgagtagcggcggcttgagcgcccgggcagcgcggcgggctgtcgccggcggtcttgtcttcccacgggctctgtgtgtgtgtgtgtgtgtgtgtgtgtgtgtgtgtgtgtgtgtgtaggatgtgcgtgtatgtgatgtgcgcgcagggggtgtccctgggattccacgcctgctccaagagctccctgccgggatccgcgtgtccatccgagtctgcgatgctgtgagggcgctcgcctaagcagggggttcggacgccccccgcgagcggcgagagtttgctgggattccccggctcctcacgcagcggctggtggggttccccgggaaggcgcctgggtaaggcagcggcggggaagcccgggattgtgagtggctggcaggccgggaatctgggagcgggtttggcccagcacagccgagggagatgccggagcggccacccttggccgcccagcctctctgcctttctcccttgcccttcctcctttcttttctcagcagcatcacaaaggcgcgctgcaaaatgaaacccagtgtagtgaagctcggctgtctcccacctggtgcatattccgccccccgtccttgccccaggctggaggagtggagtgggggtccccaagattaggggcggggtcttaccacgggggcacacctgttttcgattcttgctgaattcaagctgggtgcgggatcgcgagagaggttccagtacgccggtgtgtgtgtgtgtgtgtgtgtgtgtgtgtgtgtgtgtgtgtggccgcgcacgcgcacacgctccccaggcccacgctagcggggtgcgctcagtcaatagcacacctccccgccggcccgcgtgcgcccagccggctccgtgggctcctcgcgcgctctctgacagcgtgccgggatctctttgtttggttgtggcttccctagctctcggcaaagcagacggattttcggtttcgtttgataccgcgctctgggacttagtgcgggccacagcctcgaatgcccctggtatttgtaattgaagagttctttcggtcagggggttatttttggtgttgggaataaagaggcaagcatgttgacctttttgctgctgccttcggctttgaatgtgtgtctctggtggagcagacagattcaaatctagtcgcgcacacgtgccaacgcacaccagtgtgcacacacatttctacacacgtagtttacccccaccttcttttttccttttagaaaaattgggacagggaatacattgtgtgtctgtgaaaaagtttcctttgttcttttgggcattttctattttgagtaatggagtaggagtacggaaaggctgcagttagttcactcgattaaaagacactgcctctgagtcagagctgccaggttgataattattaacatataaaagcaaacgcaatgtttaaggcagaaggggcgggacgggggcaggtccgcggcagacaatgagggagagtctccgccgaccgcctgctgcttattgttccgggactggagactgcagccggctgctgcctagtcctccggggctccgctcctgactagctcctccgtccctctagggacggttcggggtcacctaaccctggtccccggggcgctgggacgctagccccaagccgcagccgctcttcgctgac

SEQ ID NO: 40612 - DNA, 2300 bp, Homo sapien
tactttacggtaactgagcatgaataaagacagagtgtttcagggacacgattgcttgattttcaagtagggaagtcctgtgatgtcccctgatgtatcacattgaattcactgatgtctggagctgagactgaaatgagagaatgggacacagagcttggaaggaggtaataggaggtaggttgattctgtgtggatttagaatcagctcagaagagtatttgggttcaggaagtgccacgtatctttgctcactttatcagcagtagaggactaaaatctgggcagggtggcagcgggagtcctattgcctgtttgtagaaaagtgactgtgcctgatggcgatctcaagaggaggagacaatggcagggaatgaagaaatgcctcggttgataggtcagtcttgcagctgccagaagattgatgctctctcagcatggacttcaaatacacactgattgttctttactgtcaactggccttaattgttctctaaggatcgctgtagatacgacggttgttggactaaagggagataatcaaaagaatcaaggtgcattgacgagtcaggatgttattcaatggcaggagagagggtagagagtcagggttaagaggttaagtaagaacatagtcttttggagcacattggttcatattgtctacagagcagctgtgtgcctatataaagttacttaacctctctacacttatcacatctgtaaaatggagacaatgctttcattgggcaaggccaagggccagtggaggggcttcgacctggcagcaatggccagcatggtcactggtacttgtgagcaacctcctttcctccattagagcactatcctgctctgtcaatggtcacaagtgccctcagatactctttttttttttttttttcagttatcatcctgtttgtcttccctgcagcctgtacacatctgacccttcccttcttacagtcgtctgctcttttggcttttctgatgcgtcccacacctctctgacccttgcttccagtctccttcctttggctgtacgctgtcctcctagattcttcacaatttggatgatcttccctattcattccatcctttctcatgccacctttgggctgatgactactgatcaatattcctagtccaaacctcctgtgtgtccagtggcttatgggacacgtacactgggatgtcccccaaacatttcaaactcaacacatgtagatgagaacaatctttctcctaaagcatgtttctccacctgtgcttttattggctgtcaggcacgtagtcacccaacttggtgctagaaacttgggagtcatcctacctcggctggttttcttctcttgcagattgcatcagctgcccagttccctcctctccatgccccctgccaatgcctcatcacattttgctttcagactgcctcccaactcacttctgtgcccgcagtgtggcctcacatctgtctacctgtcactgccagagccagctctctggtgaggaagtcagaacgtcattgcccccacattattgacagtacacaacttaggaaacccgtagtgcccctttctactcagccactcttgcagtctggtcctctgccccatccctgcaatcttctaggaagcttatctacctattgactggcagcaccatgcccccgtgcctctgttcttcctgctgcgtggaaatgaaggctaatggatattggctactccagtagcaggctgcatagatgtaccacgttgttttaagccatttacatgagtatttcccccacaagccagaggtttcctccgaccaagtatcttgtcttgtttatctttggtcccagaatctactatggtgaatgagacatggtgtgtgcccaaggcacggaataaacgatcagaaatgatttatttattcagagtgggctgtcagcttcagccgctgacttttctagagaccggctccctcggggcttcagcgctcttgggcccccgcagccacgcaggtgaagggcagcggggtggctggctgtgggagggctgggctgggtggctgccctcgcgcctgcgccctcggctgctcctctccgggcgcgtctctgtgcgcgtgtgtctgtttggagcggaggagaggcttgggtgacaggcgaggggtggggggaagagttcagcctgagtcacagtctcattcactgatttctcttcggctggacggaggctgcctcctcacgcggctcccaactattcccgtagctcagtgcccccctcccgccgctctactcagccaggcagacagactga

SEQ ID NO: 40613 - DNA, 2300 bp, Homo sapien
caggcacatgccaccatgcctggctaattttgtagagatggagtttcaccatgttgcccaggctggtgttgaactctggggctcaagcaatcatcccgcttcagcctctcaaagtgctgggattacaggcttgaaccaccacacccagactttccttcactgttaaagagaaaagaattattactgatgccaggcaaggtggctcatggctatagtctcagctactccagaagctaagatgagagtattacttgagcccaggagttacagcccagcctgggaaacacaatgagactccatcactgattattattattattattattattgagacagagtcttgttctgttgctaggctggagtgcagtagtgcaatctcggctcactgcaacctccacctcccgggttcaagagattctcctgcctcagcctcccaagtagctgagactactggcacgcaccaccatacccagctaatttttgtattttggtagagacaaggtttcaccatgttggccaggatggtctcaatctcttgacctcgtgatccacccgcatcggcctcccaaagtgctgggattacaggcataagccactgtgcccagccccgtcactgataatttttgaaaagttgagcctggtcaaattatcttgtctgggttaaatcgacatgaccttccatgagtttaacacaccattatatgatatataatcaatctaattatgaaaactgattaagaagtgatgctacataatagcttagagttattaaaccattgaccaatgagtcttctgcattccctgcaagaccacaaatttttcagcattctacattttgttttaaagaatctaattttctgctcaaggtcagaaaaatcctgtgttcattaactgggatggagtaggtctttgctgagtattaagaaataaaaatgatcatttagcagctaggaaagaggataatccattgctgaaaatagtgccctcaatcagcttggaaggttcactatggaagaaaatgtacccaggcaaacatccagtgacttaccacctcgccagaatagtcctcctcctgatgtgtgttttggactccattctttttataccaaacacagccctgcctcaccctcaaattctttctagtaaattatgctttggtagcatgacttcaatctacaacaaggaaatattaaaagaaccacatggcattcatatttatcataagaatgttgtagaggatgttggtcactgcacaatacgatgtctcctactagacagtagaaattatctttggtttcagccccagggatagttgtacttccccttagcagcctgtttatttttagatacacaccatgaaccatagattcttggcatttgcagatttgatctttgcatgttcagctattcaaaagagacatgtcagttgcttaactcacaaccactgtaaagccaggatgtgatatgaaactcttgctaatgagtgaacctgacatctcagtgcacgttaggacagctttgctgttcatcaacacgtgctgagggactgtcactgttcttcgccacactgtcctgtctgattccaccatcctcctcgggctggttgctaaaaagctcaaagagagttttatgccccgcttctgactgtatattctgggctctaacctcatccttcgtaacgattccatcccaatgcaaataagttagagtttctaggtgcccttcccaagggcccagtggtctgcacagtgtcacttcaccctgaacaaggtcacctgggagctgggctcagcaacaggacaaaactgagcgtctcacccctgctcagagccacctcacgaacagaaatgttcgcttcatgggaagagctccgtcttggtggaagagagagatgagggatgagggaaaataggaggaagtgaaatactcgcctttctcccacactaggaaaaggggtcactttcctggcaaatgagggagagggccaactccaaacatcgagatttgagaattacttctgggcgtgtccagcagagggcgctctggtataagtagaaagaacagcagagtcagccactcctggggaaaatccggaggtttaggttggttgcctcgctagctccagaactggtatacaggggcttgagacaagaatggaagcccgaaggaattcaaaggtatgcttacataggaggagatagcgtgcaattgcccagagaaatccttgcagcttcaacagcccttcccaacaagccaccccttagaacagtcaccaaaaatacgtaaaatattgccagcta

SEQ ID NO: 40614 - DNA, 2300 bp, Homo sapien
actccagcctgggtgacaaagtgagaccctgtctcaaaataataatgataatactaaaataaggttaattctactatactgatagggaatgattactagtaggagctaggccgttgcagaaacgagtgaagtataatcccatttttatttttacaaaatcctacgtaatcctacacaatctaaaagtatagtgggttttggtttgtttgtttgtttgtttgtttttaaggaatgggggtagggagcaaaccaaactgttgatcaggattatctcctagagtagaaatgggaagcatggatttcaacttttcttttatcgatttctcccaacttcttaaaacaagcaagtgttattttaaaatagtgtcaaatatagtaaactctggattctttgcaaaacaaacctctaagataaggtttgatattgcttccgctaaaataaagctacgacacttccgtgcacgaaaaaacggcctcttgaggacctgcaacccacagatcacccaggtgcccccatatcattcttgaaatcctacctgtaaagcccaggaggaagtatagcgaatgccagtgggtctaggagctctggggtgagcacgcctccggaaggaaaacggcaacagaatttattctgcttttccaagtaaatgatccttccacagaggcacttgggacaagaggcgacgggtacttttcacgttttcgatctattggctaagatcctatcacctcaaaacaaggagacgaggaaaccctgggatcttgatcccatttcgattgagaaaacaacacgctccttgcgaagcgaaacggggctggccgcgggcagcgcggaaccacgcgaaggcgtcgggggcgggcgggcgcggggaccagggccacccggtgcagcaaagggggcaagcaggcggcagggcgcgcggggagacaaggctgagtgcacgccgcccgcgccctcgaaggctctagtcccactccttcctcccttcttgcagccccgccgcgccctggcgaaggctacagggtcaggttccccgcaccgaggagcccagaagcccggctgcgggcgctctgaagatccgggaccccggcctccgtcccccgccagctttagggactctggcggcgtctcttagccgggtagatgttcctcctttccctctctcttccaagccgctgccaggccgggggtgaggctgcacctcagtcttcagccccgaaggccgcgcccggggcgggtcgctccccattcagctaagaggaagcagcggccggggggcaggcgaggaacctgtcccggctcacccggcaagactgcgtttcccccaccctcggcgcttctttctgtgaatgtgaatggaactaagcgttcctttctctccctcaatggccggcgaggagaattcaaatgcggtctttgggcgctcggtatgggtctggaccttggttttcagagcctgcgcgtccaaggtcgctagcctttcccgaaggaagtgacagctgcggcggcgcgggaggcccatcctcggtcgtttaaagccacttaaggaataaaagcccccgagagagcaaaacgaccacccgaaacctcggaagcgtcgggggtgccgggcccaacgctcccacgtgtcactgccggggactcgcgaggcgaagcttcccagcgctcaaggcgctcccgcctcgtccccaggtatcaggaacagacacccaccaggtccaccagcgggtcagacgccgccttcgggcaggctgggatcttccgaactgggagcggagagtaaggggctcgaccccgggacgcgagtccggccttctggactccggttcagggtgtgtgtgcgcgcggaggggcttatctgggggccctgggtagcacacgtgttcggtttttttctccccgactccgcacgcctggagcggcaatactgcctgccctagaaggccagcggcgagtgctcgccactagggtcccagggagggtttggaaaactgatgagttaagtgagcgaccccaggggacagagggcgagtcgagagtcggccaatggctgcggtgggcggggagaagacgacgcggggatctgcgtgggccgggtcaattccctaccctcgacctgtcgatgccccgcggccccgcccgccctcttaagcctggctcagccctcagggcccgcccgaagtctaccgagcccgagtggcctaccgagcccgagtggccccgcagcgtccaggaggcgcccgctccgcggtggcgctcttggaggtggtgtcggaggtaggcacgggacaggacgcgc

SEQ ID NO: 40615 - DNA, 2300 bp, Homo sapien
catgtgtattgatttgggggttacaaataaattttactgagtaggcaacttcagaaatgtggaattcataaatgaggatcaacgatatcttagcagcctcatgcctctcactgacagcaagcactgggatcccttcccttcatccatcctgcctttcctccctctccaccctccacctctgactcggtctctgtgcgttcttatcaggcactctcctcgctctccccttttcctcctgcctctgctcagccttttgtgaagtgcaccacgtcaccttttgtcccagtgattttatttctctatagacttgaatgtcacttgaatgagactctaaactaccatcctcagggtttatattacagtcttcttatagaaaggactgtgttattttgagatccttcagttaattgtgtccttacaaaatgatttaattgatattagcatcaaacttaactctgctgagtcatagcaaagcttcagaataatcatatctttagaacttagaagctcatgttctcaatcactagttgttcaactctgagtcattcctttcatgtaatttttttccaaataattttacagatgatagtaccatttgctagcctctctataatactcactttgttttttaatctatgtctgtccccgacattttcctccatgtgttgccccggatttcaggcacctattaatgcacagatgctggcccagagacagagggaaatcctgaaccagcatcttcgacagagacaaatgcatcagcaacagcaagttcagcaacgaactttgatgatgagaggacaagggttgaatatgacaccaagcatggtggctcctagtggtatgccagcaactatgagcaaccctcggattccccaggcaaatgcacagcagtttccatttcctccaaactacggtactggacttagatccccaccacctttcaccagtcctttctccccagtgtcccccagtgttgggtcacagctcctctctcacagctctttgcatggctcccagatgaatctggctaaccagggaatgataggaaacctgggaggacagttggggcctgtgaggagtccccaagtccagcacagtaccttccaggctctcagctcaggtacctccttttctctgagtgcaggtcttactttaagaatgaccgaagtaagtgtgtgtgcatagactgtgtctatcttgtgtgcgagcgtgtatggatctatgtttatgtcaatgtctacaagttcatatatgtttatatatttgaaagcctctgagtctgactcaaacaaatcaatagatacaaaatgtaaaaagacctctataaatttaaatatagacattctgcgacttttgaaaaatactttacagattataccagatcattaatgaataggtaattcttgagaagtactgtatagaaactacagtgggagaccttttagtcctcttcatattgatttgttgtttaatgtcagtcttaagagataccaagtgtgtaatgtcatgaacattaatatttgtgtgcatgtcatgttcagttaatggttgaattattgataaagtaagtgcttacattaatgttaatattcaaaaatgactttccctaccctttgccagttatctgtaaataactgtgaagtctgttgccgaaatccaagtctcctgtttctttaaagaacagaaagataatgtgcagcctttttctatatgatcttaagcttttcttttgtagctaatttaaatattaattaaatatgcatgttttacaagtcttctatgcaaaagtgtacttaataccatcctcaaaatactctaagttgcctcctttgtttcccagctcctttctctatttccttcttgatgatttagaaaagtgtgctgaaagttctctttccttttagtttaaattctgtttgcctcgaaactgaacaagaagcatacattgaatttttttcttattcttactaatattggatagccctaaagtaccacagagctctttataaagacaaaacaagctaaccatgaatacagctatttatttttaaaggtggatccatctcatcatggaatggcttcagctaatttaatataaatttattcaaatgtgttgacttttgatatatagctgaactttaatccaatttaaatttaatttaaacaatctggccaggtgcaatggctcatgcctgtaatcccagcactttgggaggccaagaatctcttgagctcaggagttcaagaccagcctgagcaacatagtgagaccttatctctactaaaaattaaaaaaa

SEQ ID NO: 40616 - DNA, 2300 bp, Homo sapien
catcacccacttcttacactccccagcgctaacatttgttgttataggcttccaagcattttctatccacaaacaaacacagacacacacaccccacacattttttttattcttttcccaaataaaattggcggtacacccacaaattttaggatgaagacatgtttaaaagcatgggctttggagctcaccagaactgggctcacatcctctccaactactggctgtgaccctgggcaaattactttaagcttcaattttttgtgtgaagtgaaaagcggcaatgacttcggaaggtttgaggattaaggcctatagcatatatacatcacctagcacagtcagattcacagtaagtgttcaataaacactcttattgtctaccgcaagtgacctttctcattataagattaaaatcagggaatatgttcctctcatagtttgataactgccattaaacaaaagttttttttttcaactaattaccgtataagttggaaaaaaaacttgcttttccaaagcgtaaaacagattggtctaagtaacacttaaatgggggttctcgcattttcagtgccaatctcctacgtcccctcagtactttgttcacggatgtctagagaatggactttccaatacaaacttatgatttcatgatgtgccgaaaattctcaaccaggttaagtttcacactctgtgtgcagcatttgctttatcccgcaattgccgggtggtgccccttccagctcccacagtcgcgcctctccatcccctctggagctaggactgcaatgggagaagcctctccctgttggagccgtaggggacttgacggatgcggggcgcctccggggagcagcggcaggaccgggagttgggtagggtgaggtgcgcccgagggggtgcagggtgctggccgaagggtccggccggacgggcgcgagggtcctctgctggcgaccctggaactcggctctccccgatcttcgtcctggggcaccgtccctgccgtctgcagcccccaggccccactgcctctaactcagcggcccaggcccgtcccagtcgctagttttctttttggcattgccctttgccctcccatgcagtcctctgttgactctctcttcagttccagtcacctctaggtcaccctccctctaccacagtcacccattttgtcccctgtccccttactcttcttcacctctccccgggccgccttctcagaggactctgccgacggagatgctgcggaccccgcggccaggggctgctccccggacaaccctgcgtccacctttgccccttcctcgggggcgcgagaggcaagtttccgccccgtccttttcccggtgacaggacttggcggcggccactgccggggaggcagagggagggacggcctggctcccgagccccctcccctgctcgcgagctcgcgctgtctgtctctccgcaagtgcggagacgcggaggaggaggaggaggaggaggaggaggagggagttgggggaggatctccattgaaataaacaaccaggcagcagttattaacacgggaacatggcggccgcagcctcggctacagcttcggcggcgaaggtcagcgccgacggcagccggcacctgacggcgtgaccgacccgagccggtaaccgcgccttcccccggggccgcgagggcgggcggggggcgggcggcaggcggggggcgccgcgtccccacccccggccgcgactgcccttcctgcgccgagctccgacagagccgtgcgcctccgagaggctgtttttgtgtgcggggaccgccgccggagtgcgcggaaaacgggagttgcatcccggaggcgcagcgacgctggggagttggggcttgggggtggggagggcgggaagcgacggggagacgcggagtccccgggagagaaaggaggcgctccagcgccttgcgagagctcaggagacgagtcccggagcgcgaggcgggcggaggctgcagcccgcggcgcgggcgagaggtgagcgccgaggcgcggccgggggtgcgggcgcggcccccgccccgaggagcgagtgcccattgcccagcccggtgcggggtcggcggagaccgaggctctaacccctcgggggcagcgcggcagagccgagaaggtgaatcctgggaaggtgcattctttaatggaagcgcggagcggctgcagcggagagtgggagccgggcgaggggaggcaggactcgggaagtgctgggggtgtgtgaaggtgaagcggggtgtcggggcggccggcgagctgc

SEQ ID NO: 40617 - DNA, 2300 bp, Homo sapien
taagaaaaagtcttcagccgtcgtaagacgttttattgggtaatacgggaatgcaatggggggagtcatttgtttgcagaggtatcatgggtagttttaaaaagtgtgaaatctacgattgcagaggactgatagactctggacttctgccaaaatgggagggatagcaagcaagaaggagaatcttttttttaaatttttatttatttatttatttattatcacaactcctgataactcacagttgggggtgaggacaggaaagcaaatcgggagttcagaattgtgacaaacctcaggtgactactaccccattgtagacaagctacagactggtattagcagaagataggccataaacaaactctccatttcctctcaacgctttgggaacataattctattattccagctagctaaaaaaaaaaaaaaaaaaaaaaaaaaaaaacctttaaaaatatacattaatacatagtcaatgcaaacatttcaaacattagataggtgtgcaaaataaaaagtggaagtgcctcatcacccacttcttacactccccagcgctaacatttgttgttataggcttccaagcattttctatccacaaacaaacacagacacacacaccccacacattttttttattcttttcccaaataaaattggcggtacacccacaaattttaggatgaagacatgtttaaaagcatgggctttggagctcaccagaactgggctcacatcctctccaactactggctgtgaccctgggcaaattactttaagcttcaattttttgtgtgaagtgaaaagcggcaatgacttcggaaggtttgaggattaaggcctatagcatatatacatcacctagcacagtcagattcacagtaagtgttcaataaacactcttattgtctaccgcaagtgacctttctcattataagattaaaatcagggaatatgttcctctcatagtttgataactgccattaaacaaaagttttttttttcaactaattaccgtataagttggaaaaaaaacttgcttttccaaagcgtaaaacagattggtctaagtaacacttaaatgggggttctcgcattttcagtgccaatctcctacgtcccctcagtactttgttcacggatgtctagagaatggactttccaatacaaacttatgatttcatgatgtgccgaaaattctcaaccaggttaagtttcacactctgtgtgcagcatttgctttatcccgcaattgccgggtggtgccccttccagctcccacagtcgcgcctctccatcccctctggagctaggactgcaatgggagaagcctctccctgttggagccgtaggggacttgacggatgcggggcgcctccggggagcagcggcaggaccgggagttgggtagggtgaggtgcgcccgagggggtgcagggtgctggccgaagggtccggccggacgggcgcgagggtcctctgctggcgaccctggaactcggctctccccgatcttcgtcctggggcaccgtccctgccgtctgcagcccccaggccccactgcctctaactcagcggcccaggcccgtcccagtcgctagttttctttttggcattgccctttgccctcccatgcagtcctctgttgactctctcttcagttccagtcacctctaggtcaccctccctctaccacagtcacccattttgtcccctgtccccttactcttcttcacctctccccgggccgccttctcagaggactctgccgacggagatgctgcggaccccgcggccaggggctgctccccggacaaccctgcgtccacctttgccccttcctcgggggcgcgagaggcaagtttccgccccgtccttttcccggtgacaggacttggcggcggccactgccggggaggcagagggagggacggcctggctcccgagccccctcccctgctcgcgagctcgcgctgtctgtctctccgcaagtgcggagacgcggaggaggaggaggaggaggaggaggaggagggagttgggggaggatctccattgaaataaacaaccaggcagcagttattaacacgggaacatggcggccgcagcctcggctacagcttcggcggcgaaggtcagcgccgacggcagccggcacctgacggcgtgaccgacccgagccggtaaccgcgccttcccccggggccgcgagggcgggcggggggcgggcggcaggcggggggcgccgcgtccccacccccggccgcgactgcccttcctgcgccgagctccgacag

SEQ ID NO: 40618 - DNA, 2300 bp, Homo sapien
gtattattaaagtagtctatataaagaagctactccagaaagaaattcaaacccacacatgattaagcaagaaggatgaatcatactcaaaatggaggaaataactatgcaagacttaaataactacttgtgcttagtttaaaagctgtttttttaaaatctctccctttaaaagcttttctttactccccaaatccaataaaataattctatttaactttatcagtacaaaacttactgccaaagaaaataatcacaatatttatgttgctgtattagttattgcaaaattgataaaagaagatggaacagataatgtgctcttattaatacacatggaatcactaatcctgtaacagttttatcaaggaggtgtgattaatgccattttgaggtggcacaagtaagggtcaaaactgacaataagccaagttcctaagctcccgcagcttgtaagtggcattgctactggggtttgaagtctggtctgtctggctccataataccaccaagacctgccataaggaaactaaataggtggagcacagtggctcacgcctgtaatccaagcactttgggaggccgaggtgggcggatcacaaggtcaagagatcgagaccatcctggctaacatggtgaaaccccatctctactaaaaatacaaaaaattagccaggtgtggtggtacgcccctgtaatcccagcgctttgggaggccgaggtgggcggatcacgagatcaggagatcgagaccatattggctaacacggtgaaaccccatctctactaaaaatacaaaaaattagccgggcgtggtgccacgtgcctgtagtcccagctattcgggaggctgaggcaggagaatcgcttgaacccaggaggtggaggttgcagtgagctaagatcatgccactgcactccagcctgggcgacagagggactccgtctcaaaaaaaagaaactaaatgaaaacaggttaagtagaagaaggaagccagtctatgatggtcgacaaatgaacaatacactcacacataataatctgcgaggtatacaaatagattccatctactatcaatctagggcacatcacttccagcaaatcttgcttttaattttaacagcacttgcattattcacaatacttaatttgacctttcagttttctatttttacactgatttttacatgaaacttacacattagcgagagaagcactttaaatcaatcccaaacaaaacacaaaatgaaagtctctgagtcaggaaagattgggaggcaaaagtttgaccttgtgagttgcatccattaggagcactagcaatctttgccagccagcagccagtaggcagaggggtgggaagtaaacgccaggataacgaggcaagaccgcctcccaattctcttgagttacgcttctattttattttgtttgaatttttttggtagagatggggtcttgctacgttaccagggctggtcttgaactcctgacctcaagtgatcttcctacttcagcctcctaaagcaccgggataacaggcatgagccaccatggcacctagtcttgctggaatttttgagatcaaatctgccatgtgtaaatctaagtctttataagaagcatatttcaaagccaaatactagtaatgtttatatcagccgctattttacattgctcaggcagtgttctctttcactaatgctattagctgaacattggttcaattgcttagaatggaaacaattatatgtaatatttcatagttattgctcttgacatatatcaaaagagaagtgacactggatgtgacaattcaaataaattccaatatggaacacaacttttgcccccaatttttcctgtgttttcaaatagagatgctaagctttatttctcatactacttatttgttgggtcctgctcacaggactggaggagtgaggtcagtatgatatggagtgctgggaagggaaaagcgtggtccctttaaatgatgcggaatggaggaagggaagtgctgggtagagaaaggcgggtccctggctaaggctcctccccgacgaaccccattcctgctttcccgctcaaatgttgcattttctaagacctccctggcccgccatacgccgatcctgaacctacgaaaacccaagactgcgggcacggtggctcatgcctgtaatcccagcactttgggaggccgaggcgggcagatcacgaggtcaagaagtcgagaccagccttgctaacatggcgaaaccctgactctactgaaaatacaaaaattagctgggcg

SEQ ID NO: 40619 - DNA, 2300 bp, Homo sapien
gcataagccagagcaccaggcctagcactgtatttaccttcacaccatatcatctgatacttgcaaaaaatggctgtgaggagaacagtacaggtgatattatttcctgataaagagcagaaaaattgaggctcagacttgggtcacccagtaggtaggtggcacagcccagacttaaagcttgagaatgttagtttccttctacctaccctttaactatacctgctacctccttagcagtggtttcaaacatgcatgacacaatcaggagtaaataatatctgtatctagatccagaaaagcccatttgatgagaggcgaaaataaggttaaaatattatttaattttaaaattaaaaaaaaaaacaaatatgctccattaaaaagaaaatgtattcaccttttggtcactggtaatatcattccattaggttttctcaaggattcttaacgtcgctcatctttttttaagcactcctatgtcccaggcactatcctagactctggaaatacagactcgtaaaaatactccaaaatctctactctcacttgttacatgcaggagagaggagacaaaacaaggcaggagcaaaataatttgtatatttactgagacataaaggctccagagaaaaattaaaaagggaaaaaagcaaaggaatgagcgtgtgtattggggagcgaggggaaaaacgtaggatgttactcgttcaccttgcaaagtttatcatccacattcaacagctgttaaataagtcatcaaaatactagatacgtgggaagagaatttacacactcctgacattcccatcctctcctacttcaagaaacaaaattactcgattccttggcaccgctgttcagaacctcgatttatccatcagaccttgtttctttaaagcgtcagggcaaaaagttcgttaactggtaataatatcagtttaaaagacaaaaatgaaaacaatctggcgcgcctccactgcgccggtgcccggcggccaccgcccttcaagtcgaaagcagatgcctgactccggtttctcgctcaccccaatctcggagctaccgggggctcccctgtcactcggggcctgtggtctccaggccggcactcctcagacccgggggccgggcctcggccttccccggccctcgcggggctgacgctcaccgcggccgaggctggcagtccccccaagtccgcccacccgccccgagccagctcggcagcgcaggggccgcccccgcccgcaggcccctcgccggctgccacgtaacccttcgcgggaaccaggaactgcgccgcgcagcctgcgggagggggcggcggcgggtcaggaagggggcgacgcggcggtccccaccccctgcgggccgcgatgaggcccaccgggactttgcatctccgggccggccgccggggagctgccgccgacgtggggcagggcagggaaggcctgcacctcagggactgggggtctgcacccaccccgggcccgagccccccgcgtcctgggcggagaagccggggctggcatctggagcccgggcccgggctggaggtggcggggcaggcggttgggactcggggcgggctcacctcaaacatgagccccagcaggaagaccatcgccacacaggagacgatgtccgcgtgattctgcaggacgaattcgtggctcagcactggggggctcttggtgcttttcttgcgaatcgccatggtggggccgccgcccgcgcctgcaggtgctccgccccggttctgctcttcccagctgctcaccgactcgccgccgcctcccgctggctgctcctcacggccccgctgcagccgctcgctggggcttcacttcccatcccacagccagtacgcagccgccgggccgcccgggggaaaaaaaaaaacacaacagctagcccgcagcgggggcgagcatgcgcaccagggagacgacgctccctggtgccgcggccgcctccgcgagcccacagcgccacctggggaccggaggccgctggcccgcggccgggcgagcgtgcaggaatgtgagcggcgcttccctgcttcgcgccgggcccgggtttgggagtcgtttgaggcgcgagcttcctgcgcctgctcagcagcctgaggccgcggccgggtgccctcctgccctcctggccatccagggattgggtgtcagtggcctgttgcacattgtcacttctacaagtgactaacaccgtcaggataatctaaaactacgaatactacctgactccacaagggtacggtgtattctccagttttagca

SEQ ID NO: 40620 - DNA, 2300 bp, Homo sapien
aataatccctgactaaatttataaagcccttactccccgctaagcagtttccttcaatcatctcatttaatcactaaaatgagcaatagttatccccactttatagatgatatccacagggcttgctccctcacctcctgcaggtcttcaggcaagtataagtgcctcgcactttcctattccccttgctttatttttctcctggttgctcaactcaatttaacatctgtttcgcttttgaaatcttgtttaaagattctctcccacactagaatgataagtccctaggaataatttaatttgtatttcagttctgtatccccagtgcccaggacacagtcaaccctcagtaagtacataaatgaatacatttttaaaaatgaggaaatcgggtcccatagagattaagtaacttgtccttgatcgtacaagtaataagtggcagaattctgatttaacaacccacattcttaaaccactaagtggttacaccagagttgtaatattgtaggcaagaggcaagtaccctcggactgcggtagtggggaagcggggtgataggtctgcctcgaattggtgatgactggatgtggaagggcgctgaaagggctcaatctagcatgactttggtttctacatttggcttatgggtaaacaggagagcaattcttcaggaaaaagaatacaaaggactccaggtttgggcaaaacgataagaggaggacgtgtcttaatccacgatcctttttaactcttttactatttcccttagattactaaaacatgttgttaatttgaatatatgtgaagccagtaaacccaaactgatcccttcgtcttcagtctgaggccagtgggggataggggtggggatggggacggggatgggggtggggacggagaggcagaccagaatagggtcagctctttttttttttttaagttagtccaaacttaccaagagtagaaataagtccccagcagtgcttaactctgaggtaatttttaaggcagatgctaaaactggagaatacaccgtacccttgtggagtcaggtagtattcgtagttttagattatcctgacggtgttagtcacttgtagaagtgacaatgtgcaacaggccactgacacccaatccctggatggccaggagggcaggagggcacccggccgcggcctcaggctgctgagcaggcgcaggaagctcgcgcctcaaacgactcccaaacccgggcccggcgcgaagcagggaagcgccgctcacattcctgcacgctcgcccggccgcgggccagcggcctccggtccccaggtggcgctgtgggctcgcggaggcggccgcggcaccagggagcgtcgtctccctggtgcgcatgctcgcccccgctgcgggctagctgttgtgtttttttttttcccccgggcggcccggcggctgcgtactggctgtgggatgggaagtgaagccccagcgagcggctgcagcggggccgtgaggagcagccagcgggaggcggcggcgagtcggtgagcagctgggaagagcagaaccggggcggagcacctgcaggcgcgggcggcggccccaccatggcgattcgcaagaaaagcaccaagagccccccagtgctgagccacgaattcgtcctgcagaatcacgcggacatcgtctcctgtgtggcgatggtcttcctgctggggctcatgtttgaggtgagcccgccccgagtcccaaccgcctgccccgccacctccagcccgggcccgggctccagatgccagccccggcttctccgcccaggacgcggggggctcgggcccggggtgggtgcagacccccagtccctgaggtgcaggccttccctgccctgccccacgtcggcggcagctccccggcggccggcccggagatgcaaagtcccggtgggcctcatcgcggcccgcagggggtggggaccgccgcgtcgcccccttcctgacccgccgccgccccctcccgcaggctgcgcggcgcagttcctggttcccgcgaagggttacgtggcagccggcgaggggcctgcgggcgggggcggcccctgcgctgccgagctggctcggggcgggtgggcggacttggggggactgccagcctcggccgcggtgagcgtcagccccgcgagggccggggaaggccgaggcccggcccccgggtctgaggagtgccggcctggagaccacaggccccgagtgacaggggagcccccggtagctccgagattggggtgagcgagaaaccggagtcaggcatctgctttc

SEQ ID NO: 40621 - DNA, 2300 bp, Homo sapien
ggtcatgtgtaaatgagacatgaaggaacagcaggagcctgctgtgtctatgaaaggacaggagaaaacattccagacagagacagcagtacacgcaaaggcaggggagagcatgggaagagagcatgtcatggcatgtacagtcgtccctcagtcttcacaggggactggttccagggcccccgcggataccgaaatccacccatgctcaggtgccttatataagatgatgcaatattctggtaaagaatatcctaaatcctcccacagacctccaatcatttctagattacttataataacacaacataactgctaaataaatagttggctgtactatattatttagggaataatcatgggggggtagtctgtagatgttcagtacaaatgcagtttttttcttgaatatcttttactccaggttggttgaatccacagtgtatgcggcacccacagatatggagaggcaactgtatagtgtgtgtagtcaataatgctggtacagagattatggcctgtagatgcagggctccagtctgttggggtaggcaaggaccaaatcagaaagggctatttcatcatgctagctttccatgaagggaaagggaacccgctgaaaaactttctgccagtagaagcatcattctagtataaacgttgaaaggtgatctgaagggaaatgaaactagtgattgcccagaaggaggaaaagaataatccctgactaaatttataaagcccttactccccgctaagcagtttccttcaatcatctcatttaatcactaaaatgagcaatagttatccccactttatagatgatatccacagggcttgctccctcacctcctgcaggtcttcaggcaagtataagtgcctcgcactttcctattccccttgctttatttttctcctggttgctcaactcaatttaacatctgtttcgcttttgaaatcttgtttaaagattctctcccacactagaatgataagtccctaggaataatttaatttgtatttcagttctgtatccccagtgcccaggacacagtcaaccctcagtaagtacataaatgaatacatttttaaaaatgaggaaatcgggtcccatagagattaagtaacttgtccttgatcgtacaagtaataagtggcagaattctgatttaacaacccacattcttaaaccactaagtggttacaccagagttgtaatattgtaggcaagaggcaagtaccctcggactgcggtagtggggaagcggggtgataggtctgcctcgaattggtgatgactggatgtggaagggcgctgaaagggctcaatctagcatgactttggtttctacatttggcttatgggtaaacaggagagcaattcttcaggaaaaagaatacaaaggactccaggtttgggcaaaacgataagaggaggacgtgtcttaatccacgatcctttttaactcttttactatttcccttagattactaaaacatgttgttaatttgaatatatgtgaagccagtaaacccaaactgatcccttcgtcttcagtctgaggccagtgggggataggggtggggatggggacggggatgggggtggggacggagaggcagaccagaatagggtcagctctttttttttttttaagttagtccaaacttaccaagagtagaaataagtccccagcagtgcttaactctgaggtaatttttaaggcagatgctaaaactggagaatacaccgtacccttgtggagtcaggtagtattcgtagttttagattatcctgacggtgttagtcacttgtagaagtgacaatgtgcaacaggccactgacacccaatccctggatggccaggagggcaggagggcacccggccgcggcctcaggctgctgagcaggcgcaggaagctcgcgcctcaaacgactcccaaacccgggcccggcgcgaagcagggaagcgccgctcacattcctgcacgctcgcccggccgcgggccagcggcctccggtccccaggtggcgctgtgggctcgcggaggcggccgcggcaccagggagcgtcgtctccctggtgcgcatgctcgcccccgctgcgggctagctgttgtgtttttttttttcccccgggcggcccggcggctgcgtactggctgtgggatgggaagtgaagccccagcgagcggctgcagcggggccgtgaggagcagccagcgggaggcggcggcgagtcggtgagcagctgggaagagcagaaccggggcggagcacctgcaggcgcgggcggcgg

SEQ ID NO: 40622 - DNA, 2300 bp, Homo sapien
taccattggggttagtgatacaaaagccgcttgtgatcttagaactgttttgtgaagcggaacaggtggataccaatctcagaacatctgacaaggggccaattaatattaacttctagccaccttttactttacaccttttactttatacagtagcattatctacacttatttctagctcaactatacggactctctagttcaactatatggagaaataatttacatagtgcaagtaattccactggccattccactccattaatttatgtgagcaacagtgttaagtaatttaagacgagagactataaatctgcttttccctcagttagtctttaagtctctcttagcactagcactttgctatgttgagtgtgattatagtgtttaaagatacagtatgtatttttcatacaatatagcccctcaacacaagccaatttcttcacctggttttcaaacagaatcagccatctgtttcaacgctggaaaaaaggcaggttgtgctgaacttactgagacaatacactgatctccaacatggtgttcttctaagagactttccagggtaattctgataatatgcatcttttgtctgaggtattgactagttcaagatgacacactgtagagagaccgcctatggatttacttggttgagggacttccagccaagacagactgtaccctagagatctggcatttttcctgcttaattctctatcctcctagattctggtggcagcctaaacctttggtaactacctgaccctgccttatttactctgaacttaatcttttacctgcccactttgcaggtctgctgcttctaaaattcttatttactggaaaaacgccaaacagtagacacttccaaggaaaactcaattaactgtacttactaaatcgtttttagtaatcaattatattttaaaaataatttatgtcttgactgcacaattaaattctatgctcaagagaaactacattatctgggttcatccagtaaagactacaaaagttgctaaatgcctaagacttactatgcagtaaaccaaatctcccattcctgcataattccactaaaacagaatgcagctaaacaagagcaaaagtatcttcttagaaatacaggtgtgttactgtgtctgcaaattaaactcaaacaaggtcacacacaattgtaacaaaaaacttccccaaattacttatgtcagctcctcttatgagcccacaggctgcagagaaccaatttggaagccaggagaatcctgccctctgctgctgagttgaggaaatcgcctcaacataattaatcgcttttgagaagggaagttacactctgggcaaaacaccagtgaaagtcaagtgagcaaagtaaacgctttcttggactcttgacatccgaattttctcaacagtttaaacacgcacaccctggcattcaaacatcaagaacagtaaatcgggtttcaaaacagaagtttttttttttttttttttttttttttccatttctccctaaattagagagctatcacctggggtggtcgtattttagctagcttcgagatccgagtgtctgcgtgcagtcccgacggggctgctaggcgcggggctgcccagctagggacaggacgcggcgctctccactgcccgcgcagccgcgatcagtcaaagcccgggctccggggccggctgcgaacgttggggaggttggagagggacgtttacctggggccggtccccactaggtaggtgttggtgccttggagggtcatgggacccgggttacagcccaacacacgcacgactcgattggacagccgctcgacgcgctgcagtacagcagccattcccgcctcagccgcccgccggcgtgtcgcctatctggatactccagcgcggaagaagccaacaggccggggatagcgagtagcgtccacgtgatgcctcgcaacccgggagggaggggattggccagcggctggtccaggtgtcatgtgacaccgcggacgagccggggcggggatccggcagctaggccggggggtggggggggcggtgcggaactagaggtcacgtgacgccgcgcgggctgcgcgggcagtggtgggaaggctggcgcgaggcgtgaggtggcgtgaggcgaagctggaatctgcctctgtcacgggggctggtgcctcacgggtttgtgtcctagacaggcgagtggatccaagtgggcgagagacattttaatctggaagagtcttgtgatttgggagacaggtttggtaaccgttcgttattcagta

SEQ ID NO: 40623 - DNA, 2300 bp, Homo sapien
atggaactagagattatgataagtgaaataatccatgcatagaaagacaaatatcacatattctcattcatacgtgggagctaaaaagtttatctcagccaggcatggtggctcaagcctgcaatcctagcactttgggagaccaaagcaggaggatcacctgaatcgcttgagttcaagagttcaaggttacagtgagctatgatagtgccactgcactgcagcccgggtgaaagccagaccctgtaagtaaataagtaagttaagtaaggaaattaattaagccaaagaataaaagaaggggagtgcccagattctcaggaatctggtccagaaattactgttccatcctcttctccagggttcactgactttccagcagagttcttaaaaagggaagatgtgcaaagcctcctgcctgaatagccattaattgatggctatcataaatacatattgacagattgaaatgcctgatgtaggagatttggttactttaagtattttttgaagggtatactgtttaacttcccattgcaacaggggataacttatatgattatttcagcgatgattttttgaatatttttccattaaaagtacaactgtgtgaaacaaggcaaagacatttctcacacacaaagcagatgtcattagccactctgatacactatgctgctgattcataaaataggtaagagcagatcgttttcttcatcagaaatatctggaaaaaaaaaagccaccaagcactgtatgtgtcaatttctcacctttttttaaaaaaaaaaagagtgggctgctacagtggatatgttctacatctctttggggcagtgattacatacaattgtcataactcgatggaactgtctacaggatctgtgtattttcttttaagtaatttataactcaactttttttatgggaagctgtagttaacactggatagttaatacttggctgataagaaaccgacttgttacagagaaaatgagtcccttccatcttgggcacaaaacggctccacaagaccagcctagctctctgggcaggcaggtaacactggcaggcagaggcatgctccttgaatctcactgagggggacaagtgttagtgcgaggcaggtaggagcaaggccgcacacgcagactctgtcatctgggcagctgcccaatccccgtttttcatttgtaacaaaaatagtgtccacctcttaataatgttctgaggattaagggcgttaagtcggatgtttgttgaaagcacttaggcatagtaggaagtactaagtaaatatgtcttaccactatttattataaaagatgaacaggctggcccggcgtggtagctcacgcctgtaatcccagcactttgggaggccgaggcgggcggatcacgaggtcaggagatcaagaccttcctggctaacacaatgaaacccggtctctactaaaaatacaaaaaattagccgggcgtggtggcggacgcctatagtcccagctactcgggaggccgaggcaggaggatggcgtgaacccgggaggcggggcttgcagtgagccgagatcgcgccactgcactccagcctgggcgacagaccgagacttcgtctcaaaaaaaaaaaaaaaaaaaatgaacaggctactactactactactacacacacacacacacacacacacacacacacagagccactgcctaaaaatctggcaatccttcctgacatttattactgaataacgaacggttaccaaacctgtctcccaaatcacaagactcttccagattaaaatgtctctcgcccacttggatccactcgcctgtctaggacacaaacccgtgaggcaccagcccccgtgacagaggcagattccagcttcgcctcacgccacctcacgcctcgcgccagccttcccaccactgcccgcgcagcccgcgcggcgtcacgtgacctctagttccgcaccgccccccccaccccccggcctagctgccggatccccgccccggctcgtccgcggtgtcacatgacacctggaccagccgctggccaatcccctccctcccgggttgcgaggcatcacgtggacgctactcgctatccccggcctgttggcttcttccgcgctggagtatccagataggcgacacgccggcgggcggctgaggcgggaatggctgctgtactgcagcgcgtcgagcggctgtccaatcgagtcgtgcgtgtgttgggctgtaacccgggtcccatgaccctccaaggcaccaacacctacctagtggggaccggccc

SEQ ID NO: 40624 - DNA, 2300 bp, Homo sapien
tttttagataagtcattataagactatgtttccttctgcactgtaatcttgtactacacataaaaaactaaaagcatgtgaagtgtagcattttgtaaactgtaactaattttgctcacatctgtgtctaattgttgtctgcattcgcattcttgagagtagatttatttttcctggaccacgatgtggattcagctgaccagcctaagtgaggattagttgttttaaagttattttgattaaagagtcatttttaaatacagtaacacacaacacatggtttaaataatccctgagacacaaaagagtatatctgaagtatacttaatgaaatgtagatcatgcatatggactttcaaaagttgtagagtatgaaaatacagtagagtctagttgaaccagcataaaagaaatgtgttgtcgtgaaaatgcatgttttcactgaaatgtggtagactaattcttgttttgaagttcactttttctttattaacaacagtttgactttgaaatttaaatatgattggttaaagtacaaatataaatctaaccaaactttcaaagtgtatactgaaactaaaattatatttccaacattgtactttccagctaatgttaaaatggaaatgtattttaacatttaacagaaagaatgctttaaatactctttcacataattaagccaggagagttcttaaaactaagttagttctcacctataatttattccaggtgtataaaagtggagaaaaaaaaaaaagaaaaaggaaatttatccttgaggtatattgctggactttctaaaggaaaccacttaaacttgtgtgagaacattaatttttaacaaaaatcgcagaaggttgttatcacggaatgacacatctgtaggcattgaaatttaatttttatcttatactcaagcgtcttttaaaaattgtttttcatcctgcacgtattgtagaaacatacctagaaattttacgtaacattataccaagacagttggactttaatgatgctttattcttgctagaaaggtagtatttcttatttcataaatcataatttaaaaataacaggacttaacagaagacgtttggttggataactgtaatgccattcgagatgctttagttctcatctttgttctgtaaccctaattgatgtcagttcaggttgaatgaaaatgcacatcaaagatttggaattctgagccattttaaacgttttgcagaatgctctcctactgaggcgttagcctgagcttacaagccagcagcctggcctcacctgagctttatcacctgctggcagtttgagctgcttctggaagaagggcagtgactgtcaaagcctgcacattagttaagttgttcagtgaagtcctgaagtacagattcatctagaaacaagagagactgaaatgtaggctgactaggatggtgaattgattattaaactttccattttcttcctcggtttaaaagatggaaaatccaccaaaaaagctaactacattttctggtttaccaggcagaactgataagaacccattgaattttaaattggcgagggtaaatgagcacattgttcagtggagtgactttgggtatgaaaacttgcctttgccttatatagttagtccagcattgtcaggaagttgcccagaagctgttttagtgaatgttaaatgacaaatagtaaatgtaggagaaaaccattatgataaggataagaaactgtcaggagtcaaaggggtgggcgggagctctatttcagctggtgataacagaagatgaaagatcttctgaggatgctggaggattactgcttgaactattgctgttaaacacgatcattttgtcattcgctatttttttccaagcaccttttccaagctgcctgggcaaggctgctttgcatgttgattgggggaggggtaatcccatttgcagctgtcataggccagtgatgaatcactatcacgtcatttggctgccttccccccctgacaaggggaggaggaggatagacctgcaggaggaaacaacagttgagacctcaacttaaagacaatatgcctttcactgctgcagtatcctcctttttctcttttggttaaaagagagcattgtcgttctcagccatgtgctctgtataattaagagctgacactgaagcagagtaacaacatcttctaatttttttacccctgatcacaggtgcaaacatctcaagccagttcagatgttgctgtttcctcaagttgcaggtaaggatattgttgatatttgacattt

SEQ ID NO: 40625 - DNA, 2300 bp, Homo sapien
aatgtaaaatttcaagcattgtttaattctccaacatctcaaattttagattttatagagcttagaaataaatgtggttgcaaaagtatttactgtttgatatcagattgaattaccacaacattacattttatctgacaatgctagaaatctccattacaagctgtattttattttctgcatatatactttagtatattgaataactgatacttctggtctgagaaagtgcagtaggtggtaacataattctatttctgctgcatatatgaacagatccaatagcaatcaactgtgttttgacctggcttcccaaatatggtagatgactagcccatgattccttgctggtactatacaaaatgaaatcctaggtgagtttgcagtttaaactgtcgtttatgtttgacaaagtgttcttttctgaggaattcagattggcatactttcggtggttggggggaagtctgtaataaattttggtcattagcagctttttattttttgtttgcatcggaatggtgctttcatttacatattagcaatataaagttatgattgtgtctatgtgttttattagttgacgatctggaaatgtattataaagtcatgcaaaaagttattgtgatttttaaaatttttttcacatctatcaagcgcctaaaaaatgaggacgctttttttttccttaaataaaagacctaatcagcagaatagtattctatgggtgatgacaaaacagttttaagaaaaatccgatgggcttaaagattttattttagagcacaaaattggttacaacgagtgactagtatcaaaataaacatttgtatttgaatgttggcacaggtctggcaaattgagatacaatcattagtcacataaacgatgccttctttgaatatttgaaatcaacataatggttaagtcttatcaccaaagtcatgtatctgtataaaacatatcttaactgaagctcagctctttaggtgagtgttatagactgtcatgcatagattccgaggtcagtaagaatttttttttaaaagaataagctgtaaagaaagagttctagataacatgaatcttttccaaaaaccatttaaaaatattaacactgaaacattatctggttcatagccaaggaattgttcacagaagatttgccattctagaaatcatttcggattcatccttcaggctttcattattaaactgataaaagcttgcacgtttgctttttcattttctacttaaagggaaatggccattctagttttttatttcccccagacctgtttcagtagtaggtacgttagttaggaaataaattatgaaaagtagtggattccctaagtttcagggcctgaaaaaagtttaggaaaagtgtaaaagataacgtgtaactactccccaaagatcttaattggtaactactgttgcaagaggacgcgtgtgtgttgaccacgtctcagagaagttattctcacacagctgtttattcagatagcgtggggcgcgttcatttacataatttttttttttttaaacagcaaggttgagtcagacagagcagtgctcctttcaattgttgcatttaaaccaataaggttaggacaagagaatagctgtggtttgcgttgcaaaaaccaaaaaaaaaaaaaaaaaaaaaaaaagaaagccccgaggctccatgggcagacctacaaggctgcgcaaacaaatcgagggatgagattctgctgtttctttgtctagggttctcagatgctatctgccgctgctgtttggtggggaaggagcgctgggcgcaaagctgttaccaaacagaacggtgggagctgatggctccgagtttggggcgaggtagaaactctccagtgccacttccgactttaagccttcctgttgccgtccactgtggcgggtttcttcctggggaacacgttttcgctcagtcgctcggcagcccgagcctgcggcagcggccaggcgcctgccccctgcgccgagctttcccctgcagaggcgctccactcccagaagcgccgcggctgcaccagagcgcctgagagcccccgcgcgtacccatccaggagcaaaactatgtcaggaatggaggtttgctaacccagaaaattcgaaggaacacattaaactggtggatgcagcagatgtaagcgctgtaagtacaagctgactgtttgaaaaattgtagtgactgacaacagctgtcctgtgggcaaagcccaagctaacaggagcgcttttattattgttttgatttgttttcaaagaaa

SEQ ID NO: 40626 - DNA, 2300 bp, Homo sapien
caaaagtagtaaccatacacaatttatgggtaaacgtgattgtttttaatccatctaattttgcttcaggaaaatgaaactctttaaaagtagtaaatatgcacatggatattacttttagtcagtgactaagctctttgttacataattatgaagcatgagctataccatatcaattagtggtcacattacattcatcatgattttactaattttcttcataattatatgcatcatttatttaatatttcatttggttatataaataaaaattaaatttcaacataaaatatgtaatatgatacatttaactataatgtgggcaagtaacttgtatataaatgtgacatactttacataatattcccactgttttgattttatatagttcatatattctggatttgtcaatataatctttcatggattagaaaaataatttcttactctcttatgtctaaaataattgttaaacaattggaagcatgaatacaatagctaaatgtaaaatttcaagcattgtttaattctccaacatctcaaattttagattttatagagcttagaaataaatgtggttgcaaaagtatttactgtttgatatcagattgaattaccacaacattacattttatctgacaatgctagaaatctccattacaagctgtattttattttctgcatatatactttagtatattgaataactgatacttctggtctgagaaagtgcagtaggtggtaacataattctatttctgctgcatatatgaacagatccaatagcaatcaactgtgttttgacctggcttcccaaatatggtagatgactagcccatgattccttgctggtactatacaaaatgaaatcctaggtgagtttgcagtttaaactgtcgtttatgtttgacaaagtgttcttttctgaggaattcagattggcatactttcggtggttggggggaagtctgtaataaattttggtcattagcagctttttattttttgtttgcatcggaatggtgctttcatttacatattagcaatataaagttatgattgtgtctatgtgttttattagttgacgatctggaaatgtattataaagtcatgcaaaaagttattgtgatttttaaaatttttttcacatctatcaagcgcctaaaaaatgaggacgctttttttttccttaaataaaagacctaatcagcagaatagtattctatgggtgatgacaaaacagttttaagaaaaatccgatgggcttaaagattttattttagagcacaaaattggttacaacgagtgactagtatcaaaataaacatttgtatttgaatgttggcacaggtctggcaaattgagatacaatcattagtcacataaacgatgccttctttgaatatttgaaatcaacataatggttaagtcttatcaccaaagtcatgtatctgtataaaacatatcttaactgaagctcagctctttaggtgagtgttatagactgtcatgcatagattccgaggtcagtaagaatttttttttaaaagaataagctgtaaagaaagagttctagataacatgaatcttttccaaaaaccatttaaaaatattaacactgaaacattatctggttcatagccaaggaattgttcacagaagatttgccattctagaaatcatttcggattcatccttcaggctttcattattaaactgataaaagcttgcacgtttgctttttcattttctacttaaagggaaatggccattctagttttttatttcccccagacctgtttcagtagtaggtacgttagttaggaaataaattatgaaaagtagtggattccctaagtttcagggcctgaaaaaagtttaggaaaagtgtaaaagataacgtgtaactactccccaaagatcttaattggtaactactgttgcaagaggacgcgtgtgtgttgaccacgtctcagagaagttattctcacacagctgtttattcagatagcgtggggcgcgttcatttacataatttttttttttttaaacagcaaggttgagtcagacagagcagtgctcctttcaattgttgcatttaaaccaataaggttaggacaagagaatagctgtggtttgcgttgcaaaaaccaaaaaaaaaaaaaaaaaaaaaaaaagaaagccccgaggctccatgggcagacctacaaggctgcgcaaacaaatcgagggatgagattctgctgtttctttgtctagggttctcagatgctatctgccgctgctgtttggtggggaag

SEQ ID NO: 40627 - DNA, 2300 bp, Homo sapien
taattcttctattaatacataaaaattttaggtgatatgttacttctgaactatataaattgatttttaaaatatgattttcaaatagatagtatgcctgccatctttgacatgagaaactttcattgcctttggtaagttcttagcaaatacttatatctggtagctttgggttattttttctcccctcctccctcaaataaaatttttgatcacctaatctttaagtctctggatttgcttttttatgttatagtaattctttatgaataggtagaaagcataggtagtagtttccttttcaaaaaggaaaagccatcctcatcaactgggtaatttaactaacatttctatttgggcaaggtattggggttttattgggttaacagtttattgatgcattgatttctacatgaagtctccctcacccaacatacatggtttattttggaaagtttctgtgtctgaaaacataaaaatatccaacagttaaggaccaaaaaaaaatcagtctttgtgtagatttctgattatttcctgtgtgttggtcttatcacagaatctataatctgtggcctttgaaggtgaaggattagatctcattgttctgactcttcatggcatctagcacaagtcaacaaatactcaatgactgacagaaacaatagtaaagtgtgtgaatctagacaattttgaaagagtatgtacaataatacctgcattcatgctatgctttctactttctaaggcccttttgcttacatgatctcattggatgtgaacaattgagtgggggatggggaagggatttcatctgagggagagaagagccaacattctgatgctcactgagaagtgatgagtccttataagagcaaatcatcaaggtatttgcatatctttcactgctcctgattggattccccagtcaagtaagaggaagatcctggagaaggaacatctcagattactggcttgtaatggatgcttcatccaatgctgaaatactttgcaggtcgaatcaaggttctctagctccccttaagttacagagacaagggaattttggggttacagaaacttccccctaccagctcaaagcgtcccttggtgcaaagaaaggcaaaaagtttagaagaaaggacaatgggttaggcctgggcatttagtcaaggctcccctgcccgactttggggtaatccatttaccattcttggcctcagttacgctatctgtaagaagttagaatacatacctttaagatcacttctaaaggtatttgaatcccagatgttttaataagtttcaggctgactgaatattcctttacatccaacctacagcccctcgccccaaatcaccaaatcactccacccatcctccccttcaggacctccccatgcacacctagcttcctcgcggtgacagaactaacccaccaccccctccttctgtttctgaggcctctccgtagaaaacgctgcaggggccaggcgtccgagacaccccgcggggcagtgggcaccaggcccaggctccggctgcagagcggaggggcgtcgggcccaggaaaggggctgtgggtgggggtacgggggagacccgaggggtgctgggaagagggctcccctctccagcgccagccctggtgtcgctgtgcactcggagccgcgcgaagggcgcccctcgacccggaggcacaggagcgtttagagaggaaagaaagaaaaagccaccgctggctcgaatttctggaagccggagccgggttttttgccctaaacaccgaggcagaacccctcttagcgctgccccggcctctctgttacccattttcggtttgcttttggaagaaccggttcctcagccccccgtcgccgcagttgtgacacaagtaagtgcagccgcgctgcccggggcccgccagggtcccccgcgcccgctccccaccgtggctcgcggcggccgcgctcccgccccgccccgctcggccgccccgccggcttctgcctccagttgggttgccgtgacgaggagacgttgttgtgaaactaaatctgaccctgagttcccaggcggcggccgagagcccgcggctgctgatgcccctgggccccaccccggggcaggagggcggcgatcggcgcccgggaagcggctgaggggcgccgcgactctcagcgagcgccgcccgagccccagcccgcccgggcagcctccgaggcctagggcgccgccgccaggtacgcgaaagtcacctggaagggagctgggtgcgcgcaataatggggccttgagcc

SEQ ID NO: 40628 - DNA, 2300 bp, Homo sapien
ggagcttgggaaggagacgggattgaagaagccacccggcagggaggccgaacggcccagagctctccgggtaaaacccgcctgcggtgatctgggaagtgtgtctccacctagccctgcgagcagcggccttcctcccgcccgttagaagggcgctgtgctggagtacgaacccggcccagagaagccactcgcccttctttgtcacttaaaaccctgtcccgacgcggatctcacgtctagacctctgtctttaaagcggatgtagagcgcgttctaaccgttccctaaccattgtgtcaccgcgaaaggccggggctgtgtggaaccgtcccgcacgtgtgcgatgaatctggctccgctgagaacggatccgtgggctgtctggcgcgggctggggcagcagccgagagttagtctacagagctagggcccgagggtggacctgcgtccgcgtctcgtcacgaaaggaagctctttttggagaggcaaaacgtggtcgcccagatccggcgcagctgtagccgtgggcgctgtgcagtgacagccacacccgccacctgtcacgatcacagttccagggaaaggggaagggtcaaggagaatccagcggaaacttcttcccatctcacgagctctcccttctctccgtggcccccaaacactcgcatttaacgaataatcccatcaagtgagttccagtccgatttaagcggtggttccacatagtctgttggctgcggaaacttctttggtgtcagagtccggtcttcccgagaccacgaatggccatgtctgtaaatcaaaaagaacgtgagatattagagagaaacgattgtctcaaaccgaaacagctctcctacgcgaaccccagatattcctgacttggagtagctaagattttatcagcattctgggaatttgcatgtcctctctctgaactaagattttcattttactggaggttgataatccgagacttgccatatccgttcacgcttcttcctggactttgcccgcaggataatttggtgaaactcatctgactttgaggttctgtcgtttagttcccttccccaacacacacacacacacacgcacacacacacacacacacacacacacacacagtcatccactccaagctccaagtaggaactgggcttggacaggatttttcccaagccgggagagctggcagatcagagagggactttccagataaatcccatctggggaaacgttactatcttccacaagcaatttttctaaaaatgcaaatgctcttttatagagctcggccttccctcctttaagaaagggcttgccgattcaaacctgcccgactcagctggattaagttgggcaagggagatttgccgtcagtctgcaacctggtggcagatggagatggaaccaagatttaccctggaagtaggatattagtcaatggctgtcactggggtacaatgttcagaacgatgcaaacagacacggagggttgattcttcttcagggaaatggctggccactcccttgatttgggagaaactaaactggccttctcgttcccagtcccagaacctccacccctttcgaattcttcccaacgggctgaccctgcccggcgcccaggagcgccctgggtatctcctggctgctctcccgaatccttgcgcgccgcgcccctaccaggttcactgggtgcacgtagccgttctcatagcggtcctcctgcaacagctgccgcaggtgagcgatgtaactggaagccagccggagcgtgtccagcttggagagcttagtgtcggggggcacccagggcaggctggtcttgagcctggagaaggctttgctcagcacgcgcatccgggcacgctcacgggcgttggccgcgttccgctgcgactgcttgcactctgcggctgagcccttggccgggaggggcttcttgccaccaccgcccgcgctaccacctgcgccgccgcccccagccacacggggccgcttcctcttgcagccttccgcgctgccggctgtgcccagagcgcagcgctcctcctcgccgtcggggtcctcctcctctgccgacgagttgtcactgggcgaggcgtagctgcgctctacgccgcggaggggcggcctcttggaggcggggaccgggtactcccgctgcagcccccgaagctccatctcctccggatcactcaccgagcccgtggacatcccgttgtcccccttgcccacacgcgtcctctttcctcccccctggccagtctcgctgtctccgccttccgctc

SEQ ID NO: 40629 - DNA, 2300 bp, Homo sapien
aagacagggagggaaaggcgagtgctgtgaaaaataagcccgaactggtggggtcagaccatttcttcaagaaataaagaaactggccatgacctcctcagcgttgaggctgggtatagtttttgtgactgtttagagaaatctagcgctctcctcaccattaatcttttctaaagaaagactttgttctgcacctgtataaacaattcagattttaaaaacctattcgcctgcccctaatgtgtgagactatatatttatactgatagcttcaagtcatcaatagtcgttgcagagagctagcctggctctcctcggtccatctctttgcccctctttgtcgctctcctctccttcacctggcaaggcgatcctagagtcaagttcaagttcaaacgctccaggaaagatttctacactctgtcaaatattccctgcatttccctaccctagagagagctgagggcaaatgatctttttattcacattgtcccagaaccagcccaccccctgcccccaaccaaaagacaacttgtacagggagaaaacctttgcaaatgtgggtgagccggaggggttatgtgaaacattcccccggccccaaaacgcccctgctaagggtagcgtggcctgggagactaaggtggaatgatgcctgagtgatgaagtcagcctctgccagccacctgttgcagcacttcagccatcgagctggacgcatttgttctgctgtacgaactggcgggagccaggctggcccagctatctctgccagctctgtcctggactgactccacataggtccccttgcaccttgctcagcttgggagcctgtggactttcaggaaaagaacaagtgaacacctaagcctgtgtgacgactcagtttcatcattgtaaaatggggtaaccatatgccaaactcatacgggttttattactcagtgagctgctcacaagccgcgagtacagtgacgggcacacagcgggcactcagtctctgaccactggggcccgtatccacagacgtacttatcccctgaccaggaactgcgatgaccttcgagttaggaaataatgagactgcaaaattgttgtgttttcttgtgtggaagagcaggatgttttagtcttgtttggaatggaacatgatcattcagggtgctcctttgtcgtttttactttgaatggacgattgtgctaacttagcattctgcttccaggagctcgctcttcaatacacaatctattaaatacaatagcaaggattccctacattataatgcaaagctttagggccggatcctccaacacacgcattgtggtattaaaacaaaatcacatcacgcatggaactctcaagatagtggaaaataccagctacaacatccagtgatgtgtgacccggaggcacggagctgactagaataccgacgggccagaatttcaaaacgcggattttgaatctttttttctacttagcctaataagtttgggtcttttacttaacgtctatctaggcggctcagcttcaagttctgcaaattggagataatatcattaagttacagatgttatttgaaaaggcaacgaaccattgtaaccatttttgtaaaccatgaaggtatattataagaaaaggaggaggaaaatgagaggtaacttgtgcattgttggatgttgtttgcctgttctgctttttctcttgtccagcaaggcttgggtagacaatcatacatcatgaatggttaacttgaaaactgagttctactggaaagactggcaggcaagcagaggtcggaatcccgtcgtttctaagtgtctggtaatctttgccactgctaagattacctgggggtagaagcaccgtcggtaggaacaagatgtgccccttcactccccgaaagctcacttatcctgcgcagacatgttgaagggccgtcgggcttcagagcccaaatctcggctctgcagagacgtccccttcccccgcctccaccaaccgctcttcggcatgcagaaaagcggtccccaccccttccacgcccctgccccacctcttggccccctttacaaccccctcttctttgcccggggtggtttgttccaaggagtacagatagccttttcaaaaggcgcagcttaccgcggtgcgcgcggattctggacttgggcgccaactcgtagtccacgctccccggggtcagcagaggggcgctcacgctctcgccacccacctcgctttctcaccccgcgcttcccggcctgggtttttagtcttccttggagcgctctctggc

SEQ ID NO: 40630 - DNA, 2300 bp, Homo sapien
taatttaatgattaagaagaaacagtcatgggaattcctgagaggtcttaggaagacactgcctgaaaaatgcctaaaaggaacaagacccccataatattttttaaaaattaaactatcttttaatctatttgcttttataagcagaaagcaggaaaaaaatcatatctataatattaaccaactgtatttttcagtgttaaagacagagaagacaaattaaaaagaatacatgctttggagaatgtcagtggggtagagaagcaagaatgcagactccaggggatattacaaaggaggggtgctgttggcctggagccacccttctcccagaattcccctcaaccatccattgctggagttccctgcactggcccacgctgcccccccccccacccctgtcaccccctgtctctcggggccaacagggccatctgatgcttgctgccatgacatgcccactgccccagcttccaaaatgatcacttcgaacatcctctttattcagtttttgccttagtgaccctttccagctaagtgttgtgagaaaagcaatcgatcaaaataatcaatgataaaaaataaaaagtcttaatattcctatgaggcatttccattttaaaacattaaactggtatatggaaaatatcaggtaggcagcaatggctcaatgagagttattctttttacccaaccctgggattcttttctttattggtttctccaaatgcattacctccttcaactaaatcatagcaagttgtgcaactgattcttatcttgcataccctgaacacagatgctgatgagaaaagagtgcaaaggtgaagttgaacacctgtatcctccagcaagccatactcatggactcatgatgtggttaagttcaatattatccttccaaggaattccactccaggggtggaattgatggcaacctgccatatccattggaagatttagggggacctttcatggttcctcaatatcatcatgtccactctgcctagccctaagctcagcccaccacagcccctaggtcagagagtccacaaaccgttgctgagtgcacctatgccagttcctggatccacgggggtcttgagttaagtgctggagatgagcaggtgaatacgacaatccagggccttcaggaagcaccgtctgtcaaagcaaaagactgtcaaagctacattctgtcctgtgcaaggtataatcagccttagaaaggtttcttgcgttctagccttgtaaacctgaacttacggcaacagttcccttgtctgtaccagacagttcccttgtctgtacgtaaaagtagaaccagcctcttcgattgagacacttcgattgacacttaatgaagagcagtcctataaatataagtctctcaaatgaagctgggggcaaacaaacttgcaccagtcagcagtggcttacgtttaacctcacctttttattaaccacccttaaacaccaaagtgtgagggggatcactgttattatccacaggaaatgagacctgatattcacagggacttaatctagtccctcaaaccagtgctaggatgtagctattgtcccaaacgtttggaatgagaagttttgttaaaaacgttatttccaaatcaaagaggccgccagaagaaggtgcacgtggtgggaaacacaggtctgtaggattttagttagaaaaaactcctgaaaactaaaaatctttccaatatacccagtcattccctcttcctctctctttacaccccccaccctccacccaacacacacacacacacacacacacacacacacacacacacacacacactcacatgcaaggttggggggcagggcaaggggcctcttagtttattataacaaattctctgcaatccaccccgacctgacacgcttgactccgtcagtgcgctgctgcagctgcaggacagcgggacgggcgagtcactttgtccctgaaggggcgagtccaaggcagacgcggcgccgccgccctctttgcgaaggagctccgcgtttctacctcctctccgcgccccgcctgcttcctgcactacaaaagtagcgcgggcctgagaactccttccagaagttctccagggcttccgcagagcgactttttcgctgcctgtgagctgcagcgcgggagagctcgggctcgcgcggaccccagcgcctggcaggctgacagcgctctctcgccccaggtgcccgcgcgcgtggtgagcagctgcaccaggtggcgtccggggtggggtcaatgaagcgcagcctgaggaagatgt

SEQ ID NO: 40631 - DNA, 2300 bp, Homo sapien
agaaaccccaagaagagcaaagggcagggcagtttcttgctggagggtgacaacatcagaagggccaacctccatgctaaatatcccgcccaacatctgacacctcaaaacaacaacaacaaccaaaacaaaacaaaaacccaccacaaaaccaaaaaccctcagtacaaagtaaggccacctccccatagcgaggtgggaagtcaaggtgcagagaattagagaggatagcgcattccagggcatatcagggctaaaactaaggcaaggatgacatggagtatatttaaaacagtgtacttggttccaacaatgatagactggattaagaaaatgtggcacatatacaccatggaatactatgcagccataaaaaatgatgagttcatgtcctttgtagggatatggatgaaactggaaatcatcattctcagcaaactatcgcaaggacagaaaaccaaacaccgcatgttctcactcctaggtgggaattgaacaatgagaacacatggacacaggaaggggaatatcacacaccggggactgttgtggggtggggggaggggggagggatagcattaggagatatacctaatgctaaatgacgagttaatgggtgcagcacaccaacatggcacatgtatacatatgtaacaaacccacatgtaccctaaaacttaaaagtataataataataaaatttaaaaaaacactcaataaacagaagatacaaggaaaaaataaataaataaataaataaataaatataaataaaacagtgtacttggaacttcctcaacagccatccttcttggtctatagaaactcaggagtcccagctttaaatagacttgtcacggcctgcgttcgtttctaaaaggtgttttaagctactttgttttcctgaaagcccctgtaaccgtgccagctgtctctatttcgtgcctgtgaaggagcactggggtcagaaatatgtaaggctcagtgttattattcaagttcattgtctttaccgagccctggaagtgggtacaggtctaagtgttcaccctgcggcctcgccaaggggtaacttggcatagttttccagctggtaagttgataggcaaaggaaagaaagaagggtatgaagagcgcccccgtgagaagcaagggttaaggttgccacggacccggctttaccctcaaacccaggaaagccgggtcacttggggctagggacggcccccgagcgagcggggctgcaggtgccgcgaggaaagtcagatcttatctgcgctcctagttatctccgcagctctttctccaggaaaataatcctggcaccaccactcaggagccatctgtcttcgccccagttccccggggtcgagcagtcagcccagggtcagggtcctgctgtgggcgggcgggaggacagccctgcagttggaagcagaagggccgagggaatcccgcgaagccgccggagcgcgtcgcggcggggcctcccggggctttcccggccccgggtgcgcggcagccgcgggggctgcgtccctctagtccagtgcagccgggtgggagctgcagagcgaagcaggtgggtgtggagccaggcccggggcagcaggagtggctggcgcgcggaagctgagggaggcaccccgccgaggtgtgggcggtgcctgcccgcgccccagccgcgccctgggcaccagagcgctgtccccggccgagcgcacagctccggcgccgcgaggcagagccccggcgtccccggcggtgcgctgccggctcgcgcagcccagccatcccgccccgccgcccaccttgacagccgggagcgctgaggaggaagagggggagggggaggaggaagagaaggcggcggccgctccagcccgcgggtgcgcggagcgcgggaggaggcggagcgggaggctggggtggccgcagccctgtgtgcgcgccgggccggctagctgcggggcgggggagcggcgccccagagcgccccgcctagcctcccgcgcgcagcctctaccctgctccgccacagacacacacccaccaagcacccaccgccctccgccctccgccctccgcccccgcggccgccgccgccgctgcgcctcgggcagccccagcgagcggcaactcccgggctggcgcggctcgctttctggctccttccgcgcggcgagctcagccccgctcgatttttcctcttctgttccagccctctcttgtctgggtggctgtggcggcggcagggggatggggaccccgtgtggggaaggggttgaagatcgatgaag

SEQ ID NO: 40632 - DNA, 2300 bp, Homo sapien
gtcttaatggggggcagagaataaacttttaatttggtcatttcagttctttgataaacatggggagagaaattttcctgataattctgtggtgctgttgtttttggtgttgtttaatgtaaagttccttcttgatgcccgtagacatcatcccacataggaagcccccaattctgtctgctcctgaggggagaacttatgctatacattagtagcaaaactttcattgtcgcctagagggtgggggaggagttgagcttgttaagggccaactagagccaaaagtacatttatagttttgctttcgatgcatctccccttgcgacttttcttttctgtaagcagtcaactgccattccaaatacatttcaataaattttaacctggatatctaaaagagcctttgatgaaatctagattaatttgtattaatttcaaattaaatgtcaattgaatactaaaatcatattaggaaataacagtgtatcatgcttatcttaatgattgattaattatacctgttgtgatttgccttttttattaatctagcaaagtcttactgagttcataataaggcagtaactcacaaactaattcatttgtcctggttccttcacagtcaatgtcatttttttcattttccctttttaataaatattaagatgtgaagggaaaaaagcaattagctctttcttagatacttttactttgaatactgaacctccaaagataaaatggcagagttaaatcatctaagtaaaatatagtatgtgtagagagaaagaatatagcatataattttttaaacatcagaatcataacgtgtaattaagcccaatgttgaactactgaagaccagccaacttggacaatttcttataatcgtatttttaagaaattgttcagataactctcactaaaacaaaccaccttagactattaaaaaaaaatgagaaaacttcataccagaagaagatgttctcctctacaaaagcagtggtgcaggggtttagctttcctgaccaggaagccatggttaaccgttcttcctattccttcccttctgttgtgtgtcatttcactaagggctaggaaatgattgctggatgtgagatgtggatcctgaatgattctgttgcagtggccagaaactcacacttcaaagaactggtctataaaggtggattggatggaagggtgagtgagtgagtggggaagatggagagagtaagaggaaaacatcttgcatcgtacatgtattatcctatactttcagaggatgaaatgttttggctactcacatgtttcacttgcaagaaagtcatcatatatatcagtgatgaatagttcacttaagaattaacatacaattaaatacactgaagacaaaaccatattggacataattaatttcttttaatgattcagaaggcatttcagaatctggcaatcctcattttgaacattaatcatcattgtatgttaaacatggaagtatctgccaagagagtttgcccattaaccaagtgttactgtgcttttaaaaatatttcacagacaagaagacagcagcttcatataaaagttactagtttaggagctgctttgggcaaggccacttcctcaaggataaatactgtgatgcagtgtggcgcttagtcacaagtgagaggcagtgttcaatgtgagtgtgaacatatcatttgacctttctcagcttccgttgcctctcaggcaatgtggaatgctaaggccactcctctcaggacaacaatgagaaatgaagaggagagaaaaacagatcataaatcaatatatgtcacagaacttctaatggaaagtgttctatgtttgtacagataattgattttagaaattctgattctttgatgtcatgcctggtaagctagatctttgccaatttcagtcttgtgagtctggggccactttggtttcctaggaaccagctgcctaaagattgtctctgctgaagtcatatgtggcatctggtagcacccatgagtttagctaattaatctttgtagaatagaaaaggtttctacacagttagatgtgagttccctgctgaatctcctccttcagatgccaagaggaagcctctgttggaagtcactgcagccaagtggattctatctggtacagggtgttttgtttatttcccacagaatatgttttcttttattctgttggccttgggagttgagctgtctgccatagtagctttcttacttgtctgtacagttgtctattcagaggcagcttattatatgtctagctgc

SEQ ID NO: 40633 - DNA, 2300 bp, Homo sapien
cctcacggtgtaatcaaagctgcctggaagttcgaaccgggcgaagcccactgcagctcggcaaagctgctatagccagactgcctctctagattcctcctctctgggccaggcatctctgaaagaaaggcagcagccccagtcggggacttatagataaaatgcccatctccctgggacagagcacctgggggaaggggcagctgtggacacagcttcagcagacttaaatattcctgcctgccagctctaaagagagcagtggatgtcccagcacagtgctcgagctctgctaagggtcagactgtctcctcacatgggtccctgaccctcatgcctcctgactgagagacacctcccagcaggggttgacagacatctcatacaaaagagctccagctggcatctggcgggtacccctctgggacgaagcttctggaggaaggaacaggcagcaatctttgctgttctgcagcctccgctggtgatacccaggcaaatggggtctggagtggacctcctgtaaactacagcagacctgcagcagaggggcatgatggttagaaggaaaactaacagaaaggaatagcatcaacatcaacaaaagggacatccacacaaaaaccccatccaaaggtcaccggcatcaaagacctaaggtagataaatccaagaagatgaggaaaaaccagcacaaaaaggctgaaaatcccaaaaaacagaacacctcttttccttcaaaagatcacaactcctcaccagcaacggaacaaaactggatggagaatgagtttgacgagttgacagatgtaggcttcagaaggtgggtaataacaaactcctctgagctaaaggagcatgttctaactcaatgcaaggatgctaagaaccttaaaaaaggttggagaaattgctaactagaataaccagtttagagaagaacataaatgacctgatggagctgaaaaacacagcacaagaacttcatgaagcatacacaagcatcaatagccgaattgattaagcggaagaaaggatatcagacattgaagatcaacttaatgaaataaagcatgaagacaagattagagaaaaagaatgaaaaggaatgaacaaagcctccaagaaatatgggattatgtgaaaagaccaaacctacatttgattggtatacctgaaagtgacaaggagaatggaaccaagttggaaaacactcttcaggatattattcaggagaacttccccaacctagcaagatagggcaacattcaaattcaggaaatatagagaacactacaaagatactcctcgagaagagaaaccccaagacacataatcatcagattcaccaaggttgaaatgaaggaaaaaatgttaagggcagccagagagaaaggtcaggttacccacaaagggaaacccatcagactaacagcggatctctcagcagaaaccctacaagtcagaagagagtgggggccaatattcaacatccttaaagaaaagaattttcaacccagaatttcatatccagccaaactaagcttcataagcgaaggagaaataaagtcccttacagacaagcaaatgctgagagattttgtcaccaccaggcctgccttaacaagagctcctgaaggaagcactaaacgtggaaaggaaaaaccagtaccagccactgcaaaaacataccaaattgtaaagaccatcaacactatgaagaaaccgcatcaactaatgggcaaaataactagctagcatcataatgacaagatcaaattcacacataacagtattaaccttaaatataaatgggctaaatgccccagttaaaagacacagactggcaaattggataaagagtcaagacccattggtgtgctgtattcaggagacccatctcacgttcaaagacatacataggctcaaaataaagggatggaggaatatttaccaagcaaatggaaagcaaaaaaaagcaggggttgcaatcccagtctctgataaaacagacattaaaccaacaaagatcaagaaagacaaagaagggcattatataatggtaaagggatcaatgcaacaggaagagccaactatcctaaatatatatgtgcccaatacaggagcaaccagattcataaagcaagttcttagagacctacaaagagacttagacttgcacacaataagagtgggagactttaacaccctactgtcaacattagacagatcaatgagacagaaaattaacaaggatattcaggacttgaactcagctctggaccaagcagacctaatag

SEQ ID NO: 40634 - DNA, 2300 bp, Homo sapien
gaatgggattggggagggatactggggggagcttcagctatccttatacactactgttttattccttagaaaaaaacaacctagagccatatggcaaagtgttagcttccaataaagctgggaagtggttgggttatgctattctcagttctcttctatagatctggaataactcctaataaattgaagtaaagggacagcaacaaatgagttgcttttatacaactgaagtgaaatgcagcaacaaatccagcaacaatgggtcactgagtcagctgagagactaagaccatccttccagccaggtcagtggataactgaggacagcaggaacctctgcagagactgtagttacgccgggataagatgcttgttggtggctggcacactattaaataactgcctctaagtttcaccacatagttgtttcatcttcttttcagggctttcctatttttaaaatctgatgttctgagataaagaaacatttttgtgctttgtaaacctagtgaagtggaccctcccccagccatgttctcaaccatctggccttgcagagactgggaacctggcttcgcatcatattgtaaaagcgttgagaacgtaaatgacttctgggaccaggagggtaaataatcaggatccagacatgggcaggtgtagccccgggaatggaggggaagtggaaagggcctggagaaggcagataaagagggaagtggccacaactttagctgattgtgggcacatggaaatgaggctgtgtcatcagattttccaattcagagggagccagaaatttgaattctttttaaaaatgtgaaatctcctgatttttaaatgcttcaagtaatttgaacatatcttaaaataatatgtagcacaaaacaacaacaagagcaacatgaagcaagcctctcctggattttttttttctttttctttttcctattcattctatttctagagctccttgaggatttctgctagcagaccatcatcttgtttctctggcagagaaagcaccagctgctggaatcccacgaccgactgggtctcactactggcccagttgctaggaacttcaagtgcagagccgtaatgaagacacacattctctctctctctctctctctctctctctctctctcaactgtcagcagttggcatggtcaaaaataaagcacagacctgacatgtcagctttgtgaaatccaaacgggaccactgaatgagctggaaagagccatggcactcaccgcgtgatgaactgtgacctcaatgtacactctcccttttcttcacagtctcctcccacttcctcacttacttgcattccaagggtagcccctgaaggcaggtgagtttttccagttcctttataacagcttactgcagatggggaaaccaagggccagagtggtataggcggcccatgagtcacaacactgcactgtttcacccgaaaaaccacccccgtgtggaggtgctggtggtatctcaggaatctgatgagtgctttgtcgggcacaggtgtgccctgagggtctaaataacacctgatcacttcagtacatttttttttttcctgctaaggagagaagattgcagaatcagaagaaaaaaattagaattggtacagaactgctcttatttgcagttataaaaaggaactgtacattttcccagcctaccaaaatgataacgctgggttttatttttggaaaaagtacttttcatcttgtaaaaatttaatggcctttcagtgacagggaagttctgagtggttttcactggctcttttctggccgcagcagaaggtggatgctacggctaggacctccccctgcttgaagggacagccagggagaggaaacacgccctctgcattgtctgggtgctgctgcttcacagattgtgcctgtacaacattttttctcttcttccctctctgagctagaggcagggcagaggtagccagacctttagaaaagattgccaatattaacatctaacttctgatagtacttttctgtctacagatgtttgagtgccttaattcctttatcttttaagatttgcaggaggagccaagatggccgaataggaacagctccggtctacagctcccagcgtgagcgacgcagaagacggtgatttctgcatttccatctgaggtaccgggttcatctcactagggagtgccagacagtgggcgcaggccagtgtgtgtgcgcaccgtgcgcgagccgaagcagggcgaggcattgcctcacctgggaagcgcaaggggtcaggga

SEQ ID NO: 40635 - DNA, 2300 bp, Homo sapien
aggattctctttcctaacccactccagcacaaaggcactacctcccaataccatcccattgggggttagggcttcggcatgtaaatctggggagaaaacaaatatgcagtccataatactaggttcataatgtgctgtaacccttattcccttagcctctatccccattccactgtattatttcaaaacagaccttacttcccatgggacaattagagcctgaagaagagatctcttctgatgcatcatcatttttcctggcagcacaaatattctgctcttcctgctaatactaattgagcacttactatttccctggcttttttttttttttttttcggtagagatgagatctcactatgttgcccaggctggcctcaaactcctgggctccagtaatcctcccaccttggcatcccaaagtgctgggattacaaagtgagccactgtgcctggtgaggtttcgttttaaactctttttttttttttttttgagacggagtttcgctcttgttgcccaggctggagtgcagtggcccgatctcggctcaccgcaatctccgcctcccgggttcaagcaattatcctgcctcagcctcccgagtagctgggatcacaggcatgcaccaccacacccgcctaattttgtatttttagtagagacgaggtttctccatgttgaggctggtctcgaactcctgacctcaggtgatccgcccgcctcagcctcccaaagtgctgggattacaggtgtgagccactgcgcccggctgttttaaactctttacatttaccaagccctttaatcgtgcaggtattattattattcacattatacggacaagaaaactgacacgtaatttacccaaggtcacacagctagtgagtaactggtagggaatattccaacctaagcattcttaatactagaatacagtgccttagttactcaacacttaaactgtaccaccttaaagacaataacaagaagtgtgtgaaaatgtggaaaggctttgatgatgctggatgcgttataaacagaaaggcttttaaaataaactttttattcaattatgacacacatactgaaaagtgcataaacgatgttcagtgaattttcataaagtgaacccacatcaaggaacagaaaacggagccaggcgttgtggctcaggcctgtaaacccagcactttggcaggaggataacttgaagccaggagttggagaccagcctgagcaacagagcgaaatcctgtctcaaaggaaaaaaaaaaaacaaacaaaaaacaaaaacaataaccagaccacccatccccatttagaatttctttttgtgctaagtttcaaaattcaaaataagcattcacttgttttctacaaactgcattctatagtcgatctcaaaccttgattgagatacatttccattatagtatactctttctagagcactgatctcaaaatgtggtgcccagccaagtagcgttggactttcaaattcaaggatcccaagctagaccagcagaacaggaattctgggagtggagcccggcaatttgtgttttagcaagcccccaggctgattctgatgcatcttaaggttggagaagcatggatattgtcagttgtaatagttgttgttcgtgatcacgtagtaactgttagatgaaaactagggtttaaaagtgttacgcttgtctaatagtgacaagttctcattacccatctctttctgaaataggctgcaggcaaatgcgttttcattttaaataaccgtgttgttgttccagtcaaggttgcattttacaaggaataaggaagataaagctgcctcctcctatcctaatctcgctcctcgctcagtatggagtcgtccggtttacctacaaagccctgccctagactggcggcaaattcaacgcccagaggcaggaacaggtgtcggccaatcagaagccggaacaggtgtcggccaatcagaagccaggcttgaaccgctcgcccatgtcccgccggcggaagagactctccgcggccacgccccgagccctcgaatgcgagccaatcgttgctcggcgcctgaaggggcagtacccaagcgagccatttaacatggcggaggatgtttcctcagcggccccgagcccgcggggctgtgcggatggtagggatgccgaccctactgaggagcagatggcagaaacagagagaaacgacgaggagcagttcgaatgccaggaactgctcgagtgccaggtgcaggtgggggcccccgaggaggaggaggaggaggaggagg

SEQ ID NO: 40636 - DNA, 2300 bp, Homo sapien
aagtcttgcccagctctgtaatcagagttgttacttctgtgctttcatagcatacatctctataaaaggacttatcttcgttggtaacttatttgtttacctgattctttcaatagattgagaattatttgaaggttcttacttagctttgaagcatcttaattagcttggtatccttgttgcctcattcattaccaggcatacattagaacttgctgtacactagttacagggaacaaaactaaaaccagaaacagggtaaagatcaagaatcgagcaaataccaaaaccatcgtggaagcagaaccagggcaaataaagcatcaaaccaccagtgtcatgacagttaccagtaaggattcaagtaaagcaagtatagaatcagaagtgtgattgtgaggtcagacaaatcctagaaaaatggaaacctccatgttatgaagactagatgaaataaatattttgctctgataaagcttatacagttgttccttggtgtttgaaggggattagtcctaggacatccatccttcatgaataccaaaatccatggatgctcaagtgtcttacaaaaatggtgtaatagccaggaacagtggctcacacctgtaatcccagcactttgaaaggctgaggcaggaggatcacttgagcccaggagtttgagaccagcctaggcaacatggcagaaccttgtctttacaaaaattaaccagtcttggtggtgcatgcctgtagtgccaactacttaagaggcttaggtgagaggattgtttgagcccggcaggtctgcagtaagctgtgtttgtgccactgcactccggtgaccctcggcgagaccctgtcaaaaaaaaaaagggggtgtaatatttgtatacaacctacacacatcctcccatatactttaaatcatctctagattacttaaaatatctaacacagtgttgaaatagttgagatggacagcttcatggaggtagtagtcttgaacaggggcttttgtaggatggttaagatttttacagatggatagaagaggaaatatcattttaggagagaggaatattactagtgaaagcatggaggtgtaaatagtcatgctgtgtgtatgtggaaaccattttaactataacaaacgggaacttaatcgattcccaaaagttcaattggagactggtggggagaaccagaaattaaaattgaacccatcaaattgtatactttaaacatgtgccatgctttttatgtatcaattataccttaataaagcagtttttaaaacttgaattcatggaaataaagtgccgtagaagagtttttgaaagagtgttataaatgcttgactacaccattaattatgcttatgtttggagaaacttggtttaatacctcttataagcatgtctggacaagaattagccatgttgtaatggactgtatatgtcccgatgttaccaaggtttctttccaaagttatttttttataaattgaaatatgccttgactatgtggaaagtactatccttatgaaaagtttcttttgtttacattcttacaaattttttcttcttttaaagtgttagtgacaaacagtctgcggtaactgaatcctcagagggtacagtatccttattgaggtgaagtaaattgacgtttttcttctttgtctttcaaatctttgattgaagcaattcatgcagacctaataaaaactaccacataaatggtacaattgaaagaatatctcagggtcctagttagcccaacagatagtcacgactctgagacatcttgaaattccaaactgtagagacctgctctgagactgggttgtttcacattgtttctacaaagccattattggaatacacatatagggagttcttgagcttaaaacagatgtttagtaaacacttctctgtcacagaaacaaagatatgatactggggcaggaaggggatggcaattacatttctaatgaatgccccatgccaattttatgaaagttacttgaaaaactttatttgatctaatagaatcgctgtgacagacaatacaacctgtcccgagggcagaaagtctgcatgaatgatttctaacatagagcagttgggatcacaagtggaaccatggggaggaggtggctgacttcatgtggaggaggtgattggacatgaggaactgagaggccaagatggtatatgaattgtctgtgagaacactgaaataattcataatagcagcacttaggtgtagagaaagatctgtgaatgatgaagaagtgcttggaaggatggtaa

SEQ ID NO: 40637 - DNA, 2300 bp, Homo sapien
actgcaggtgtcttacaggattgctttggggaacctatttggctttctctgattggtcccatgttggaagagggagcaaaatgttgggatgatggcagtaactgagtaagtcttgaccattctgaatggatcactggggagattgtggtttggcttccaggagtggttgctgcagagggtctgggtgagagttctattgtcacagaagctcgtccattgtccgtgtgtatgcctagtcccagagttgtttccagtttctggctgctagacttttacatttcacaatgaagtgtgattttagaaataatatgaactcttgcctgccagaacaagggccagtgaattttaaaggaaggaagcacaatctagaactcgacagcaagggtcaaccatgaaaagttaggtatgaatattgttaattcctagagcaagaattttttcaaaaatatagatagatagccaatagaatactaaattactctatttggaatactaataaacccagaaacaaaaagtagtgaaacaaaaacaaaatcacagggacaaacagaagaaataaaatggtacacctaaatccaaccacatcaataattatatcaaatgttaacggtctaagccagaaggtgcgtggcaaacttcttctgtaaagagccagatagtacatattttaggctttgcgggccatacagtctgtatactctgcctcaaattagccataggcaatatataaatgagtgggtatggctgtgttccaataaaactatatttacaacaacaaacaggctggatttagccacaggttatagtttcctgacctttgctgtggaattctagagtgtgtttccttcctttaaaattcattggaccttgttctggcaagcagttaaattacttctgaatctgggaacttcttttaattctcttggctttttttccagttttggaagtttccaagtatggaaccacttataaattaacaggttggttttccaagatcagcctggtgatgagaatttgggctacaaatagacaggatagctgactgccaatgacctcttagtcccattcagtgctgcccagttccttgagccttaagggagggtttgaggtgacttctggttcagtctccccctaagagtatagtctttcagtgtcctcatttaattattcccatctcaatgtgtccttgggctttgacttctggcccccttgctgaggaagagaagacaataatggaagtaagaagtataggaccccctttcctccaaggctaagattcagacctcttcaaagagaggaccttcctacacctggaccacagcccacagcggggaagaaactggccagagggcacaggtggtgctaacctggaacagcagcccaggagggtgtggctgggtggaaaggtggcctgggggcaactggaactcatccacatcactccccccctgaataataatgataggaccaggactggaagggaatggtcttcctgtcctttcactccagagaccctccaaagccctctgttggtaaagcttaatgatcattgtgtcaacagatgtttacagagtccagcccatgtccatctatcacaaagcagggcagagaagggtggatttggagctgagagccattatattgataactggcacataaagtgcttttatttttttcaacttactcccaacacacacacacacacacacacacacacacacacacacacgcacgcacgcacaccccttcatatgtcaaaatgacattaagtttcatttaaatgtatcctatattgaaagagcaaaaaaaaaaagtgacagtttgactcaagaaatgcaatggtttatatgacctacaactctcgaaggaaaagagtaataattttgcaatgttttgatgatatttacaagtcataatttaaagagatacataatttttccctttctacgtaagtcctcaaggaactcacatctgttttagcccagatttgtatagtgttttgctttgcatggattatctcatttaattcttgcagaactttgatgaatggtattattaattagcagaatggtagtagtaacaggcaaagtggtattgttaattgcatgtaatagataaggaatcaagcttcagttattttgacttgcccaaaattgatttggtaagtgacagaactttatttgctgatagtccacaattaaaacttttcattattcaggtagaattcttttcccttttattctatacatgttgatatgcttgttataaagaagcctaggcctgtgatctcgatacccgtg

SEQ ID NO: 40638 - DNA, 2300 bp, Homo sapien
ctttggtttcaattgaataatattcactaacaaatgatttactaaaatacgtatttcttggtccttatcatgtaatgacagattcacaacagcaataaggatggagatttccccaataattaataacaccgagagtagcaatattttttactgtattttcatttaattgtcaaagttgtttttgtggaaaattaaattcttcagaaattaataataaaatatgtgagtctcatcaaggctagcaactttaagtcagtattaacattttcatactgtttctaacatttattaagctagatttttgaagctatgtctgggtaatttccaatgttacttaaaagtttttttttctttgagacagagtctcactctgttgcccaggctggagtgcagtggccccatctcggctcactgcaagctccgcctcccgggttcacgccattcttctgcctcagcctcccaagtagctgggactacaggcgccgtcatcacgcctggctaattttttgttttttttttttagtagagacagggtttcactgtgttagccagggtggtctcgatctcctgacctcgtgatccacccacctcggcctcccaaggtgctgggattatgggcgtgagccactgcgcctggcctgttacttaaaatttttatactagtaaataaactttttgttcacatttataaaagctctatatttgtttgactagaaaataacccaaattttctggaccagtcagagaatgataaaatttcaccaaaaataaaacaaaaaaatccttcagaactgataggtataggtacaacaactactaatagcaataaagcaatggtgcttttatagttccgatatgtgttataacatttaacataattgaggtgtataaaataaatttttcaccttatgcatttaatttttggtggatgaccagtaattgctttcttattgaagttaaatttttgttatttctattcttgagaaaattttatgggctagaggagttaactgttaaataacagttttgaaaagcttgttattaattttagcaaagcccaagggaaatagttcagaactgaaacatgtagtccaagtgatgaatgaaaaaccaaaagtttttattttcaaatttaaaaatcaaagtatataagacctcttggcactcttttttaataagtaccttagtcttagggccctatccccaggcactctaaaaagatttacgaactctaaaatcccttaatagactgattttcaaaagtgctcatggaaaataattcgaacaaaaataaatacagccaccaggaaagaagggaaaagaagcaagggataatggccatttttgaagagaaaagtgaaaaacaagtgaaggaaaaaaagaatagaaaaaggaataaggtaactataatcacagtattctttttggagttttgctttggtttttattcgagaatgttacaattaagcataaaccgcaacagcaataatttaaagtgtttggttatcatctggcataaaaatttcagttagctatcttttctagatgtgcacaaaattgatgttaataaaactggttcctgccctctaagaatattctagtgaaggttcatacaaacaaccacaagttggcttagaaaacaaacacctgggccttctgaggtccaagcaatcagacaaagagcaccgtgagggaggtcacactctaggtcagggtgaaagacagacagacacacgtttaccctctctccttcctcatatcccactgaagagacacgattcacagaagagaataagtccacagcagatgagaagtgaggtgggcagaatcagcctacagttcgaataattttttttacgattgaaagcaaatgataacctatgatagatgaaccagaataaaggggccatatcctttaatacggggtacagaagaagctggaatcagagatgagagccattcttggtggggcagtcccaccaagcaccaaaggatgaataaaaagactctcagccctagagacaaatttgtgaaattgaaaatgaaggataaagaaaagaccatataaccttccagagagagaacaacagattacctgtaaaggaacaggagtccccatgaagacagcactcttctcatcagcatcagtgcatgcttaacatctaacagaagaaagcctccaagctctgagggaaaatgaatgtgaaactaacattcgatagcagccatcactaataaagtgtgaaagtaacatacagacttttaaaagcacaaggatcggaagctttattaaaaggtcc

SEQ ID NO: 40639 - DNA, 2300 bp, Homo sapien
tacaagctttaacttgagattgtttcttttaatgttacttaccagagacaaactcctttttatctgtgctgttaaagtagtaatcatttgtggttttcgtttcctttcttttcttttttttttttaagcgacaaaatctttttgctttcccctattttgcacacaaccaaaactgcacttgtctttgcttggtttaggcttaaattatggagtgggagtggggtggacattaggacattaatagatatttagttcccactcacatcgcctcgtctctgtgggcctctcacaacaatctgaaaagatttagtgttctatgtttgagttgagggcactgagatttgtcagaaatcataggatcagaactagacccagattttgtaattctggaagctaaatctcatgagcacagaccccctaactttttgttttcgatttccaattttggttttgtctataaggaaaagggctggtgggggtggggagcgggctgaaaagaacggtatttgagcaggcatttggcattatacttttaattctcttaaaccagacctcctcttctcctttctgttatcacttcatttcatgttttattcctgaaagcgaacttgtcggcggatcattttcctttacatctttctggaactgttccagattcttatggcattacaaaaaaagtatctgcctaaaggcgttctataaagcagacagccttagagaaggtgtgggtataaattacatgaatgagttaatacaaaactgctaataaaatctgtgacatgggaaaaggcagagggtataatttgctgcagttatttagttccagctacaaaaactaaagatacacacccacacccacacacacatatatataaatatatatgtatatgttatttctttagactacaaaagtaagagagacttacctaaagacggaaaaaaaatctcaacgttgagaatttgtttgtataagctcacaaagaaaaaacttctttttgactttagagtgtgtttttcttggaagatgaaataagattacagtctccactggtcaaactttgtggttagagtttataagataaaattcttataatgtattaaatcttcttcatttcacaatgtgttttgtatggttgattaccgtattgtttcactacttttgtagtcaagtttttcatttctacttttgttaacttttctctctgatgaataaagaaaattcctctgtaaatccttatatgagaaagaaagaaagtctatgaaattaatttgatttcttaggttcgcagatgcaaaaaacgttatattcctggtttcacataaaaaccatattagggtaaatgatttaagaacataaaatgaaaattccagcataaatttgggtgaacaaaaagagtggtgcagaaaacgtaacacatttggagagaaagggagaagaaaatatatatattaaaagttaggcaagcattttattaaagtgaaagttctaaaatatcagtacacagagtttttagggggagaaattggtttatcagaaaacagagccccgttattttatttattcttcccaccattcacaaattgcctcctcgtgaagcgaagtggcattttcctggggcagaagagtcccattataaatgcagcagaaagaaaggatgcttctttggacttatctcctagcttctctgcggcctgcggggactgagagggtgggcgagctggtgtccactttgtatttgaatgagctttcccgggcgaaggcggggtggcccgcgcagagtgctgctgagacacgtttggtgcccatcgagtgctcttggtctcatggctttagagtgaaaatgcccgctcgttaatgtgtccccaggcgttagaagtacagtttagagccaggaaatgtggcctcccccgccgggctcctggctacgccccggcaccccaccccgacccccgccccgccagcacctgcttttccgctcccgcgccccggaggtccccgggctggagctggggcgcgagctggcagcggggagtgggtggcgcccggaccgtcgattgcgggcccgtcccgggaactgcagcgccctccccacctgggcagggcagccccgccacccgcccgggcctcgacgggcgcgccgccagggctggggaggggcggcgcggagggcgggggccgggcgcagggcagggcccggctgtgcctcgccggccgctcgggcagctcccgggccgcggccagccgaggatcagagcgcttgccccgggggtctgtcgcgtcgcaggcgccgccggagccc

SEQ ID NO: 40640 - DNA, 2300 bp, Homo sapien
tcttgattttaaactgagctcaggaatttttgtgttctcaggtttcactgcatgcctggtattgcacaaattcttcaggttcttttgctctaaataggcctttttaagctcaaaatcagttctgtatgctgaatggactctctgactcaaggccaggcacaacagcaggttcacaatagattttgtattcttgctgggcctcctcaacatcactttgcaagtagtagctttggaagaatatacaatggtactctgtattatttttcaaagcacattcatgtctttcatctcatcctagctgtcacagatattaatgacaaagccaggaagagaatccaggtttcctggatcttagactcatgttctatctgctttgtgctcctgaaacacttttacgtcagtctctagatcaatgcccagaatgttgttccatctataggcgaaacatagcctgtggggtagggggggagaaagaaagagagaaatagagagagacagacagagatagagacagggaaggaaagagagagagaaaccgacagagacagagacagaggcagagagaggaagaaagaacaaaaaagtgaagaagatgaaggtaacccccaaacagggaaggataagcaaaggaggaaaagagaaagaaagaagaaagaaaatagacgctgaaccccctaaaggaccactgggagccataaccttccatgtccgtgaataggaataataatctagtttccttgggatggtgacaaaaacaccatcataaccccgagagaagcggtgggtgtcacagtgattaattacagataacagttgtcacttccttttcccttgtctccttgccctgcccttcagtgatggctgagcttctgttgcctcctccccactttcttctccctcactgctggggtctgagagagctgtgtagagaggttacctgcctgcaggtcaccttgtgctgttcacaggctgatctcagggtcctcatggggcaaagtgaggactggacaatgacacggacatgctgcctatcgcttggctccagtcccatgctgttagcatcacagagcacccagagtgatttctggaacagaaactggacaaacaacccttgccgttctttttaggtttcatcttgactactataatatttagatcatgaaaccttttgacagtgaatgagagtcagtgtaacactgctcaaaatggtgaaatattttgagaatctagaatggaaacacaatatcccttatgtaagtatgcttcaacaactgtcagtatgaccgggttaggggatggggagatggcaaagaggaaatgcctgtcaaatgttagaggatgtgctgggttttgtgttgactcttagtatccagaaccatctcactttgttcaaggatctctttcttattcctcatctgtattctctcatcctattctcttacctacataggagtttcttgagtagtcaggatcctggcatagcacctggcacactgcaggtgcttaatgaatgagtagggggatactggagacagagaggcactgcttgtgggaagagctcaggcagagattgctggatctgtcatttggcaggggtgtgggagtcatgcatcagacagatggttaggctccatgattctaccattcctccaaaccctgagagttcacagttcttatgtatttagaaaagttcagaaatgccaatatctgcatctgaaagtgtgatggttaataccgagtgtcaacttgattggattgaaggatacaaagtattgttcctcagtgtgtctgtgaaggtgttgccaaaggagattaaaatttgtgttagtggatggggaaaggcagctccaccctcaatctgggtgggcaccatctaatcagctgccagcatggccagaataaaagcaggtgggatgctatgaacaagccgtaagcctgccataaacaggccttaaagaaactggccataaacaggatttctgcagcaatgtgacatgttcatgatggctatcatgcacactgctgaaagttgttggtttactggagcagggcaaggaaaacctggcccgcctggagtggaaaactgctcaaaccacaaacaatagcaggagtggcctgtgcctcaacaacatgcttttgctgcagataatcagccagagcctgtttctctactcctcgctaagaatgctttgtttcccgtaaggaaagcttttagctaatctataatctatagaaactatgcttatcattggctgtcagtaaatatgtgggtcagactctgtttgtggctttcagctctg

SEQ ID NO: 40641 - DNA, 2300 bp, Homo sapien
cacgggccagcgggctgccgcgggagttgtcaactcgacccaagttgcgagagggtgggagagtggggtgcggggcggcggagcgccgggaaggggagactcgctcggcgcaggcaagcgctgcccaacgccttgcagctgcccccgagggctcgcgttccccggccctgcactctccgcgggtgtcactcgggcactgggctccgcagcgcagcccgcttgcaagtcagagcgctccgggccggctctgagcgggctccacgctccgcgctatataaccccgcgaccgggaagagcccgcgccagcctcggcatcggccctccctccgcccggcctccccgcccccgggcgcaccccgcccccggcccagcccccagcccgccagccgtccgcggagccgagccgggtagcccctctcacacggccgtggccgcaacctcagccctcctcgcacctcccttcgcagctcacgccccctcccgtggggtgtcctggcctccgcctgccgagctcggcagtcagcagagccccggccatcctcctccggccgtccggtccccactggtccctggctagccacttttcgtaagctagagcactccagaccgccccgcctgcgatcaggcgctgcggaagacagccctgtgggctggagcgacgacaaggacctcgcggagcggcgaaaggggtgtagtctgcgactaccgcggcagggagccgggagggcggccaaaagtgacttcgaattgcagctagccgtttggaacgtggcccaagaggctctcattttcctggctggaaccgtcgccgcggtgcttgcctgcggtcctggtcagccgttgccctcccgccgggcgggcgaagactggtgcatgctgggatttgtagttcgtccccatgaggctcgtcctgggaacattatggggaggaacggagcctaatcctgtcagcgcagcctggggattaggacccggagttgccaaggtgtcagcactctttgctcttgaattgattaaaaagtctaatcaaatgcatatattttcttcaaacaagttttacccgaaagtttgttgaaagaggctaaatcagggagttctttgcgtctgcaaggcggctttttagttctggattcttttccggcttattctaagacacctatgagtcgtggggcttctctcgcgaagtctttaagtggacagtacgcatgcgccaacttcctctttttccggctggaaccatggagggtgtagagtgagttgcttctggtcctcttgagaatccttctccatctccagagccagatactttttgtgtcactttttctctctctggccgtagcttgcacctttgcccacctccctgcttgattgtgaacgctgtgtgacaccagtggggacctgaggctagggttgggatgcgggcggtcttaggacggaggttttggagatcccgggaacgagatgtcgggttggaatgtgtgtggaacccgtcggttggctgacggcccagtcctcggtagagggtctttcgggggaggcgcagaacctctgaattgtgttcgtccttggctggtgcttggtacaggcctccctgccgccaggcctttgctttcaacatgtggatcctgattgaaccagagtggtggtggcttgttttttttttatttttattttttaatttttgcgcttaaagtctcggggtcagtgccttgcagtagtctttcagctagtacattttgttattcgggtgttggtgtgttttttttgtttttttttttaattagtcgtcggaggccgggcctcttggttgaaatagggaaaaacgtattgctattgtcatatttgtgattgcgttttaggcaacatggtgttaaaggttattgacatggagctaaaatatgcatcgtacactgtagcatgccagagcaagtaaagttactagtgactaaagtcagtgacagcatttctggtaaacaacactgctcagtacgggagtaatacagcgctgtgagctttttgagctattgataacatttttgtttattaacgttagagagaagaagaaggaggttcctgctgtgccagaaacccttaagaaaaagcgaaggaatttcgcagagctgaagatcaagcgcctgagaaagaagtttgcccaaaagatggtaagtaaactttttgaggcactagcacataaggaggcgccttattgggattgaggatgaggtgaatgttcttggcaagatttacttcctaactgtactgagtaattgcttagctacctaatgttacaatctgaaggt

SEQ ID NO: 40642 - DNA, 2300 bp, Homo sapien
gcatgctacagtgtacgatgcatattttagctccatgtcaataacctttaacaccatgttgcctaaaacgcaatcacaaatatgacaatagcaatacgtttttccctatttcaaccaagaggcccggcctccgacgactaattaaaaaaaaaaacaaaaaaaacacaccaacacccgaataacaaaatgtactagctgaaagactactgcaaggcactgaccccgagactttaagcgcaaaaattaaaaaataaaaataaaaaaaaaacaagccaccaccactctggttcaatcaggatccacatgttgaaagcaaaggcctggcggcagggaggcctgtaccaagcaccagccaaggacgaacacaattcagaggttctgcgcctcccccgaaagaccctctaccgaggactgggccgtcagccaaccgacgggttccacacacattccaacccgacatctcgttcccgggatctccaaaacctccgtcctaagaccgcccgcatcccaaccctagcctcaggtccccactggtgtcacacagcgttcacaatcaagcagggaggtgggcaaaggtgcaagctacggccagagagagaaaaagtgacacaaaaagtatctggctctggagatggagaaggattctcaagaggaccagaagcaactcactctacaccctccatggttccagccggaaaaagaggaagttggcgcatgcgtactgtccacttaaagacttcgcgagagaagccccacgactcataggtgtcttagaataagccggaaaagaatccagaactaaaaagccgccttgcagacgcaaagaactccctgatttagcctctttcaacaaactttcgggtaaaacttgtttgaagaaaatatatgcatttgattagactttttaatcaattcaagagcaaagagtgctgacaccttggcaactccgggtcctaatccccaggctgcgctgacaggattaggctccgttcctccccataatgttcccaggacgagcctcatggggacgaactacaaatcccagcatgcaccagtcttcgcccgcccggcgggagggcaacggctgaccaggaccgcaggcaagcaccgcggcgacggttccagccaggaaaatgagagcctcttgggccacgttccaaacggctagctgcaattcgaagtcacttttggccgccctcccggctccctgccgcggtagtcgcagactacacccctttcgccgctccgcgaggtccttgtcgtcgctccagcccacagggctgtcttccgcagcgcctgatcgcaggcggggcggtctggagtgctctagcttacgaaaagtggctagccagggaccagtggggaccggacggccggaggaggatggccggggctctgctgactgccgagctcggcaggcggaggccaggacaccccacgggagggggcgtgagctgcgaagggaggtgcgaggagggctgaggttgcggccacggccgtgtgagaggggctacccggctcggctccgcggacggctggcgggctgggggctgggccgggggcggggtgcgcccgggggcggggaggccgggcggagggagggccgatgccgaggctggcgcgggctcttcccggtcgcggggttatatagcgcggagcgtggagcccgctcagagccggcccggagcgctctgacttgcaagcgggctgcgctgcggagcccagtgcccgagtgacacccgcggagagtgcagggccggggaacgcgagccctcgggggcagctgcaaggcgttgggcagcgcttgcctgcgccgagcgagtctccccttcccggcgctccgccgccccgcaccccactctcccaccctctcgcaacttgggtcgagttgacaactcccgcggcagcccgctggcccgtgccgcctccgctgcgcacccctcccccggggtgagagggagccggcgcgccggttccggggacgctcgggcggcagcagcttggccatgagggcagttcgagtagtctaactcgcggctgtcaccgccactgcagcggagccggccggccgggcgctgcgggacgggcgggcggctgccggcaggaggcgccgagccgggtgactgccgcggcgggcacagtccggggccacagcgccgagcccgggcgggagtggccccgcgcaggcagggagcggcgccgcgcactccaacccggcgggcacctcgggggcgggcgcggggcgcagccttctcgtcccggcctctgtgacaagcgccccggagccgggagcccgattg

SEQ ID NO: 40643 - DNA, 2300 bp, Homo sapien
aggaagcgaattccactcgtctcccaaaagaccggtggggtgttcctttcctccacagcggggctgaccaggcagcggggtttggggcctgccgtggtagggcgcggggtggaaagaggcttgacccaacaatgctcccgcgcgggtccaggttaccttgcagcgcagcggcgtcggccgcctccaggtcgcggtagatgtggcgcaccatgccagccgtctcctcgttgctttgcgtgttgatgtcccacagcaccagcagcgcccgacgccgggcgaactccagcgcgaagaggcggcccaggccgctgccggcgccggtgatgaggcacacctggcccgccacgctcttctccttgggccgcaccagccagcgcgccgcggccagcacgaacgcccagagcactttgaaagtgaccacgaagaactccaccacgatgttcatcgcgacgcccggggccccgcacgagcccagtgcctgcgtccgcgcccaccccgagcccggcaatcgggctcccggctccggggcgcttgtcacagaggccgggacgagaaggctgcgccccgcgcccgcccccgaggtgcccgccgggttggagtgcgcggcgccgctccctgcctgcgcggggccactcccgcccgggctcggcgctgtggccccggactgtgcccgccgcggcagtcacccggctcggcgcctcctgccggcagccgcccgcccgtcccgcagcgcccggccggccggctccgctgcagtggcggtgacagccgcgagttagactactcgaactgccctcatggccaagctgctgccgcccgagcgtccccggaaccggcgcgccggctccctctcaccccgggggaggggtgcgcagcggaggcggcacgggccagcgggctgccgcgggagttgtcaactcgacccaagttgcgagagggtgggagagtggggtgcggggcggcggagcgccgggaaggggagactcgctcggcgcaggcaagcgctgcccaacgccttgcagctgcccccgagggctcgcgttccccggccctgcactctccgcgggtgtcactcgggcactgggctccgcagcgcagcccgcttgcaagtcagagcgctccgggccggctctgagcgggctccacgctccgcgctatataaccccgcgaccgggaagagcccgcgccagcctcggcatcggccctccctccgcccggcctccccgcccccgggcgcaccccgcccccggcccagcccccagcccgccagccgtccgcggagccgagccgggtagcccctctcacacggccgtggccgcaacctcagccctcctcgcacctcccttcgcagctcacgccccctcccgtggggtgtcctggcctccgcctgccgagctcggcagtcagcagagccccggccatcctcctccggccgtccggtccccactggtccctggctagccacttttcgtaagctagagcactccagaccgccccgcctgcgatcaggcgctgcggaagacagccctgtgggctggagcgacgacaaggacctcgcggagcggcgaaaggggtgtagtctgcgactaccgcggcagggagccgggagggcggccaaaagtgacttcgaattgcagctagccgtttggaacgtggcccaagaggctctcattttcctggctggaaccgtcgccgcggtgcttgcctgcggtcctggtcagccgttgccctcccgccgggcgggcgaagactggtgcatgctgggatttgtagttcgtccccatgaggctcgtcctgggaacattatggggaggaacggagcctaatcctgtcagcgcagcctggggattaggacccggagttgccaaggtgtcagcactctttgctcttgaattgattaaaaagtctaatcaaatgcatatattttcttcaaacaagttttacccgaaagtttgttgaaagaggctaaatcagggagttctttgcgtctgcaaggcggctttttagttctggattcttttccggcttattctaagacacctatgagtcgtggggcttctctcgcgaagtctttaagtggacagtacgcatgcgccaacttcctctttttccggctggaaccatggagggtgtagagtgagttgcttctggtcctcttgagaatccttctccatctccagagccagatactttttgtgtcactttttctctctctggccgtagcttgcacctttgcccacctccctgcttgattgtgaacgctgtgtgacaccagtggggacctgaggctagggttggga

SEQ ID NO: 40644 - DNA, 2300 bp, Homo sapien
acaactcagattcaggttagttaataagtattcagaaatgcagattttctggggtgaccaaaaacatggaagaaatttacaacgaagcctaaatcctccaagagctttctcttaggaagcaaggcgtctttcaatcacgctcagggaatgtaactaaagcacttatcgctggcgaaacaatgtaattatgttcctcaggctaaacttataatgaaaccgtcaatactgccctcgtctaaggggttcagaccacagtaagacagacacttcttcagtctagtcagaacaacttcccaaagacgcttcagtttcccatcgcgccgcttgtaagtcggagcaagacatttctttgggatccaaacctgtggtaacaagttccctccgccttccctaccccggagggcttaggaaacccgccccctccccccgccgtggtccccagagaccgaacctccgcgaggacagggcaccttctccctggtaatacagaagtgatcgcgttcctttatcaggaagcgaattccactcgtctcccaaaagaccggtggggtgttcctttcctccacagcggggctgaccaggcagcggggtttggggcctgccgtggtagggcgcggggtggaaagaggcttgacccaacaatgctcccgcgcgggtccaggttaccttgcagcgcagcggcgtcggccgcctccaggtcgcggtagatgtggcgcaccatgccagccgtctcctcgttgctttgcgtgttgatgtcccacagcaccagcagcgcccgacgccgggcgaactccagcgcgaagaggcggcccaggccgctgccggcgccggtgatgaggcacacctggcccgccacgctcttctccttgggccgcaccagccagcgcgccgcggccagcacgaacgcccagagcactttgaaagtgaccacgaagaactccaccacgatgttcatcgcgacgcccggggccccgcacgagcccagtgcctgcgtccgcgcccaccccgagcccggcaatcgggctcccggctccggggcgcttgtcacagaggccgggacgagaaggctgcgccccgcgcccgcccccgaggtgcccgccgggttggagtgcgcggcgccgctccctgcctgcgcggggccactcccgcccgggctcggcgctgtggccccggactgtgcccgccgcggcagtcacccggctcggcgcctcctgccggcagccgcccgcccgtcccgcagcgcccggccggccggctccgctgcagtggcggtgacagccgcgagttagactactcgaactgccctcatggccaagctgctgccgcccgagcgtccccggaaccggcgcgccggctccctctcaccccgggggaggggtgcgcagcggaggcggcacgggccagcgggctgccgcgggagttgtcaactcgacccaagttgcgagagggtgggagagtggggtgcggggcggcggagcgccgggaaggggagactcgctcggcgcaggcaagcgctgcccaacgccttgcagctgcccccgagggctcgcgttccccggccctgcactctccgcgggtgtcactcgggcactgggctccgcagcgcagcccgcttgcaagtcagagcgctccgggccggctctgagcgggctccacgctccgcgctatataaccccgcgaccgggaagagcccgcgccagcctcggcatcggccctccctccgcccggcctccccgcccccgggcgcaccccgcccccggcccagcccccagcccgccagccgtccgcggagccgagccgggtagcccctctcacacggccgtggccgcaacctcagccctcctcgcacctcccttcgcagctcacgccccctcccgtggggtgtcctggcctccgcctgccgagctcggcagtcagcagagccccggccatcctcctccggccgtccggtccccactggtccctggctagccacttttcgtaagctagagcactccagaccgccccgcctgcgatcaggcgctgcggaagacagccctgtgggctggagcgacgacaaggacctcgcggagcggcgaaaggggtgtagtctgcgactaccgcggcagggagccgggagggcggccaaaagtgacttcgaattgcagctagccgtttggaacgtggcccaagaggctctcattttcctggctggaaccgtcgccgcggtgcttgcctgcggtcctggtcagccgttgccctcccgccgggcgggcgaagactggtgcatgctgggatttgtagttcgtccccatgaggct

SEQ ID NO: 40645 - DNA, 2300 bp, Homo sapien
tgggttcttaaaagtatatgcccttgacatgattgcaaaacaccaatcacacagagcatccactactgcacctggcatctagtgggtacttggtaaatgagagcactagctgttgtgttattattatgggtgcaacttagagttggtcctggctaaataggttttgctcacagaggctaaactatatgccaaacctaggaagcttagatctgcacaccccacttgcagatctaaagcatttcttaagagaattaaaaatgggaccagggccaggcacggtggctcatacctgtaatcccagcactttgggaggccaaggcaggtggatcacttgaggtcaggagttcaagaccagcctggccaataggtgaaaccccatctgtactaaaaatacaaaaattagtcgagcgtggtggtgcacgcctgtagtcccagctactcaggaggctgaggtaggagaatcacttgaactcaggaggcagaggttgcagtgagttgagatcacgctactgcactccagcctgggtgatagagcgagactccatcttaaaaaaaaaagcgggggggggataccaggttgaggaatataggcgaatctgataaacgaggtgtatttgacatgcccaccctgcttgtttctctgcaatttcatgaggctgcaggggtggggaaatggaagttgcctttgacctgacccatggcagccactcatgacacagggagttagcctgtgttccacaggattcactcctcttcttttccccagcaacttgtatccatatgagtcctaagaccctccccatacagctgccaccttccttagtggtgtcctgggaaggatggtatttgatgacttgataatgctcagtgggttatcctccaagagatatttgcttttgagctcaggataaagcctcagttagctcaaaataacaaacctataaggattcctgtcagaatccctaagtgcctggcacctagtaggtgctcaagaaatacttattaagtgataaatggaggggatttcaagcactgttgtgaattcctgaggggcatccttaggcctggggactttcctgggaccattccaatcaccccacagagggtgctttcctgttgcagttattcagaaggcccgccctgagcaagggctccaaaccaggatttccttcagggttgaggccgactctagtggcagctttaggcgcttcctcgcttcacagtgctttagcgccattaaagctctgctttggaggactggggtcccagggggagtgagagaaagctcaccacttaagtcatttatactttggctgcccaggcctgaaaaaatgcccttgggactgatcctgaagtgcggaaggataagttaaatggcttaatagatcctggcagcttcggaaaggactaatggctcagcattaattgggtacatagagtgcagatgaatctctgaaaaggtatttcagatttgcccgttcagctttcactggcttcaaagcatcacatcagttgactcccaaacaatgtggattattaaagaaatatgaatactcgatatttgcatcgaccttcatatttctggtgctcttgtttatcccctgagcaacaaactgaataccactatgtggcagggattgtgcagggggctagagatagatgaagttcctgtccctgtccccacatgcctttattctggaaggcagaggttgggaatttgaaaacaatgagacagctgctgggttggaggtcgatcccaggaagacacagaggaaggaggaggccggggctccgcctgggtggtaggtggcagtggaggcttcctgggtgggtggggactggggcatatgccaggcctccaaggcaggcaaacaaaggctctggccgagggagcagcatgtgactcacgcagggggttggatggggagcacacatgagctggagggaggaggagggggctgggcgaggtaggcaggagtcagataacgaagagccaatgggctgtcaggggagcgtctgcctgcactgtgatgtgactgtgagtcaccgcaggaccggaacacggacaggacatgtgcggctctgggctgtaaaaaagacaccactgagagtacagaaaacacctgtgagagaggctggcatccagggcgggaaacctcttttgagggcgtgaaccaggatgtgaagcagcatttgaattcttgctgctctcttctggagcagtgggatattgggcagttcacttaacctctctgagctccttcctcaaggtgaggagaaaatgaaaagatgtctgaaaa

SEQ ID NO: 40646 - DNA, 2300 bp, Homo sapien
tggaacttgggtagtgtctgccagaaatggacagttgggtttgatcaggtctaaggcagtctctgttttgacccagatattacaaagtccctcctcacgaagatatgcacatgtgattgtggaaacagtggaatgtatctgggattagaatgaaatctgccagctgatggaaggaatataaatacagaaatgggaacatgggggaaggatggttccatgggtccgaagtcctttgaagtgagggctttttggacttgccatgttcttgatttaaaaatgtcacggttccccttggattgcaaatataatatctgaccaacagcaaaaccattgtcatgggtgcctgcctctgtgtcatgtaaaaaaacagtgagatttaacatgtatttcttcaatgggtgttgagtgataaatcatccattcgtccatttattcaatgtatgatttctacatttatctggtgcctatattatggtgggtcaggctatgggcagctcaaagataaatttacagaggactatgcaattaacagcttgtcagctctgtgtacaaaactgttagattctctatcattcttggccatagtggtaagaggtagcctttggaaattaaaaggtacgaaacaaactttaggcaattgcagtgataacccacctgcagcaggatttaagtaccagtcagttggtctgggccacgtttccaaagtcactaggagccctgaaaacctctgtataataaggtaagtttttcattaagctatttttattttatggtacaggaaattggttgaagctgtcaaaaagaatcactattaagcatgttttctggggagaagaattctaggacagcttatcagaggggtcaccccaggaaaggggagagatgtctgtcacagcctgatgggtggtgtctcaccattgatctctggcaagttgtcctggaaaggatggtcagagttccaaagtacaatattatatttccaattaaaatgtaaaaataaacctttttcataaaacacattggcctcggctctggaaagcgactacaaagcccagtgctttgattgagacaagctgaaagcagacactgtaattgataacggagataagtcaatctgtgtcctttagagaataatgagttccatttttcatcaaaaagatctccttgtgccgaagaaacatactttcaataaatctacttaatggtttccctctaatgatatataacattgctctttggaaccgagcgttgcagcgggtccctgccaacaactgcaggccacccatcatctgcattggtaattcaacccaaagaaaacccaggcggttcccaggaagtgctgctgtgcaggagaaaatacccgaaggccttcctggactctgtgagcaggtagagaggatgggatttgaataaataagctatcactaagcttgagctcctatgcaaatttccattccctcgcccccaccaccattgctgtattcatggatatatcgggtctaagggtgacttatctaaggataagctgtgtcagacagctcaagagttaaatccttcagatacgtgcgtcgtgagaactgattagctgggtttgttcccggagctcattgctctcctatagacctgacagccttggtgtagtttgatgtgggctgccggagggagcctgtgtttattgcattgggtaaactgaagatccacttcaatgatcctgcctgaagcagtccctcgccccatttgagggtctaaacctcaggtggcgaaggcctagcagaaggaagggcctgcgcccttcaaagggaatgatttagggccatctgcgccctggtgtcaggcagcaggactgggtttccatccagtttacctttgtgagccccaactttacaaatgtgctgctttttttcgcaaggactcagctttatgtaacataacctatttcctccaagggcacccagccctcccaatactgacggacttccccacatgggaatcattaaaaacaaccctagagttatttccttatgttgctgtttgtttattctccagtcgcgtgtgagtcagccagatcatgatttgtggtggttttgcttgtgaaatcttacataattatattcctattgtcatgttgggtcgagcagttagaccatgtagtgttttctcattgcacaatgtttgcaaatcaataaggagaaagcctgaacaatgcgatgacgttggccaggaacccggcccgagtcacccaggaggcggctctgcagtttctcaggtacagcctatccattctctaatcccactgctgg

SEQ ID NO: 40647 - DNA, 2300 bp, Homo sapien
taaagaaaaagaaaggacgcatgccgacttttgcttggatataggatttgtgattaaaaagcaacaatagaaaagcaagagagaagaaagaaaaaagtattatgaatattacacattaaattccacatatggatgtttatagcagttttattcatagttgccaaaaactggaaacaatcaagatgtccttcaataagtgaacggacaaactgtggtgcatccatgcgatgggacattattcagcaataaaaaggagctacgaagctcatttatgaaaagccatatcgttcacaaaaagaggggccgggtgcagtggctcacacctgtaatcccagcagtttgggaggccaaggtgggtggatcacccgaggtcaggagttcgagaccagcctggccaacatggtgaaaccccgtctctactaaaaatacaaaaattagctgggtgtggtggtgcaggcctgcagtcccagctacttgggaggctgaggcagtagaatcacttgaacccaggaggcagaggttgcagtgagcccagatcgtgccactgcactccagcctgggcgacagagtaagactcagtcaaaaaaaaaaaaaaaaaaagacatagaggagcttcaaatatacattgctaagtgaaaaagccaatctgaaaaggtgacatattgtatgatcccaactgctatatggcaaaactgtagcgatggtaaaaagattggtggttgccagggggctggtgggggtggggggaggtgaataggtggggcacagaggatttgtagggctgtggaactattttatatgatactctaatggtggataaatgccattaggcatttgttgaaacccacagaatgtaccacacagagtgaacccttatgtaaaccatggacttcagttaatgataagctatcaatatttgttcatcagctataacaaatgtaccataccaatgcaagatgttaatgattggggaaaccgtatttaggggagggaagaatatgggaactctgtgtactacctgcccaagttttctgtaaacctcacaagactattaactaaaaaagaatcacacctccaaaatatattctgaataaagaaacttaaaggaaatcatgcacttagtcagctaccctaaaggagctcttggcagataaaagtttgggaaaccgccaagagctagctcgttttcaaaggcagctgagaagacacagatgccccaagtgtgacccagcgggatgccccaggatgaaaacagccctgcctgctcatgcccatctcagactcagcagagcccttccaatctcactcagcagtgtcgggcttgggggaggggaggaagacccaaattcttactcaaagaaataacagtttggaacatgcacaagagtgtcaacaagttatgtagatcttatcagcatggcatttttggtgcctcccagctatacagcaaggctccaccagcctgttcacaccctgcggcttcccacgcaccccgagcctatcaacacctcgggaggctctgcccggcaggcctgcctccccagaacatgaccagcccaaactttctctctttcctcatcctctcaggatcccatcttaccatccatcccctcagtctgcatgaggacctactgtccattcctctgctgacattctgtaccttgactggggctaagtgtctatcaatttgaacaatacctttatgcttactttggaaagaatactcaaggtggaaaatttggatgtcacacctgagagaagagaatgtgtagtttcagtaacgtgagaaattatgcaatgtcaccatggaagtattttaagcttatatgaggtgttgccatgtttgcagataaaacatcacaattttgcaaaactgtggagaagggataaggcaggagacttaaagcccttctagttccggttatgtatatacactgctgcctgatcatgcagactttctagtgtacttttgttaaacaatgcaaaaaaaaattatgtagactaatgaaaatgagtctttctatctcagctttctttcagttacttgttcattacactagagtcagtgaatggctctctctgtttgttttcatttttaggcagccttaagtgccttgaaacaattttctgaacaaggactggatccaatcgatggagcaatgaatatcgaaaaaggttctcttgaaaagtgagtaaatcccctgtcagtattcttacacttttaattgtaactgtacaaaagataagacatagataataatgttttaaaaagtcgacaatagtatctacatcttacacaa

SEQ ID NO: 40648 - DNA, 2300 bp, Homo sapien
tttttaatttaatttaatttaattttttttaaagactgggtctcactgtgttgcccaggctagtctcgaactccttgcctcaagtgatcctcctgtcttggcctcccaaagtgctgagattacagacgtgagccattgtgcctatttttaattttaaaattaataactctcattgtaaagtgtttaagactatttaaatgttaaaggaaagtcccccatactgtctcacccttcaatcaactccaatctcatgtcacagaataactactatgaacagtcaagtgtggtgtgcatcttatttgttatattcttttctgtttgtttgtgtttttgagacacagtcttgctctgtcacccaggctggagtgcagtggcaagatctcggctcactgcaacctccgcgtcccgggttcaagcaattcttctgcctcagcctcccaagtagctgggactacacagaggcatgtgctgccacgtccggctaatttttgtattttcagtagagacagggtttcaccgtattggccaggctggtctcgaactcctgacctcgtgatctgcccgcctcggcctcccaaagtgctgggattacaggcatgagccaccgcaaccagccaattattatattcttatatacacatatatggacttttggttttttcctcaaatggaatcactatgctaactcttctgcaacttttttttcccacataataataatacatcttggacatcttttcaagacaccataaacagctcgatctcattctttttaatagctgcatggcattgcatcatatggctgtgccataattgatttaatcagtcccataataataaatatttagattgtgtccagttcttaccaaaaatgctgcaatggatattcctctacaaacattttgtgcaaatactacatctataagacaaatatatgattttgatagataatgtcaaattgctttcttaaaaatttgtaacaagttgtgggtaaaagcagctttaaagagaacaggagggcagctgcatccccaagggcctggaagggaagggacccgaaggaacctcgctgaccacgaggtggaacccctggaagaaccagggcgcctcccacctgtactggtggggacaccaggcttatggaaagttagcagtcgttttccttttcctcccccctctgggtggctaggggacacttcatctttatcaggaaatgaagtgagattatctaacatgagaggatctatcttaccaccctctggaaagcgacagcagggctagtctttcctctcaagacacaccgggacattcccatgagtgcacacactggctacggcatccatcgatgggatttttagccaacatcttccaacttcacttcctcgtttccaccaccgacccattcccaaaacaattctagtttgactttacactggactaacccgggtgcaaagtgactggaccctcccaaggaggaccctaggcaaaatcctaaaatgggcctgccataaactgatcctctccctcccagctgcaggtacccatgagtgttaaactagagaaggcaaatgttggcataatcatattggcttacaggaattcatgggtcagggaccattttgggaaggaaggatataagattttaacgtttgctaaaaggagatacaagtcttttttttttggagtctcgctctgtcccaggctaaagtgcagtggtgcgatcttggctcactgcaactgctgcctcccaggtgcaagcaattatctgcctcagcctcccgagtagctgggactacaggcgcacgccgccacgcccggctaattttttgtattttagtagagacggggtttcaccctgttgtccaggctgttctagaactcctgagttcaggcaatcagcccgcctcggcctcccaaagtgctaggattacaggcattagccaccacgcccggctaggagacacaagtcttaaaaggactgagcgacactgatgtgttcctgagctcacagttgctcagaaactggggtctcagtgaggtcatgggactcatccacgtcacggggctggaagatgacccacctggccttgaaccctggttatctgtttcccaaatcagagttggtggacagagcaacgacaatccagctggagcgatggttcagggtatgtgttcacccagccctttcgggacgtcgcgtgcctgcactgtgggaacgcaagtggacagccggtccctgccgtgggcgctaggggccagtgctcagcgcgggaatattcccaccgccacgtgcgcgcgga

SEQ ID NO: 40649 - DNA, 2300 bp, Homo sapien
tgttacagattatacactattctgttacttttatttctgaaacttaaaaacaataaattctttttctgtgtttctaggttagaacttttttattttattgcacactgaacagatactgttgcttattgaatattgtgtaaacccttctttggctttccttgcccattgcaatttgatttaagcctactagagccattgtatgtgacagctatattgtattacaaagtaaaaatatatgagtgtattgaaaacaaagttgttttaacttttaattttgtttcatcacccagtctttaatttgaatttataaattacaaaaagctactttgatcaactgaatgtaggtatccaagctcaaattcttttaaacctacaaaataggtaaaattattatacaattaaagttattaataaaactgacttaagagagcagaatgtgaccgaacacttacacattctcagcagttctgttattcttgtttggtctcacctaaagtttttatcgtattttagaatcgaaccttttggatctctgtcagaaatgaatgtttatttctttcaagttttatcaagtattaatacgttttatttatattcttttaaatgttttattcagtagttctgtgaacttcagactttgttgttcagcctaatcgtatgcttctgtaacttctacacattttataagaactcattcaaagttgtagtcctaccatagtgtttcagggttccttgttgtgtacacttttactataatggcaaaatgtttcaaaatcattcagctttttaaagaaacttattatgcaaaagacactcttgaaatgctgtgcatttgagctgaagtgaaagaatttgtttcatgttgtactttgcattattttaagttttcacatctttaatatgcttttctatgctaattatattagaaatctataaatataagtggtttctttgtttaaactagtcattaaaaattaggttgaaaatgaaagtggattattttagcaaatcgtcccttctagatggatttcatttcagtttgctattctgtgcctctcctgtgagcatcatccactgtaacagtgttgtttgtgaaaccttccgagtatagtgtaacaaactaggttttttccctcacataaataatataaagaaacacttagttggtgttttagttaaactataattagtttattgtccaaaatcagggagtgttttatggaggggcatttcattattgatcataatcatgccatttccagcaagatgagattgtccacttaaattaaaatcttccttttcaaatataattcacgctgaatacatttcaactcatatgcctccttttgtggagtttaatatgatgatagcaggtttttatagccacaggcttcttttaagtatttattttttaacaatatgacttagtataggttatattgggatggggctggtggaagtgggggggtggtggctggtctccctgagaatctgagaatcaacctttcacctatttattcttatctctcctatacctcatgttttccaatccatatagttatcatcaaggtggctatttgcagcagctttttttttttttttagaataaggtattcatttttgttaggagatcaatacaagtacaattttgtaaattcctcttaggagaatatggagaaagaaataatgcatgtacatacacacccacatttaggaatatagttgtctcttggtatctgcaggaaggattggttctaggacccccaaagataccaaagttcatggacgctcaagtcccttatataaaatgttgtagtatttacatataacctacacacatcctcccttatactttaaatcatgtctagatgccttataatacctaatataatgtaaatgctatataaataatggttataccatattgcttttttgtggttttttttcaattcttttttaatatttttgatatttggatgcatagcccatggatatggagggcccaactgtgtgttttcccttatttttaatttgtcattgaaacataacttactgtgttgcctctgagaccaaatgttcatgtaggctattaaacaaatgtataaaaccataataaattacttagactacaatgagcaaaacacatttgtgggtttggtcagcagatactgctctgatttgccattaaaatcttaaaaattcttaaaaagctctcttgaatttgacctctactaccttccaaggaccttggaaagacttaagtatgtgttagaactctcttgaaggcttggtcttccttt

SEQ ID NO: 40650 - DNA, 2300 bp, Homo sapien
ctaccccactgaattccttttgtgcctttgttgaaaatcatgtgaccgtgtgtgtgtgtgtgtgtgtgtgtgtgtgtgtgtgtgtgtatgtgtgtgtgtgtgtgtgtgtgtgtgtgtgtgtgtatgtgtatgtgtgtatatatatctgtgtctgggcacttattctgtttcattggtccctttgtctgtctttataccaatactacacacactgtcttgaatgccatagttttataatcttgaaattaggtagtctgagtctttttttttcccccaaaattttggttctttgtcctttgcatttccatatgaattttagtatcagcttacacattaaattttaaaaagccaactgggggccaggtgcggtggctcatgcccgtaatctgagcactttgggaggccgaggtggaaggatcacttgaggtcacgagtttgagaccagcctggccaacatggtgaaaccctgtctctatgaaaaatacagagattaaccaggcatggtggcgtgcgcctgtagtcccagctactcaggaagcttaggcaagagaatcgcttgaacccaggatacagaggttgctgttagctgagatcatgccactgcactccagcctgggcaacagagtgagactctgccaaaaaaaaaaaaaaaaaaaaaggaaaaaagcctactgggattttgaggagaattgacatcttattgttgagtcttctgatcgatgaacatgatgtattgactatttagatcttaatttcagcagtattttgtagttttagcaggctttacataaaatatactatatatatattattctgtagcttgccttttttacttactattctttctgaaaatcattcatcttgatgcatgtagcaataattaattcattttcactgctatataccattccattatatgaacatgctgtaatttatctgttcttttattgatgaatattctagtttttttttcctatttcaaataatgcatctgtggatattcctgtacatatgagctactgtgcatgggttacggttttctagggtttatatgtgcctaggaataggctaattggggtaggatgtaccatctcaggctttactagacattgccaggttgttttccgatttatagtactcccagtgttttataagagtttctgttactccccattctcaccacttggggctgttagacttcttaatttttgctaatttggtggatgtgaaatagtaactcactgaggtttttaatatgtattttctgtgtcctagaggttagttatcatttcatatattgagtttttccttatgtgaagtatttatctcttttgcccatttcccttttatattctctttttcttagtactttttaggggtcttaaaaaatatattttggataccggatacgtctttttaaaattatgtgtgttgtggccgggtgctgcggctcacacctgtaatcccagcactttgggaggccaaggccagtgggatcacctgaggtcaggagttcaagatcaggttggccaacatgatgaaaccccatctctactaaaaatataaaaattagctgggcatggtgtgggcgcgcctgtagttccagctatttgggaggctgaggcacgagaatcgcttgaacccggcaggtggagtttgtggtgagctgaaattgcactaccacactccagcctgggcgacagaatgaaactctgtctcaaaaaaataaataaaataaaataaaatgataatgtgttgcagagatctcctcccagttcatggttggtcttcttctgttctttttgatgtttcttgatgaacagaagttgtgaagcacctctggtatactgaagagtgtgcccaatttaaaaagcatagttgacaccttgccattaatacatctaagccccaagtcccatagaagccttggttacaggtctattttatgattttcctttataaatattcataaatgactcatttatcttttctagtcacagttttggggtgtgggggtggagggaagaagcactgtttctttaaggattcaataacaggtttcacaagcatattttaaaactttttcttaaattaatttttaggccggaccagaatatggccaagggatgaaccctattagccgcctggcgcaaattcaacaggccaaaaaggaaaaggagccggattatgttttgctttcagaaagaggaatgcctcgacgtcgagaatttgtgatgcaggtatttctaaccttttaaaactattgaaaagatttagaaatccccaggatggaataggca

SEQ ID NO: 40651 - DNA, 2300 bp, Homo sapien
aaaatcgagtaacaaaaagcctggcagcaaagcccttgaccgctgtggttacaggagaatgcagcagatacagtctatatagtttgttgtttcttcttgtaatttaaataggccatcttgactgtagaataaaagtaaagtttgttataatgtcaagattcagtgttatcctattttttgtgatttagaatggtgaatcaggaaaggatgtggatgatgacaaagatgcaaataagtctgagatcagcttagtgtttgaaattgctctgaagcgaaatatgcctgtcagttttgaggtatgtactcggtagagatcttcccattttttcccttgctgtggttattttaaacaaacaaatcaaattaactggtgtattagtatcctgcaagagttagtgtgcttctatatgttcaaacccagtattatgaaatgatctaggccctggtgaaaatagaaatcatgatgataacacagattccttctgatttttttcttttctgtattaagccttttgtatacatggtatttcaatttttattataaaagttattttctgggtatagataatttgtggtatcctataagatttggcattttaaataggattaaattaaatttattcaagttaagatttagtgacatacatgttaatatccaatttttttttcaattgtgtggaggccaaaatatgtttcactttaacctcaactaacaaaatcaccaagaagtaagatgtaatgaagcaactcttgacttaacagctagataaatatattgcaaatatattcataaaattgtatgaaatttcaaaaaagaaaacttaaaaaaataattattataatacttcttttattaagaggtcactaattttacaactcatgtctggaaagtagacaagaaccaggaaataagctgaaagagttgtggagattcttccctcacattgtatgacattcacctactagaaagctcccacatcttactcattggcaggatcatctgagttggactgagaaactgtttgctttctcttggacacattcttacaagttgcattatctcagttctcggtccacagcttgttaaaagcagcaaaatgaggaagtcagggagagaatgtacttgagatcctattggtccagcaagaaatgatacggaaaatttggaaaacctgtaaaaagtaattgcttatactaaaaaattattgggattttttttaaaggctacaatgagtaagaacagacagttttattattcttaggtgttcttgggaacatcaatatattatgatgtaggatatctgatgtttataatgatgatctaatgtgaacaattaaaggttaaatatttagtattgcagattaaacaaggtttaggaacattacattcatagttgacaggtccataactcattactctagaaagctaggaatttttttggcatacctacttacctttttaaaatcgtgtcacaagaataaatatccctttctgtaaaacagcttttgacatccctatcaaaaacagcttatttttatccattgactgtttttgagaggcttccacaggcacagtgccttgtggtttatagaactactcgtttctccagcaacttactcgtacataggaggaagttaggtatgtaattatatacaaattatcattctagatgaccaatctaatatggtatctaatctaatggtatctttgatgttcttaaatttgtgttccataagacatggagaaactgtaattagaatgatctgttttaaagtaataaatcattttgactatgaatcaaatgtgtttatttagatttcttttgtttcaattgcattaagcatcaagtgtcataaatagtcccagtataataccttcataatagctttcttaaagaaatactataattttggcataatactaattttggttttgatatgaatattaagtcatactttaagaatacatctcaagtgcctatccattatttaatattttacttgtatttaataggttattaaagaaagtggaccaccacatatgaaaagctttgttactcgagtgtcagtaggagagttctctgcagaaggagaaggaaatagcaaaaaactctccaagaagcgcgctgcgaccaccgtcttacaggagcttaaaaaacttccacctcttcctgtggtggaaaagccaaaactattttttaaaaaacgccctaaaacaatagtaaaggtaagtttatatttgtgaacatcagtcagttttactaaataaatattatagtagctatagataagcatttttc

SEQ ID NO: 40652 - DNA, 2300 bp, Homo sapien
cggtggtcccataagattatacagttctttaagccgggcgcctgcaatcccagcactttgggaggccgaggtggtggggaggggcggggggggggggggccggcggggaatcacttgaggtcaagagttcgagaccagcgtggccaacatggtcaaaccccgtctctactaaaaatacaaaaattagctggacgtggtggcatgtgcctgtaatcccagctaccagggaggctgaggcaggaaaattgcttgaactcgggaggtggaggttgcagtgagctgagattgtgctactgcatttcagcctgggtgacagagcgagacttcgtctcaaaaaaaaaaaagattatatagttcttttactgtaggttttctgtttaggtacaaatacccttgtgttgcaaaattgcctacagtattagtacagtaacacactgtacaggtttgcagcctaggcgcaatagctatataccatatagccaaagcaagtagttggctagactacctaggtttgcgtaagaacacgctatgatgtgcgcaaaacaacaaaaatcgcttaatgacacgttcctcagaacatatccttgtggctaggtaaggcatgactgtattagaatgctgactgggtgcgtaagccgctagaaggagcacagcaaatttagggaggatgcaacatgttaaatccgagggaactggcagaggtgaaaaggggggaaaggagcataggaaagagttctgggaggaaaaatatagctgtagctaacattgtaccaggagaggtactacatacccggtcctatttaaagggcttcatatgtattgtcacatttaaatacgaactatctatcacatgtagtctcctcttgatgcacaggataagtaacatgcccgtggtctcctcaccagttagcaagcggatatccagccttggttatctgactctggcgcccttgcggttaaccaggacacacactaccttcccaggtgcagacatgagattggttttagatgatgactgaaatcaccggcctgggagacatttctcagtcagagaagtgacactgggaagaaaccctagaaataacgttgcaaacgagtaagtttgtgaaaacacactaatagttctatttcgaaatttctttgtcagattatttttggtgccggttactaaacgaagtgttcagtttcattgagcttaactgggttgaagttatctagacaaaagtaatccacatcaaaaccaggacgaattaagacgtaatttctgttttctggcactcttgcctcataaatctaggattcagggcattgttttcaatggttctcatttttggctccaaggattctttttcatgtgactaatattttcggtagaagaggaggtctggccacgccgcgggtcttggcgagcaggtgatcacggatccctggtgtttgctgggcgagacggtgaagcaacctcctccccgccccctcccccgtctagaaaggtgcaagatccgctaaaccgtgcgttgcacagcggcggccggagcagacgcgggatggtcgcgcgtcccctgcacagcacagaggggcagccggagagcctgggaaaggtacgagcggggaatcagagcacagggtgcggaccagaaagagcagacggtcagtcgggcggggaaggaagttgccgagttgcaggtgtggaaggggctgccccaggcccacccttggcagacgagggggcggggagtcgcgccggggacgaggagactgcggaccgggcgcgctccttgcgcagtcgctcgcccgcgtgcccaagccccccgggaatggccctcgcccaggggcccagctcgccgccgctagccccgcagagcctgcagctgctggggcccggcagccgccagggggcgggagctgcgtcgcgaacaatggccgcgcttggtcgcgggccggcgggaggcggagtggaggtagagccggtgccgggcgcgcgcgccggccgggcgtgctggggcgcgggagcggctgcgcaggcgggggcgcgcggcgcgagcgcgggagggcgcggcgggagcgccggggaggcgggcggaggcgggcggaggcggggggcggggagcccgaggggtggaagccggcggcggccgagcggggtcagttctctgtagtgtttgccaatgttggagccgtctgcaaagtgtccccggcaagaaggtaaataccctcatcgggggcgtccgggagaccccgacttccgcgccgccggcgaagaaggcagagggcgctggggagccctgcagttccgcagcacg

SEQ ID NO: 40653 - DNA, 2300 bp, Homo sapien
cataactgctttacagcatcagtgttgaaatattttttccagtgtggaagaaatcgattcgttttgtgaaccgaaacttcaaagctatttttttaatgtaagattagccattatgcaaaacttactggtcaagcagttaataaaatacacgtatcccattgaagagaatacacatatcccattcagtttttgtacataacaaggcaattagaaaccctgaaagtttatttgcttctttttgttatgatttttctaatttttgttttatttttgagacagaatctcactctgtaacttaggctggagtgcagtggtacaactatagttcactgcagccttggcctcctgggctcaaaagatcctcctaccttatcctctgaagtacctgggagtacaggtgcatgcccctacacctggctaatatatatatatatatttatttattttttttgtttgtttgtttttgtagagacagggtctcactatgttacccaagctggtctcaaactgctgggctcaagcattttccccgtctctccctcccaaagcgctgagattgtattcatgagccaccacacgtagcctactttctttccttcataaatctgccagtctttgggaactcgtgttaaaaattctagaagcttttctagctgtagtttgagcatcaggttgaactttctcttcttttgcagtttgcttgtattttaaaagcaaatcagggctggcacagtggcgcacacctgtaatcctttgagaaagcagggtggaaggagcacttgaggccaggagtttaagaccagcctgtgcaacatagtgagaccctgtctctacaaaaaaaaaatttttttttttaattagccaagcatggtgttgaacacctgtagtcctagctactcaggagactcaggcagaaggacggctggagcccagaagttccaggctgcagtgagctaggattgtgccactgcatgcctgctggagtgacagagtgaggccctgtctcttaaaaaataaacaacaacaaacctagtcaaactttaagcagctactgtagctgttgtacttcgtgagattgaaaatccagtcctggagttcctggaacatcagaggatgtggttcttccaggatctttttgttgagtgaaaagatcttttgttgagtgaaaatatattctttttgacttgtggcgaggccttactggaaagaaaggtcatgtagacctcctttgccttttcttgcatctgcttatcttgcattaaaaaaagaaatctttacatgctagccaaaacaaaatattttcttcattgaatatctttttaaaaaatttccttaatcttttcatgccttctaggtcttccagcagattctccaggaaagccacccatttggctgtgctcttgaggctctggtggctgctgccagaactactattactgccatagatgtatttactggtttataggaaagaatattataatgcatacagatgaagaagtacatgagggaagggatgtggagtttccatgttccgttccagatgtgccaccctccaggaaactccatacattcagctgcctggaagctctagtgttgaaatagtttgacaatagattgtgaattataggacaggctattcaaattttgagcaatatgtatatagaatatataaggggctagtaaagagaaaggtatgaacatttggaggaaatttaatgatttcagattgtagaaggatattatcaaggataactggaaagatgttatgttgtttttttaaaagtgcaggctgagtgtggtagctcacacttgtaatctcagcactttgggaagctgaggttgggagaattgcttgaggccaggagttcactaccagcctgagcaacaaagtgagaaccccatctctaccaaaaaaaaaattagctgggcattgtggtgtgtgcctgtagtctcaagctacttgggaggctgaggtgggaggattccttgagcccaggagtttgaggatgtggtgagctgtgatcacaccactgtactccaacctgggtgacccagacctagtctcaaaaaggacaaattattattgatgttcttttctagaaacgactacagaaagaactgttggctttgcaaaatgacccacctcctggaatgaccttaaatgagaagagtgttcaaaattcaattacacagtaagtatttaattttaaaagggctctttgttttattaccaataatgtatgaatgttcacccgctttttaaaactacaaaattattttcacatttcattctttcacca

SEQ ID NO: 40654 - DNA, 2300 bp, Homo sapien
aggcgggtggatcacgaggtcaggacttcgagaccagcctggccaacatggtgaaacccccatctctacaaaatatacaaaaaaattacaaaaaattagcagagcgtggcggtgtgcgcctgtaatcccacctactcgaatcacttgaacctgggaggcagaagttgcagtgagccaagatcgcgccattgcactccagcctgggtgagactgagactccgtctcaaagaaaaagaaaaaaaaaagaagacaggttattatgtgctatttagtattacctagaaaggatatgactggcattgacttttccctcctgagaagatacttctaacatatatgaaacccaagggaccagatattggatccactgtgatgagtgtcagaattcttgtaacctcttttttccttattagtatctgtcatgccaggttgttggctctgatgatgtcataatgctttgtttgtagggtcatccgatgctactgtttccacaggaacaatcagcttttaggcaaagtgaaccttggacggtaaaagctgatcttctgaggtcataggaataaatatatctcaaagaaaatacactggaaacttcttctttaagttttcctctttcattggaatatgtgggtttcctcactgttgtaatgttgatgacacaacaaggctaacaccggatatgcttctggctgattccggtttaccaagagcatccaaacatccctcaaggacacagtcattttgcacaacaaagggaaactccgctcatttctggcattaaggtggacatctgagaaaggggagggtataccaccataacttctctagtgatgaatagtgtttaatattataccatagactaactggcgtattttaaagatctttttcctttttgaacacatttcagattagagaagttccagagaacgtaatctattttaagagtgtgaaagagtgatattccacattgcttttatatcttaaagaaatttctaaaaagaaagccgagtcaataaaatgacagattttaagccttcattctggtaacataaaagccttctactcattgtgtctgccaccttaatttttaaagatagagcatgaggtgtaagcttttggcttccattttcctcttataaaccaatgacatcttcagttccagaatagctttttaaaaacgtgacttctgataaatgttggcagaactggtgcattcctaaaataaattatgtatgctcagctttccctacccaagttcatccctaaatgaccacaaaactgcccaccacgaactatgcttaagagaagtctggacataatggtataagtgtatataacacgacattggtatatttaaaaaaaaattcatgcctagggtcaattctgataatcaaatttagactgctgcaacaaccgtaactattgttgatatatgcgcagtttaaaagtgaagggcgggggtaaggggcagaaactgcacacaacaaacttccaaattttgtctcccttttcaggcaagtttcagctccacaaatctaaataccctcgcctttaaaatatcagtgtcgttctgctcttaaatcctcatcccgttgtacaaggaaacctatgtctctcttccccaaattaagaatacgagaagccttccaggtctgcaaataccagaaagcagctgcgcatgaagttttatggggccccaaggctctgagagtgggcttggaggtatggaaaacacatcccaagggaaaaatctgtgaaccgcacaactgtggttggaaacgaaataggaaaaaaactgcgcggaaccggacgtcatcagcatttcgcggtacacacgaagaaaacaaccgtagtcgggtcaaaactggagccgtgtctcctcagtaacgagagtaaatgggggcccgacgcgtgagcggccagccggactgagacagaaagtactcagagcgccatttaccgcgccctcgccccgccccgtagcccctcctcccgtccgccctgcgcgccagccaatcccctcgctccatccccttcccatcgcagaccccgcccccgcgcccgggatgttgagcccccgcggcgtgacgcgagcacggcagctcctccccctgcgtctctggcctcgccggtcttggggggatggttccatcatggcgtcaatgcaggtgagaggagtttgctgcatctgggcgggccagggagccgccgagagagtgccagcgttcgggcgggggtggcgtccgcgattcggggacacccgggcgggttcgggatcggtccgggtggcctgttttccc

SEQ ID NO: 40655 - DNA, 2300 bp, Homo sapien
acctgggactacaggccacgtcaccatgcccagctaatttttgtatttttagtggatacagggtttccttttgttgcccaggctggtcttgagctcctggaatcaagggatcctcccgcctgggcctcccaaagtgtcacagaacctgagctaccacacctggcctatttacattttaaaaactcttctgtttagggtaattcactcacaatcaatattcactctattattttgctgatatatttaaaattttcacataaaaatgtttttcttaactatattaagagaactcaaattttttatcttctgtaaagctgttccccctacaaatactgtaagtaaatgaaaataaaaacttttgtttgatctatttctcaaaatttctaaatagataaaatcagattatagtctgaaaactctgtaccatagatttacatagaattgttatttatgttagatggattttccagttccagtaagttagagacatttgttaaatataaactaatgggattttagaatgattttaaggatgtttttaggccgcgcgcagtggctcacggctgtaatcccagcactttgggaggccaaggtgggcggatcacttgtggtcaggagtttgagaccagcctggccaacatggtgaaaccccgtcttcactaaaaacacagaaaaaagtcgcccggcgtggtggagcacacccgtaatcccagctactcagggggctgaggcacgagaattgcttgggcctgggaggtggaggctgcagtgagccgagattgcgccactgcacgccagcctgggagacagagcgagacaccctctcaataaaaaagaaggaaagaaaagagaagagaaaagaaaaggggcctacagcctcctcatctgcacctccatgcctgtcctccccaccaaactctacttcgagctaccattacagccaaaaaatctttgttctgatttctgtaaaggctttaaaaaatttatccaagacaatctccttgattattgcaactaattataaaaaaccaatgtcttttatctaccaaattaactaaattaaacaaaaaaaaagcctttctggcaagtcctcagttcaacaaactctagatagcctgttatctattttttgagcacacaaagtgcctcgttgagcaccttgtaatgttgtcttggccctacatacattctcttcatgccacactcctggaaaacagtagaaggtgaactttatttagctgtttcagccttcctggaaaggtgcctgtatatcttaccataggaaacgcgggggggtgggaagcggggcgtggaatgagaaagaagttcccaaaaactgagtaacggtttggcaggcgcctggattttctgtgcgtgagctccggatccaggacagctgagctaacccagaggcaaaggcaggaccctcgcgggtggagtgggggacgtggttagttttcagttaacattgaattctaccgggaagagaggaaatgaggccagccgattgcgctagtcgttgctgtgctggctcttcagcacgcacagcaacttttcaccagggacagatgctgcttcataaagagtacgatctcgttagcaaagaaaccgccctcccacgtttcaatctttcctcagcagtctcccacctccaggcgtaaccctaaatgagaggtacggacagtctctgtaaccaccaaaatcttaacacgcagtgcgagaaactacaagtcccaggatgcagggctgcctcggtcccaacgccgacggtatccaccagagaaactacaaatcccagaatgcagtgctctctcggactcccgagagcctctctaaggatgcgtctttacagcaattggatcagggtctgcgctgcatgctgggaatccagaagagctagactcggattggtcgaaatttgccggttgcgttcataggctggcctactataggggaaaagagtagggcgctacgccctacctccagacggaagtgagcgacacactctgcgtcctcgcctcaccaggtacggatctcccgcgcgtcgccgaaagcggctctgacccagcggaagtaattctttcgactgccccggaacccaccggagcaggcagctgggggtgggggggcggccctgggataggggctgtggcagtacgcggggacccggctgcggtggctgcgggactgacgagtgagtctcgggctggggcggaaacggagctccgggtaagggtggagggcgagggaggccgagacgggacgagctcgcaatcccacttcccaccccttcccttcta

SEQ ID NO: 40656 - DNA, 2300 bp, Homo sapien
gtttttgagacagggtcttgctctgtcgcccaggctggagtgcagtggcaccatcatagctcactgcagccttgacctcccaggctcaagtgttcctctcacttcagcctcccaagtacctgggactacaggccacgtcaccatgcccagctaatttttgtatttttagtggatacagggtttccttttgttgcccaggctggtcttgagctcctggaatcaagggatcctcccgcctgggcctcccaaagtgtcacagaacctgagctaccacacctggcctatttacattttaaaaactcttctgtttagggtaattcactcacaatcaatattcactctattattttgctgatatatttaaaattttcacataaaaatgtttttcttaactatattaagagaactcaaattttttatcttctgtaaagctgttccccctacaaatactgtaagtaaatgaaaataaaaacttttgtttgatctatttctcaaaatttctaaatagataaaatcagattatagtctgaaaactctgtaccatagatttacatagaattgttatttatgttagatggattttccagttccagtaagttagagacatttgttaaatataaactaatgggattttagaatgattttaaggatgtttttaggccgcgcgcagtggctcacggctgtaatcccagcactttgggaggccaaggtgggcggatcacttgtggtcaggagtttgagaccagcctggccaacatggtgaaaccccgtcttcactaaaaacacagaaaaaagtcgcccggcgtggtggagcacacccgtaatcccagctactcagggggctgaggcacgagaattgcttgggcctgggaggtggaggctgcagtgagccgagattgcgccactgcacgccagcctgggagacagagcgagacaccctctcaataaaaaagaaggaaagaaaagagaagagaaaagaaaaggggcctacagcctcctcatctgcacctccatgcctgtcctccccaccaaactctacttcgagctaccattacagccaaaaaatctttgttctgatttctgtaaaggctttaaaaaatttatccaagacaatctccttgattattgcaactaattataaaaaaccaatgtcttttatctaccaaattaactaaattaaacaaaaaaaaagcctttctggcaagtcctcagttcaacaaactctagatagcctgttatctattttttgagcacacaaagtgcctcgttgagcaccttgtaatgttgtcttggccctacatacattctcttcatgccacactcctggaaaacagtagaaggtgaactttatttagctgtttcagccttcctggaaaggtgcctgtatatcttaccataggaaacgcgggggggtgggaagcggggcgtggaatgagaaagaagttcccaaaaactgagtaacggtttggcaggcgcctggattttctgtgcgtgagctccggatccaggacagctgagctaacccagaggcaaaggcaggaccctcgcgggtggagtgggggacgtggttagttttcagttaacattgaattctaccgggaagagaggaaatgaggccagccgattgcgctagtcgttgctgtgctggctcttcagcacgcacagcaacttttcaccagggacagatgctgcttcataaagagtacgatctcgttagcaaagaaaccgccctcccacgtttcaatctttcctcagcagtctcccacctccaggcgtaaccctaaatgagaggtacggacagtctctgtaaccaccaaaatcttaacacgcagtgcgagaaactacaagtcccaggatgcagggctgcctcggtcccaacgccgacggtatccaccagagaaactacaaatcccagaatgcagtgctctctcggactcccgagagcctctctaaggatgcgtctttacagcaattggatcagggtctgcgctgcatgctgggaatccagaagagctagactcggattggtcgaaatttgccggttgcgttcataggctggcctactataggggaaaagagtagggcgctacgccctacctccagacggaagtgagcgacacactctgcgtcctcgcctcaccaggtacggatctcccgcgcgtcgccgaaagcggctctgacccagcggaagtaattctttcgactgccccggaacccaccggagcaggcagctgggggtgggggggcggccctgggataggggctgtggcagtacgcggggacccggctgcggtggctgc

SEQ ID NO: 40657 - DNA, 2300 bp, Homo sapien
caggtgtggtagctcaggttctgtgacactttgggaggcccaggcgggaggatcccttgattccaggagctcaagaccagcctgggcaacaaaaggaaaccctgtatccactaaaaatacaaaaattagctgggcatggtgacgtggcctgtagtcccaggtacttgggaggctgaagtgagaggaacacttgagcctgggaggtcaaggctgcagtgagctatgatggtgccactgcactccagcctgggcgacagagcaagaccctgtctcaaaaacaaaataaaaggtgggcacagtggctcacccttgtaattccagcactttgggaggctgaggtgggcggatagcttgagcctcaggagtttgagaccaacctgggctatatggtgaaactccatctctactattaaaacaaatattaaaataaaaataaacaaaatgtaagtagaagctaactttttataaaataaagttatccatatagaggtattatcattatctccttctgaatactccccccaatagacagtatttggagttgccaacatgatcatattctattgatttatttttatttttatttttgagacagggtctagctgtgtcactcagtgcagtggtgcaatcagggctcactgcagcctcaacctcttgggctcaagtgatccttccacctcagcctcccaagtagctgggactacaggcaggtgccaccatgcccagctaatttaaaaattttttgtagagacagggtctcactttgttgcccaggctggtctcaaactcctggaatcaagtgatcctctcacctgggcctccacgtagtattggaattgcaggcgtgagctcccgcccctggccacacattattttagactatgaatttgttcctctccggtgcaaataacatgtcaaatcaaaaacatgtatagttctgcagtggtaaacaaaagtgtgtttctattactaagatgctcatccttcaagactgagctaaatgtgaagccagtctgaagacattctgaggcaaaattaatcatgttcttctttgtacttctgtggcatttgtttgttcttttttttgagacacggtgtcactttgtggtccaggctggagtgcagtagtgtggtcttggctcactgaagcctcgactttgggctcaagcaatcctaccatgtcagcctcctgggtagctgggaccacaggcacacacttaccatgtgtggcttatttttgttttaggttttttttttttttttttttttgtagagacggggtctccctgtattgctcaggctggtctcaaactcctggcctcaagagatcttcctgcctaaacctcccaaagcgctgggattacaggtgtaagccaccacggccagccacattttgtatattgcggtgtctcaattgtattacattatattctagccaattttcaggtattttcctccactgtttaagcactgtggattcccagtttaatctagtattttgtatcctctgctcctagctcagtcctggcaatagattcagtacctctttaacaagtaatgaatcaatgtgtatatggatgtgaatgatttccgaagacaaatctggtaacacctatcaatattacatgaacaattccatttattttcctccaacccgatgattcaattaagttatcactcatttttgttcaaatcgtatattctttcttctgtgccaacaggctagaatcattttccgcaaaggaaacagtttttagtgatgtcgtccacgagaaaaaaaaatatttaaccctggcttctgggcattgtcattctcgtacagccctctgcccctccacactgttataaagaaggtaaaattctaggaaggaggagccgctgagccaaggacagagcggcgggctcccagctcagctggcggataacgcgcgcggccgggaaggcggcaggcgggcggcaggcgggcggcaggcgggcggcaggcgggcggcaggcgggcggcaggcgggcggcaggcgggcggcagattctgcgcacgcgcaggcagcccagctgccagtcaggcgtcccgggctgggcatgcgccacttgtgcggcagtcgggtgggaagccgtgtctcgcagtcgtggactcgtgcagctggggcgtccgcagccgctcgtcacccgcgtgatgctgtttctggcgttgggcagcccgtgggcggtcgaactgcctctctgcggaaggaggactgcattgtgtgcggccgccgcgctccgaggtccccgggcctctgtctcccgggcgtcctccagca

SEQ ID NO: 40658 - DNA, 2300 bp, Homo sapien
cagcctccgcgagtccaggagaacggctggaaagtgcttacttttatggtagttccaaatccagagggtttgtggtgacaactatatgtagttccttttctgcccttgagtagaagcttagaagtgttaatttgcaaaaaattggatgcagcacctggaaatagaaccgaaagagccaggttaacctgactttgagcttgttctacttttatgaggtggctgtacttttaagaattactttggtccctgggaaaagggggatgcagatgttaattcttttattttgatctgaataaattgtcttctaattctactctgtaaaatatcaggattggcaaacctggttaaaacttggaagaaatgcttaaaatggaaattggaatctaattacatttcagcattgaggaattaggcatgccttttacattttgaagtgtatacactgtgaaactcattttcagatgtatggggaacgcttctgttcccttgaaatttgatgtaggatttcaagtaaattttatttctttttttttggaggtgaagtctcgctctgtcaccctggttggagtgcagtgacgtgatcttggctcactgcaacctccgccttccgggttcaagcgattctcctgcctcagcctccccagtagttgggattacaggcgcgctccaccacaccccggctgattttttttttgtatttttagtagagacggggtttcaccgtgttggccaggctcgtcttaaactcctgacctcaaatcatcctcctgcctcggcctgtcaaagggttgggattacaggcgtgagccgctgtgcccagccaaattttatttcttgtcaagaaataagaggaccaggggatacacggtatttacaaggtctttagagaaagatttgatctctttaatactatcatataaatattttagcagtatttgtaaaaggcctggactttaaatataatgtgagtttgcggagtattttacttaaattattttagtaaaattaaattttatttcttagagatggggtcttgccatgttgcccaggctggccttaaactcctgggctcaagtgatccacctcagcctccccagtagctggggctatagacgtgttccattacaccagctaaatgtatttattttttgaaaaggtgttgcatttaaatagaatggaaatgatgtcgtcattaacagtggagtagaagaaactgttactatttttacttgttcaaggtcacactagacctagaaacctgagagctgggatgctaagctaacaaactccagctctgcagttttctacttgtgactagaattaaggcaagccattctgtcagccaatttatttctttaactctgtagattatttgggagaattccttatgtcacctcatgtgacaagttcttttcattacaattttattttatttttttgagacggagtcgtgctctgttgcccaggttggagtacagtggtgtgatctcggaccactgcaatctccgcctcccaggttcaagcgattcttctgcctcagcctccggagtagctggattacaggcgccagacaccatgcccggctaattgtttgcatttttagtagagacggggtttcaccatgttggccaggctggtcttgaactcctgacctcaagtgatccgcccccctcggcctcccaaagtgctgggattacaggcatgagccactgcacctgcattacaattttaaaaataaacttaagctgggcatggtggctcatgcctgtaatcccagcactttgggaggccaaggtggcagatcacttgaggtcaagagttcaagaccagtctggccaacatggtgaaaccccgtctctaataaaaatacagaaattagccgggtgtggtggtgggcacctgtaatcccagctactcaggagactgaggcaggagaattgcttgaacccgggaagcagaggttgcaatggtgagctgagatcgcaccactgccctccagtctgggagacagagcaagactctgtctcaaaaaaaaaaacttaaaaaaatttaagaaggttagttgaccataatgatccctgtttcaatagatccctgtttattgggaaggatatgttcgattcttaaatacgccatctgacaaatcagaagatggaaggctaatttatactggcaatatggcccgagcagtgtttggtaagtaattggaggtgggtgtacttactttgtttttttctcttttaattgtaaaaatatccttaccatatcttacttgttgttatggcatcccttaattacaa

SEQ ID NO: 40659 - DNA, 2300 bp, Homo sapien
caacacagtgagactttatctctaaaaaaatggaaaaaatcacacttctgttgtaaaatatttttaccaacgtatgattattttcttcttaagtgtgcagatttttaggccaaaactccatgccatttttggctgctaaccctaagctatatcctgtaaaggatttcaagtagcaagatatctaaaggaatagctgtctttctaaaatggagtgagagttttgaaatgaaatacatgtcataacaaaaggatgacatttcattattaggactcaaaatgttctcttgagctctagcttgttgtaggtgaatacattattaagactggtggagtccctgcccacagcacagaattacagctagtgtcccctgtttggggtcttatctggccctgttctgtcctgtaactaaacctgctgctgaaaagaaatagtttccatgagactgtttacttcagatctataggtgcagctctctgggccatgataatttgatttgttgttgttattgttgttttttgagatggagtctcgctctgtctcccaggctggagtgcagtgacataatcttggctcactgcaaactccacctcctcggttcaagcaattctcttgcctcagcctcctgagtagctgggactacaggcacttgccaccatgcctagctaatttttgtatttttagtagagacagggtttcactatgtcggtcaagctggtttcaaactcctgacctcaggtgatccgcccaccttgacctcccaaagtgctgggatttacagaggtgagccactgcgcctggcctgtttgtttgtttttgagaccgagtctcactctgttgcccaggctggagtgtagtggcccaatcttggctcactgcaacctctgcctcctgggttcaagcgattctcctgcctcagcctcccgagtagctgggattacaggtgtgtgccaccatgcctggctaatttttatatttttagtagagacggaatttcaccatgttggccaggctggtcttgaactcctgacctcaagtgatccacccaccttggtatcccaaaatgctgggatgacaggcatgagccaccgtgcccagctgagaatttgttttataaagcaggaggccccatcctctgggggccgtggaccagtaccagtccatggcctgttaggaatctggttgtggcttgttaggaagtgggctgcacagctggaggttaacagcaggtgagcgagcattaccacctgagctccagctcctgtcagaccagcagcagcattagattcccatgggagcaggaaccttgttatgaagtatacaagcgagggatctaggttgcgtgctccctataagaatctaatgcctgatgttctgaggtggaacagtttcaccctgaaaccatccctccccatcccctcagtccgtggaaaaattgtcttccatgaaactgatccctgaggccaaaaatgttggggactgctgttatacagagctgtaggagagaagaataatgcagagggaaaaggagtgcctgtctgttgagactttcagggggacctagggactggttttgttacagttgactgggaattgtcttgtttattttattttatttttcatttaaaaaatttttttgaaatggagtcttgctctgttgcccaggctggagagcagtggtgccatcttggctcactgcaacctctgcctcccagataaagtgaagctcctgcctcagcctcctgaatagctgggattacaggcatgcactaccacacctggctaatttttgtatttttagtagagatgtgtttcatcatgtcagccaggctggtcttgaactcctgacctcaagtgatccacctgcctcagcctcccaaaatactgagattacaggcatgagccaccgtgcctggccaaagtgtcttgttttatttttaagtctttgatcactctcatttacagtaagtgtttgaagagtacattctaaatcatttttctctcttcctttacaggaagtgctcaaatgttgagcacacacacacaaaaaaagaggaaacagttggataggaactcagaaatcatgtgactgatgactaagttaaatcttttctgcttactgaaaaggaagagtctgatgattagttactgatcctctttgcatttgtaaagctttggagatattgaatcatgttaccatttctgtttttttccaccctgttttcttccatatttactgaagctcagaagcagtattgggtctgcaactcatccgatgcaagtatttcatacacctactgtg

SEQ ID NO: 40660 - DNA, 2300 bp, Homo sapien
ggctgaggcacgagaattacttgaacaggagaggcagaggttgcagtgagctgagatagcaccactgtacttcagcctgggtaacagagcgagactctatctcgattaaaaaaaaagttaaaataaatttagtatgaattaaaatatttaaaaaaaagacttggtgtgaatgctggccacctcacccataacacatacccacccgcccactccaccatccgtcaccaggtacagatgttttgcttatcattatcatattgcaataataagaatataaaataatatatttaatatggacactcttaatgaagccatatgaaaaatggaaatagtatgtgaaagtggtgagctttcaattttattattgttattttaacatttcttaacgttgttttcatattgttgctaattaaatgaaattatagcactattaccatcaccaaaacataattaccaccaccaatcctgttagcaatgctcttttaaacgttatctaagactcagctgggcacgggggctcatgcctgtaatcccaggactttgggaggccgaggcaggtggatcacgaggtcaggagtttgagaccagcctggaccaacgtggtgaaattccgtctctactaaaaatacaaaaattagccaggcgtggtggcacgcacctgtaatcccagctactcaggaggctgaggcaggagaatcgcttgaacccaggaggtggaggttgcagtgagctgagatcgtgccaccgcactccagcctgagcgacagagtgagactctgtctcaaaaaaataaaaattatctaagacccataagatactattagtaatagaggaaagaagatggggttgttctaaacataagcacgaatgtggccaatgggcagaagacacattctcctgtataagattcatttataattctcagagccaagagaggaagcagtaattcaaagcaagggaagtgaagagcttgtttccttagtgttcatgagccggcctgatctggatataactgctaatgagaacaacatgctttcaggcaaaaagtacacaccaggctttggtgtgcagataaccaaggattagtgcttgagaattcatttgttttgctcttggtgtaacttgggcatgagataaaagactgagagtagcttcttaaattgtccagtgactgctcagaaatgcttttgactgtaggtaggttctccaatccatatatacttcttagtaattatcttagtaattcatgcttctctctcatgatgctgaaatttttagcaggtaccatggactgaatgtacccccaaattcatttgtgtggcttccccaaaattcctgtgttgcaatcctaatccccactgtatggtattaggtggcggggtcttgggggaggtaatgaagtcgtgagggtggagcctttatgaatgggattagtgcctaataaaagagacctcagagagtgcccttccctctccaacacgtgaggacatagtgaaaagttggctgtctgtgaacgaggtagtcggccttcaacagacaccgaatttgctggtgccttgatcttggatttcctagctccagaattgggagaaataaatgtttgttgcttgagccgcccagtctatggtatcctattatagcagttcatacatactaagacagtggggttcaattttactccctaattcaaattattgaattttcaagttcaactcctgtgtgagtaaaatttattcctatacatgtttagtgcagctgtgtaagtaaaatttattcctacagatgtttagtgcagctgaaggtgtaaaacaagaaaaaagaaaggaaaaataaaagaaaaagaaaaatacttggcaatattgttggggagagaagaggttattttggagaagggaaggaggtttttgtggatggaaggtttttgccagtagaaggggactgtgtatgtcaccacgtgccatgagtgtgcatgcgggaggcccacaggggctggtgggagtgctagacaacaggggctaagaaaagaaagtagaagtgtgacataacttcctccgtcacagtttcagttagggtgccaggcaaccctgtgtgcacacagatacttggaagaagggctgtaacctttagcttcccccagtttagcccgttggccttgtctaggctggtctgtttctgactcttcttttcctcatctaatatagacctacttttcttttattggaagtaggaagaggaaaaatagacaaaggaagagaaaaatactagattaaggctcagatattgtaggcatgagacctgga

SEQ ID NO: 40661 - DNA, 2300 bp, Homo sapien
ttggcttgagcaaccacactttttctcatatcatacagaacctcaaaatatatgggaatgcatctttctacattagctcctgattctggtgtatcccataacagggaaatggaattatggctcagccgcaaagccctggccctcatcttcccagcggcctaaatcaatccccagtccaggacaagatgcttcgagagatgcataattatttcaggccactagggtaagcactattcctggcaactctgcgggcagtgccatggatgagggcttctaattctctttggtgatttggttctgcataaactgagatttttctttcagtctttcagccagataagtaggaaaggtcggctctcgtcctgagagagaggcaatcaaggtcaatttcagttccttttctgtgcagtttagtctactttttcccaggctgtcttcctgacacctgtccttatatctatatctgattatcaaatacttagtgagagaacctttggcagcttctgatgctcgcatagtcacccaaaggcctctcagcctaagaaatagcaggaatacactccaaatcagtttccttgagaggccaaactaagaccctaggctgtgaaagtgggagaagtttctcccgtgggtattttgagggtgaggtggagaataatgctttctctcaccagaggcaatgctgatccaacttgcctattaccaaatctctaatttttggtttggcactgcagccacaatatactcagttattaccgaatatagaaagagaaaggcaaatcttgttagtcccattcagaagatggtgaaatggaggtttaaaagtttagaagagttgcctaaagtgaattcgacaaagcagtgttgtagctagaaagtagaccagctgacatctgtccctggttttgtaggtcacagtttctttgcaagtttagagcagtgctttacttaccatattcctccttgcaaacctctatttactttcttaaacagtggataccagtggagaggtgtgcattccagacacttatacaatgtacacagaccgagccgtctacctgttgggcacacagctccaggctcaagaatctctaaggctgttaagaagcacaaacgaggcacgagagggggcaggctctaatgtaaaaggaatatcctgtaccactgcaaaggccgattgaaaacatcctcttcatcactattaataaaaaactaaccaatatattctgtgctttttcaaactgtactgctcaccctcagtgtcttcattaaataaatgcaaacacgtgtgctttgaaacgggtaggtgtaaaagaacactctgcacaattatatctaggctgccgcagatttacatcacatgcatacatatatctaggcgatattaattcacgatgacagctgagcatgacaaatgcaacagtacacaagttggaatgcgaaaacaatgcaactacaaaccccatgcagacaaacacgcatacaatgagttttccctcaacacacacgtggccgcactcacaggagcttaaccactttgaaaaaccccaaacacaaacaccgggggctccggcgcccgcgagcggcccccacacaggcagccgcgccttcatctccaggcagggattctcgtgcgtccccgggtacactcgccctcccaccggcatcccactgcgcgaacacatgcgcgccagccggtccccgcgcgcgcccgcctgccgaggaagcggcggctcccggggctgggggcagggcccggtggggcgggagcgccgcggggccgggcctcggcgcccggggaggggacgaggggcgggcgcggggcggtgcccggctcacgtgggcgggcgggagcagctgaaggtccgctcgggaacctgggctgtcctctcgcgcgcggcgctggcccaggcggcggcggcgaaggaggaggaggaggaggaggaaggcggcggtggcggcggcaaaagaggagggaggacgggggcggcgtcggactggagccgagcggcagcgcgagctgcccagggcgctgtcgtgagctcgcccgccgggcccccacccccgagctacaccctgccgtgcccagcactgcccgcgtccgtgcccctgcggggagcgcgccggggctgccccccgaatgacgggcggaaggttcgacttcgacgatggcggcacctactgcggcggctgggaggagggcaaggcgcacgggcatggcatctgcacggggcccaagggccagggcgagtactcgggctcctggtcgcacggcttcgaggtggtcggaggctacacct

SEQ ID NO: 40662 - DNA, 2300 bp, Homo sapien
tcacgattcttgaagcatattgatacatttgccttcagaagttctgtgcatgtttacactcccaatgagatctatgaatgctttgtactaaacaccaagtaatcaagtcattcagtgtttcttctatggctttgctgtgggcaggatgtgatggagaaaagtgttgtgtttgagggaccagggctttattgtcaggactttttcagctgcaggtgacacatggcttatcacgagtactggaatttattcaaatatttaggatgatttagtattaaggttggtgcaaaagtaagcgtggtgtttgctattgaaggtaatggaatagaaaactaggaatctgaaggtggataattaaaaaatgaagttctgaagaggaatgggagaggaggattatatgggtagttgtaaaaattttgagacctacagagagaggatgaaatgtaatataatgccctcctaatgtcagtgaaggggcttttacacatatgtttttatcaatggctacattccaggcaataccctaggtgctttatatatatcctttcttgaattcccacagccatctgggtaggcatataatttttatgtatccattttttacacacaatgaagtcaaagctcaagaaagctcaagttagggtagagctagaatttaaaccccactctgtccgatttcaaagttttcctctttccgctcttactcttaagtgtgaactgataaaaacaattttggcaaggaattcaccttttctatagcacttgaattaactgaaggatataaaagacattatgaaatcttaaaaaattatgaaagaattacagagagtaacaaatgaagtactgtaaaggcaaggaagaacctcatgagattttgtcttttccaggggcccttctctgacctgggttggctgcctgcccctcctttctcatagtactctgtgttcaccctaagacagttctcatctttattgtgattgtctatttccttggtcgtctctactgccagattatatcttgagtgttagatattagatttcacacatctttatattaccaggagccagcacaatgtctggaacagtgtaggtgctcaataaatatttgccagataaattatacaggcatttattctatggtcatatttatacatattactgaaagagatttttaaaatcaacttactatatgatgccaaatttttaaagacatacaataataactagactaatataaaattatgattctgactatggttataacagaatgtttataagacaactgaacctgtgactaagactgagtgcctacaacgtgacagggtgttctgagtgtttaacattttattattaatttttcacaaaaatcttatgagggaaacaataaaattattattcttacttagaaaatggaaaaaccaggatatgaacttaggcagtactgttgtagaatttttgtgtttaacaactaggctattttatatcgccattgtttattagctgtttatgacaaaaacagtttttttgcatgactccatagtggtatttttttttcttttacaaagcacagtttaattatcaaaatcaagtacttactgtttatacaagactattctctaatctacagcagttagtcaaatttgtggaattagtccactaatgtcatagtagcatcttctaatgaaagctcatagatccttttcctgttgctttgcttgtcgaccggaacttcctttccaacaaaggaacaggctccaagagcaaccctcagtatcttgggaaattgctgcttttatacctgagcaacctccaaaccgaagagtaatttgctatcatcattcttccttactgcccttcataaccagggtctcatattttttattttttcttctaaaaaaaaaaacaaacccaaaaaacaaccgttcaattgcacctcccaggtgcactcccaggcttgccaggggctttccagtcgcagaccccgcgtgttcgcagactctgccgccggcgaaactacatttcccagcgggccgcgcgccctccttccggcaggtacccctcaaaacccggaaacgccttgcggggcagtgtgggagggagaagtccagggcggacaggctgggcgcacccgtgctcgcgcaccccaagatggctgagaggcaggaagagcagagagggagcccgcccttgagggcggaaggcaaggccgacgcggaggttaagctcattctgtaccattggacgcattcgttcagctctcaaaaggtacaacaggccttggcggcggagggtggcgcggatcgg

SEQ ID NO: 40663 - DNA, 2300 bp, Homo sapien
ttcaattcctgggtatccttgttgactttctgtctcgttgatctgtctaatgttgacagtggggtgttaaagtctcccattattaatgtgtgggagtctaagtctctttgtaggtcactcaggacttgctttatgaatcttggtgctcctgtattgggtgcatatatatttaggatagttagctcttcttgttgaattgatccctttaccattatgtaatggccttctttgtctcttttgatctttgttggtttaaagtctgtttcatcagagactaggattgcaacccctgcctttttttgttttccatttgcttggtagatcttcctccatccttttattttgagtctatgtgtgtctctgcacgtgagatgggtttcctgaatacagcacactgatgggtcttgactctttatccaatttgccagtctgtatcttttaattggagcatttagtacatttacatttaaagttaatattgttatgtgtgaatttgatcctgtcattatgatgttagctggttattttgctcgttagttgatgcagtttcttcctagtcttgatggtctttacattttggcatgattttgcagcggctggtatcggttgttcctttccatgttcagtgcttccttcaggagctcttttagggcaggcctggtggtgacaaaatctctcagcatttgcttgtctgtaaaggattttatttttcctacacttatgaagcttagtttggctggatatgaaattctgggttgaaaattcttttctttaagaatgttgaatattggcccccactctcttctggcttgtagggtttctgccaagatatccgctgttagtctgatgggcttccctttgagggtaacccgacctttctctctggctgcccttaacattttttccttcatttcaactttggtgaatctgacaattatgtgtcttggagttgctcttctcgaggagtatctttgtggcgttctgtgtatttcctgaatctgaacgttggcctgccttgctagattggagaagttctcctggataatatcctgcagagtgttttccaacttggttccattctccccatcactttcaggtacaccaatcagacgtagatttggtcttttcacatagtcccatatttcttggaggctttgctcatttctttttattcttttttctctaaacttcccttctcgcttcatttcattcatttcatcttccactgctgataccctttcttccagttgatcgcatcggctcctgaggcttctgcattcttcacgtagttctcgagccttggttttcagctccatcagctcctttaagcacttctctgtattggttattctagttatacattcttctaaatttttttcaaagttttcaacttctttgcctttggtttgaatgtcctcccatagctcagagtaatttgatcgtctgaagccttctctcaggtcgtcaaagtcattctccatccagctttgttccattgctggtgaggaactgcgttcctttggaggaggagaggcgctctgctttttagtttccagtttttctgttctgttttttccccatctttgtggttttatctacttttggtctttgatgatggtgatgtacagatgggtttttggtgtggatgtcctttctgtttgttagttttccttctaacagacaggaccctcagctgcaggtctgttggaataccctgctgtgtgaggtgtcagtgtgcccctgctggggggtgcctcccagttaggctgctcgggggtgaggggtgagggactcacttgaggaggcagtctgcccgttctcagatctccagctgcatgctgggagaaccactgctctcttcaaagctgtccagacagggacatttaagtctgcagaggttactgctgtctttttgtttgtctgtgccctgcccccagaggtggagcctacagaggcaggcaggcctccttgagctgtggtgggctccacccagttggagctttccggctgctttgtttacctaatcaagcctgggcaatggcgggcgcccctccccccgcctcgctgccgccttgcagtttgatctcagactgctgtgctagcaatcagcgagattccgtgggcgtaggaccctccgagccaggtgcgtgatatactctcgtggtgcgccgttttttaagcccgtcggaaaagcgcagtattcgggtgggagtgacccgattttccaggtgccgtctgtcacccctttctttgactcggaaagggaactccctgaccccttgcgcttcccaagtgaggca

SEQ ID NO: 40664 - DNA, 2300 bp, Homo sapien
cttagaggaaatccatttttggtttagacaagtttgtcaagcatcacatttttatccctatggaaatctttcaagtcaaaccccaagaggtggacaatacctctttgtgtatatgacaaagggtgtagtcttaaatataactttcgattcttatgaggttctaagcaagaactcagtcaccctggagaatgaaaggctcatgactgctgttcaggtattaaaagtccttttgttcctcagatagctgggaaactgtgtgagatatgtagagagtaaaggctaatgtgtgctgccactaatttctcaaaaagtccacagatcttagagctggatggcctacagagagtttctcatctaacctctgatttaattcaggaatccttaatatagcatatttgagattcattgaaggtgccatgaatactttccaaagtggtgcaaccctagttggacagctccacttgttaagatctgcagctgtgaacaaccatgtgaatttcctctagttgctccaatgtttcataatatccttgctcacctcctgagtttatatatctgtttatgccttttcaagtttagtattaattccttgtttaaagctctcaatatttcagctatggctctcctaaaatgatttcactttagttaggagttgaatagtcatcaaaatgtgtcaaaacctggactttggtatatattattataaagtctgtatctcatcactgtagtttgaattttagtgacacctctggtacacctcactaccctcttaaagaacttgatgatgtctgtctcaccatagaacgtgaatcttttctctcccatttttaggtgcaccaatgaagagttaaacagtatgcatttgaccacacatactactcgtgatccaactgggaatatatcctaggaaacttggctgcctgtccagtgtgccacatgaccatcatttctgatgactgtaaattcacatagtatttcttctgctgaaacatgtgggagacaatcacattagcaagctggaaaaaatcagtgtaagttaagtaagtttctaaactgaagagcgtgtgttttccaggattcctattgctactgactgtaagtggtccacattttgttaatgagatcatgacgcattttggggagggtcctttcattatagagcaccaatgttcacattcttcttcttgctttgcctgacatagactttgcccctgtgacatcctcctaacaaggcacttctaattgttggcagctgctgctgctgttaaaattcttcatggcctctgtgttatgccctctaatacatttcctgagaggctgagctattctctgcttaaaatttcaactatatgctctaaacctgaaacagatgttatcttggctgctgtcatttgccatgagcttctctattcacattttatacaaggcaggtaaaaagcaagtaatttctgacctcactctgtagagaaagaaaaaagggagagaaggtaaaataagagagagaagaagaaatatataaagcacaggaatgcagccacatggaagcagagaacacagccacttgagcatctattatcctaatatcatatgctatagtttggttactaccgatttgcctggcatccctctcgaatcatatttgtggccacccagattaactatgttagctgatctcttgatttaatatcagcttgttctttttagctcccatgtcatttactgtcttaaaaaaatgtactgcttgttactcaactgtctgttttttcatgaacccacagtcttttttttttttgtctttgtttcttcttttttgtatgggaaccaggaactagaaagcataaaatgagagaaattactcacagaaaaggtggaagcccagagaaaaaggggtttgtcttttatggcttgtactttgtaagctgtgggtgtgactcaatttcctcaccacccacataaaaaggttgccacccaatcactgtttttttctaccccaaacccctcccctttgattttggctaagagagacccttagaaagactgccctttctggacgttgcaaactgtgacatataaaagctgttagctgctcctctagccagcagcattcaaaccttgcagagctttgctctcagagagtttgtaaaaagacacactcctcttacaagagttcatgctaccacatagcaaagaaccttaaatttttggaagaacaatatattcattttggcattgtgcagaggtaagctatttagctcaacaagtttatattgcatgcattgattttaaagtagctcacattt

SEQ ID NO: 40665 - DNA, 2300 bp, Homo sapien
gtatatattattataaagtctgtatctcatcactgtagtttgaattttagtgacacctctggtacacctcactaccctcttaaagaacttgatgatgtctgtctcaccatagaacgtgaatcttttctctcccatttttaggtgcaccaatgaagagttaaacagtatgcatttgaccacacatactactcgtgatccaactgggaatatatcctaggaaacttggctgcctgtccagtgtgccacatgaccatcatttctgatgactgtaaattcacatagtatttcttctgctgaaacatgtgggagacaatcacattagcaagctggaaaaaatcagtgtaagttaagtaagtttctaaactgaagagcgtgtgttttccaggattcctattgctactgactgtaagtggtccacattttgttaatgagatcatgacgcattttggggagggtcctttcattatagagcaccaatgttcacattcttcttcttgctttgcctgacatagactttgcccctgtgacatcctcctaacaaggcacttctaattgttggcagctgctgctgctgttaaaattcttcatggcctctgtgttatgccctctaatacatttcctgagaggctgagctattctctgcttaaaatttcaactatatgctctaaacctgaaacagatgttatcttggctgctgtcatttgccatgagcttctctattcacattttatacaaggcaggtaaaaagcaagtaatttctgacctcactctgtagagaaagaaaaaagggagagaaggtaaaataagagagagaagaagaaatatataaagcacaggaatgcagccacatggaagcagagaacacagccacttgagcatctattatcctaatatcatatgctatagtttggttactaccgatttgcctggcatccctctcgaatcatatttgtggccacccagattaactatgttagctgatctcttgatttaatatcagcttgttctttttagctcccatgtcatttactgtcttaaaaaaatgtactgcttgttactcaactgtctgttttttcatgaacccacagtcttttttttttttgtctttgtttcttcttttttgtatgggaaccaggaactagaaagcataaaatgagagaaattactcacagaaaaggtggaagcccagagaaaaaggggtttgtcttttatggcttgtactttgtaagctgtgggtgtgactcaatttcctcaccacccacataaaaaggttgccacccaatcactgtttttttctaccccaaacccctcccctttgattttggctaagagagacccttagaaagactgccctttctggacgttgcaaactgtgacatataaaagctgttagctgctcctctagccagcagcattcaaaccttgcagagctttgctctcagagagtttgtaaaaagacacactcctcttacaagagttcatgctaccacatagcaaagaaccttaaatttttggaagaacaatatattcattttggcattgtgcagaggtaagctatttagctcaacaagtttatattgcatgcattgattttaaagtagctcacatttttttaaagaaatgagattggattactatgacttttttgtatgtgttctatcacttggtgtgtctatatgtctggcagacattatcagcacattctctgttgttacctgtgattcattttttcttcactctccaggtgaatttcaattgctgaaaatttcccactgaaaatatgcagtaatatattttgtggttcagacatttggggcaaatggttcacattcattttagggttagtggtcatgctgtttatttttctctgctatacaaagttcctcttaggggtctgcctcatgacactaaaaaatgaatagagattctactgtaggttatctcctaggcttgagttcaacatttgtttggatttttgaagaaagtcaaatcaagcaatgctcccaaatgatgtctttgtaaattcataccctctggccctattttttttcatagaccctaactctacctttctgctttaaagcaaagtaaactcggtggcctcttcttctccacccctcaaaatgatagcaatctctgccgtcagcagtgcactcctgttctcccttctctgtgaagcaagtaccgtcgtcctactcaattccactgactcatccccgccaaccaataatttcactgatattgaagcagctctgaaagcacaattagattcagcggatatccccaaagccaggcggaag

SEQ ID NO: 40666 - DNA, 2300 bp, Homo sapien
ttaggtctgcttggtgcagagctgagttcaattcctgggtatccttgttgactttctgtctcgttgatctgtctaatgttgacagtggggtgttaaagtctcccattattaatgtgtgggagtctaagtctctttgtaggtcactcaggacttgctttatgaatctgggtgctcctgtattgggtgcatatatatttaggatagttagctcttcttgttgaattgatccctttaccattatataatggccttctttgtctctttcgatctttgttggtttaaagtctgttttatcagagactaggattgcaacccctgcctttttttgttttccatttgcttggtagatcttcctccatccttttattttgagtctatgtgtgtctctgcacgtgagatgggtttcctgaatacagcacactgatgggtcttgactctttatccagtttgccagtctgtgtcttttaattggagcatttagtccatttacatttaaagttaatattgttatgtgtgaatttgatcctgtcattatgatattagctggtgattttctcgttagttgatgcagtttcttcctagtctcgatggtctttacatcttggcatgattttgcagcggctggtactggttgttcctttccatgtttagcgcttccttcaggagctcttttagggcaggcctggtggtgacaaaatctctcagcatttgcttgtctgtaaagtattttatttctccttcgcttgtgaagcttagtttgactggatatgaaattctggcttgaaaattcttttctttaagaatgttgaatattggcccccactctcttctggcttgtagggtttctgccaagatatccgctgttagtctgatgggcttccctttgagggtaacccgacctttctctctggctgcccttaacattttttccttcatttcaactttggtgaatctgacaattatgtgtcttggagttgctcttcttgaggagtatctttgtggcattctctgtatttcctgaatctgaacgttggcctgccttgctagattggagaagttctcctggataatatcctgcagagtgttttccaacttggttccattctccccatcactttcaggtacaccaatcagacgtagatttggtcttttcacatagtcccatatttcttggaggctttgctcatttctttttattcttttttctctaaacttcccttctcgcttcatttcattcatttcatcttccattgctgataccctttcttccagttgttcacatcggctcctgaggcttctgcattcttcacgtagttctcgagccttggttttcagctccatcagctgctcctttaagcacttctctgtattggttattctagttatacattcttctaaatttttttcaaagttttcaacttctttgcctttggtttcaatgtcctcccgtagctcagagtaatttgatcgtctgaagccttcttctctcagctcgtcaaagtcattctccatccacctttgttccgttgctggtgaggaactgcgttcctttggaggaggagaggcgctctgctttttagagtttccagtttttctgttctgttttttccccatctttatggttttatctacttttggtctttgatgatggtgatgtacagatgggtttttggtgtggatgtcctttctgtttgttagttttccttctaacagacaggaccctcagctgcaggtctgttggaataccctgccatgtgagatgtcagtgtgcccctgctggggggtgcctcccagttaggctgctcgggggtcaggggtcagggactcacttgaggaggcagtctgcccgttctcagatctccagctgcgtgctgggagaaccactgctctcttcaaagctgtcagacagggacatttaagtctgcagaggttactgctgtcttttcgtttgtctgtgccctgcccccagaggtggagtctacagaggcgggcaggcctccttgagctgtggtgggctccacccagttggagcttcccagctgctttgtttacctaagcaagcctgggcaatggcgggcgcccctcccccagcctcgctgccgccttgcagtttgatctcagactgctgtgctagcaatcagcgagactccgtgggcgtaggaccctccgagccaggtgcgtgatatactctcgtggtttgccgttttttaagccggtcggaaaagcgcagtattcgggtgggagtgagccgattttccgggtgcgtccgtcacccctttctttgactcggaaagggaact

SEQ ID NO: 40667 - DNA, 2300 bp, Homo sapien
ttgaagatgccagtttgacagcatgtgagagggtggatatccccggtaaattggaggctatgggcttggaaggaagaaaggggtggaaggctggttgttggttaggcaaccaccagtgtttgccacaagaaagtagtaatgctaaaaacaaccagggctttacaagtaacagccttagccacaaaccaaagtgccacttttacgtgaattctgtgtgaagaagacattttcttatgtctacacacagatttctcaactacaaataaaaaacgtgaacagtatcatctttgagtattcaagaatattgtgtttgattttactgttcaaaatggcatttccaacatatatactcaatcaggaatgacaagatgtattattgaaatgctaacatgatgaatgcttaaatcacctgcagtacccaaattggaagccaaaagaaatgctgagtcaaaggatttttttccttgtttagagaaagatttggaattaaagacctaaaacaatttttattttctttaatgtgagcctttaggtgttggattcatacattgtgtaagaatgtttataactgaaatattcaagagttacaaattcatttaacttcacttccctatcattttaattcccttcttcctaatttgaattctctttgcaaatgtttcaagtaatattattactttcatggctctttattcaatattcagtatacttttcaatgccacatggacattgcagtataaaaacatagtcttcatctgctgtaacaaatgatagttcttttaccataaactttggaggttttctatcagtttctaagagggaaagccagttttctcaaccctgtgcatggaaattatgaatagttatttgaaaaatacaaagttaagaacttttttgtacttaaaactgctaaaaaattgcaaaattacacttctataaaagtcttatgtgcatcaaaacttttcaccttctgcacctttctaataagtgatgcttcccttttctttgtgacaggaagcaaggtctcacctccagctgaggcttagagttgagtttttaggtttgatagatatggtgtagttgaatggtggaaagagacaggcaacagcttgggatgatttgagttactaccataatattgtactttatttgatcatatgctagatactctagcatttagaaagaaggaaaattgagactatgattcaccacattagggaagcaaacatagatggattaaataattaaaaataaaaataaaaaacagccccacacttggtagggtaagctgttgtgaatttaaaattagtaattttcttaccccagattacaacatgaacaaaggaacggcctctcctttcactacctattctagcgctggggtttcaattcctgtcaacaatccctgataaattaatggtaccctttatatcaactccttaaatgtatacatcatcagaaaaaaaagtgctatggccaccttgagaagacaatgcctcatattttatgaataaagagggggtctcaactgtcaggccattctgagtcacatattgaccccaaattctattgaacatcttccccatctggtcctcatcaaggatgcggacccctgggaaaaataaaaggaaaagtatttttccatttcgtcccctatttccccttttgtgcctccaagattgaaggtgttatccccatcccccacccactccatgctctatggggcagcccctcgtctgtaaggacccttaaaggcatttcagcatctcagcagaaaggaactgactgggaggaggatctttgaatgcaggggagctgggaggactgaggggggttggggccctccttgcacacatctcccaccaggggccagaccttccgggcttgggtctcgggagcccaaagcacgcccacaaaggccgagcgccctggcttcgctgcgttccggagaagcagggcgggctgcttctcccggatctggcgggcctctggccacggctggttggaggtgggggtgggcgaggaggggcgctcaagtcacgtgcccgcgctggggccgcaataaatgctcgcgaacgcgagagagcgacggaagcgctaggcgcctggttctgcgcgtactggctgtacggagcaggagcaagaggtcgccgccagcctccgccgccgagcctcgttcgtgtccccgcccctcgctcctgcagctactgctcagaaacgctggggcgcccaccctggcagactaacgaagcagctcccttcccaccccaactgcaggtctaattttggacgctttgcct

SEQ ID NO: 40668 - DNA, 2300 bp, Homo sapien
tttgttttccatttgcttggtagatcttcctccatccttttattttgagcctatgtgtgtctctgcacgtgagatgggtttcctgaatacagcatactgatgggtcttgactctttatccaatttgccagtctgtgtcttttaattggagcatttagtccatttacatttaaagttaatattgttatgtgtgaatttgatcctgtcattatgatgccagctggtcattttgctcgttagttgatgcagtttcttcctagtctctatggtctttacattttggcatgattttgcagtggctggtaccggtagttcctttccatgtttagcgcttccttcaggagctcttttagggcaggcctggtggtgacaaaatctctcagcatttgcttgtctgtaaaggattttatttctcctttgcttatgaagcttagtttggctggatatgaaattctgggttgaaaattcttttctttaagaatgttgaatattggcccccactctcttctggcttgtagggtttctgccgagagatccgctgttagtctgatgggcttccctttgtgggtaacccgacctttctctctggctgcccttaacattttttccttcatttcaactttggtgaatctgacaattatgtgtcttggagttgctcttcttgaggagtatctttgtggtgttctctgtatttcctgaatctgaacgttggcctgccttgctagattggggaagttctcctggataatatcctgcagagtgttttccaacttggttccattctctccatcactttcaggtacaccaatcagacgtagatttggtcttttcacatagtcccatatttcttggaggctttgctcatttctttttattcttttttctctaaacttcccttctggcttcatttcattcatttcatcttccattgctgataccctttcttccagttgatcgcatcggctcctgaggcttctgcattcttcacgtagttctcgagccttggttttcagctccatcagctcctttaagcacttctctatattggttattctagttatacattcttctaaatttttttcaaagttttcaacttctttgcctttggtttgaatgtcctcccgtagctcagagtaatttgatcgtctgaagccttcttctctcagctcgtcaaagtctttctccatccagctttgttcggttgctggtgaggaactgcgttcctttggaggaggagaggcactctgctttttagagtttccagtttttctgttctgttttttccccatctttgtggttttatctacttttggtctttgatgatggtgatgtacagatgggtttttggtgtggatgtcctttctgtttgttagttttccttctaacagacaggaccctcagctgcaggtctgttggaataccctgccgtgtgaggtgtcagtgtgcccctgctggggggtgcctcccagttaggctgctcaggggtcaggggtcagggacccacttgaggaggcagtctgcccgttctcagatctccagctgtgggctgggagaaccactgctctcttcaaagctgtcagacagggacatttaagtcggcaaaggttactgctgtctttttgtttgtctgtgccctgcccccagaagtggagcctacagaggcaggcaggcctccttgagctgtggtgggctccacccagttggagcttcctggctgctttgtttacctaatcaagcctgggcaatggcgggcgcccctcccccagcctcgctgccgccttgcagtttgatctcagactgctgtgctagcaatcagcgagattccgtgggcgtaggaccctctgagccaggtgtgggatatagtctcgtggtgcgctgttttttaagcccgtcggaaaagcgcagtattcgggtgggagtgacccgattttccaggtgccgtctgtcacccctttctttgactcggaaagggaactccctgaccccttgcacttcccaagtgaggcaatgcctcgccctgcttcggctcgcgcatggtgcgcgcacccactgacctgcgcccactgtctggcactccctagtgagatgaagccggtacctcagatggaaatgcggaaatcaccgtcttctgtgtcgctcaggctgggagctgtagaccggagctgttcctattcggccatcttggctcctctccctctttaaagtggtatgttttaactactccgttttttattttgtggctacctgttgtattttttttatttgaggttaccatgaggcttgaaataatatctcataact

SEQ ID NO: 40669 - DNA, 2300 bp, Homo sapien
aaattttatcgcaaaggttctacatattgtgtcaaaataattttgtacacagaacatgtgattatttcctggtagatcagcgattctaccacataccagaaatgaattgattatccaaaacccaacccacttacatcgcagattaacagtggaataaactgagactattgaattaaaatattatttctctgctgagaacaagagatgtcaggtgtcattaaagcttctgtgaatgaggatgaagaacttgtctccagactttgtgttttatggaaactatacattcatattttggcatagaatagaccttcattctccaagtatctggaaatatttttaaagaaaatgtccacaggtgatctgtaaacaacacacctatgaaagatttgcataataaatataacccgttaattgtaactcttttgcctctgccgtgtctggatggtttcccatgagcgacatgaacagaggccactttcttgacacggtttgcaaaccgcgtgggcaatgaggaaccaaagaatatgttttgttcaaaaaggtcgattttaagaaaaatagtatatgatctctctcctttgtcctcatttctaaaacagccaacaacttgtttttcaaagaacctttcagcaagatattcagaaggagaaaactgagaaagtttagtaaatccgatctaaaaagaaaaagaaaaaaacacctagccctttgatctccctggcattgttattacagccttaaaatatcagccaaccctctggtaggaaaagaaaaatcttacggattaagtaactatttatctcacgatgataattacttgtttgacctgaagtcactcattcctgaaaccacgagttaaattgttgagatgtttttaaaagccggcgctctggctatatttctggtgaacaaatgcctgaccaagaagatcagcgcatctgggacgggtctgagacccacttctgcaagtcgaaagctaaagggtatgggagggagaaagggaagttttccatcaaatacatatctaaagaggtacttaaagactaaaaccacaggtagctggcacggatgggaacggaaaaccattccccctcctcttcccagaactcttgctgagctaggtggtcaggagcgtcatggtagaatataaccccagaggcccaaggtgcagtttgaagaaacggtggcggcttcccctagtggtgtggcttcagagctgctcctaggaagccatttaattccctttaatgatatttccagccgttttctggacctcatgagctcaggatgaaatcagcattctagggtcagcaggcttctccctgctaccacgtgtccagaagcacttccacaagccagggttgacatcgcccaagacgaggcgtgacccggggcgggggaggggacttcgcccgcgtcgcgtgaaggatgccctggccttgggctgcaggcgcggacccccgggggctccccagggtgtaggaggcggagactgatccgctctagccccgagcggtccagcgcggggcgactcgcccgcatagtggagattccggcatgaggcggcggcagtcaccgcctggctgccccgcggaggcccgggagagccgctgcggtctcgggaggccgggctttgggacttgctggcccgaccgccagtcgccctggggccttgggaacagggaaatgcgcgcgccgaggcggtggcggcctcgctgctttcagttttcattgagtctgctggttactgtttaacgtccccacccacgtttcagtttgtttagtaaatcgataggactgtgagagtcaggccgctgccctgtcgccattgagcaaagctaatattctcccagcatatggtctaaaatctttgctagagatcgggaaaaagaaacaaacaaacaaacaaacaacaacaaaatccttaagcttcctctcccaagtccccccatccccacccccacttcccacctcctcgctttcagcaaacttcccagcctgggaaaagtgcggcgcgggacagcgcgacggggtgggtgggggacctgctgccgggagatgcggcggcggccgcgcggctgactgcgactcgggagctccgggagcggcccgcgcaggtaagtttctccgccgccgcccggggcccgggctggccgcagcgcaccgccccggcggctgccgggcaggaggagcctcggttcccctcgggcggctgaaggaggggctgagcctcaggacccctaggccaggccgtgttgaaagcagataccccgaggcctcgcccagcctgcgctggaggg

SEQ ID NO: 40670 - DNA, 2300 bp, Homo sapien
taaagatatatctttttatgactttctgttttaattattttatttgcttaatcagttgggtaaattatgagtcctagaatttaagaaaagagggcttccactgtactttgtactctccttcagagaaaagctaaagaaaccgcttcttttgctaggctgaggctgactgaattccgtgggtgtttctacatctgaatatcattacaaagactacccacttgaggagatatgcttgctattcaaatctaccatatcttctggaaattcttgagttcttactctatgaaatgaagaaaataacataaactaacatgcatggggcacaggtttcttcttgaatgccaactctgattagttgctaattgctacttgaagatctgtgcttagatccatctgtagcccctttcaccttagagtcaaatgcctggatccggtactgtcacccgcgggaacagactagggtagaaggataaaactatgacagcattgttctcctgagctacagccacatttcttttagtgttttccagatgtataaatgagcttttcctatctttttcttttttactttttcttctgttgggacactcccgtcagtgacatccctctgtattggttagttatttcatagattagaaagtttgtgggctctgcacaattcatccctttggttcctatagaaaagaaatgtttgttaactcatttaaaataaggactacttcacgcaaataaaaaccacttctgtctacttctctaaaaactgaataacctatgtctagtcttcattaaagaaagccaaaaaagaaagtttattccaacatattatcttcacaattaagagtatacagaatatgagggcaagaggactattccaatgatcactgtttgatttagtgaatctggctgctaaattgactctaagctattttctttacagtttgtcacatggtttagagtactttaagaggccagccttcccgggtgaaaagtacaatagtttctaagacagagtattcataaggtttgtggtgttaagaaatattacttttctgcaatctttaacaaatgtggaaaaggacattctgaatttataatgtaaatggggctggaattctttcttggaaaatagaatcaataaacatattttcagaagtaaaatatattgattgagaactattgtctaaatattccccaaaccctagatgttccttgtcaaatatacacacagaagatgtactgtgctatatagatgaggattgatgataggaatatgtagatctacacgttagggataattttatttcagtttaatgacatcagaattcaaaagaaatgaaacattatacatgtaacaattattgaaatgcctcccatgtactagcagctgtactggttctgcccttgggaagtttattagcatagctgggacacaggcctataaatagataattaaagagaatattgttaaaggccatataagggttacgcctagggggctgtcaggatatgtcataactccccacatttcaaattacaaaatttgctttactccaaaataaaggtagctttattgtacatttaagaaaacttgaaattgtaaagtgtttatgtgaaatgttaacttacagacttgatttaccaaatttatagcagtaaagtaagtcccatttttcagaatatgaggtatgtgatttcagctccttaaatgggatacctcacattattattacagtttaaaacctatgagattttcttttctatttttaatccttctcttaatgatctcatttattgtctactggaaatcaatttaggaaatcatgttagtccactaagcacttcagataaggctattccatgaagcattccaagattatcacaaggaattgctttcatatgccataaaagaagaaataagcagaatatggcctgctgaagaaggttacagttttacagcccctcccattgcagctcttaagtcactcagttacagttaactttggattagcactcacagattgaaagcaaaacacatcaaaacactcatcacgcactctgggcttgtggtgccacttgtatgtgtgtttctaaatcaatgatgagggtatcagaaccaatactggacatggacatggcaaattacagtgaagttttggacccaacttacacaactttggagtttgaaactatgcagattctatataattcaagtggtgagttatcatctgtttatagatgtaaagaaaagtaagtataattggagaaggtggaagactgagcttccaaaggtggtggctcaa

SEQ ID NO: 40671 - DNA, 2300 bp, Homo sapien
acaggaccctaaattgtgaatttcttaaaagggaattgagcaggtccgtagtgatttcattaaaaaaataaaaagaaaaaggaaaataaatgtttctacatttcttatgtagacgtcacaagcctgggctgtcatttttctaaaaagtatttatcatgcatttttaggtgctttattagagaatcacaagactggatctagcggctggctgcaaaatgtacaatttgatgacagccgatgcattttggttaataaattttatattagacaatttgttcctaaaataattaattggcacttccaaaatgttgctaaatgagagatgatacagcctataaatcacttgaatcaccttatttcttgcttttaagtaactaaatctgttctgtagtagtgagttgaagcttctcagtaggcaagcatgtttgctctacaatctcaggttcatagctctagattaccatcaatgccaaattccagagatatccagatccatttcaaatcagaaagttcaaaagaagggagagtgaccttacctgctgatgttatcaattatatgcaattattatatttaaccaatatgatgaatacaccaaataggtgttgcattacttccatttgtgaaaaacgtcataatttatgaaagatatttctgtaataacaggatgccacctgtaataacagaatgtttattagtgcacaaatgagcgttataaatgatgttgcttatctatggaacaaaacacaaaagacaacttattagccaaagataaattgcccagcacaatctcaatgagatgctaggtttgtcatgaaaaaaaaaaaaagctttttatttgcacagaccaatgcgtttataatccatttaaaataatatacttgccactaggtggctatttctgatcagatcattttaccattttaattacatttttaatatcctggctgcataaacaaagataaattacaaaccctgcacaatctggctgctagctcaggcatagtcagtaataatatcagcttttgtttgggcctcctctaattagattctgaaatctaggctttgtcaatcaataattttaattttagaatcgctttttgatcttgcatttcatgtttgtttgggaaaatgatcagtaggacaaagctgataatttatgcagaaacaatctctcagcagagctacatgcacattcctccccatcaacagaagcctgcagactaagcttgacacaggtctaattagcatgcagatatgtcgcctcattggcaattcaaattgcttttatataatgtacctcaaattgtgctactcaaacattgtatttgatttccaaagccccctgggcatcccataatgtctcccttcatcctgggtatgaagcatttattgaacaatctgctgagactggctgtcttttcgaaaacacccaaacatcgtattcctgggaccagcttttcttcttgtcagagagcaacttgttcttctgcggaattccttgtgccacatttgtaggtttagagatgacatgctacctcatgagttgcttctcccacgtggttgatctatagagggcttcactcctgtgccactcatttttaaagtgggggagaatgtctggtaagcacacattaatatgcagcacataaccacatctctgaatgccagtcctccattcttcattaaacaaaaatggctagattgcagggattgtttttccttcctcccacatacatatgcacacacactcacatttgctttcttgggcacacctacatgcacgcaaccacattcacgcgcatctacacacctatgcaagacacccacagcatatcattgtcaggatggagttacgtgtgaaagttgtctgctgcacacatgacaaataaggggattccagcatacactggggctttttaaaaattcatttttttaaccatgcagcaacaagtggcagaatcaatggtgtacagttattcagcaatgtaattcatttcactggctttggctcctagccagatccgccatctgtctctagctctccctctccccctctctctccctctccctctctttcgcttgaatttgtcctacatttcgtaatgttacgtgcctgccatccttatcctatgccagaggtacaacaccagtctcacccccattccggcgtggagttctctgagttcggtggcacttgggatattccacttcagtgccatgggaagaaaatggtaagcaaaaagcaaaaggaataatgcaaaaaaaaaaaaaaaattataatgttgtggtatccaattgc

SEQ ID NO: 40672 - DNA, 2300 bp, Homo sapien
aaggcaagacaaagaggatggcttaaggaaacactgcagggacttggcgtaaattagacaactaacggaagcgcagaataaaataacacctcaactgaagatttccttggaagaattagcactagctattggaagacaatggtggatttaatcaaaacagcaggcatgcaagaattttacccgtgaaccagaaaaaggagctaattataaccacctttttaatggagctaatttgactgaatggatgcaaatgtgctttatttatggatgaagaagcaagccttactgcatgatcttgggatcatcggatctgctaagctttgcagctcctgttaccttcagtacattttttatttccggagaaggtatttgtatgtaaacaacaactaaccatgcaaaagattcatcggaacaatatactgtggtatatgagatataatcataattttgcagcctctcaggatttcctctaacttggaggttttgcaacctttgtgtgcaatgggttatggtaaacaataaatgaatgatgctaaagtgttgtgatttttcaatgtgtagtttgttaattttagctttcttaacatattgattctgaagtatttgcaataaatccatatgaaagaaagggaattgttgggtggggttttttttttaatgcattttcagtcttcttagagatcggaatgtgtaggtcccaccagcccatgagctctataattataaaagaatggtaaaaaatttgacaatttgaagtactggttttataatgggaacaatgtgttataatcagcaaaaggagacttgttatgttttctctctgtgtagaatgttcttgagtggttaactcctctgttgctgatgagaagtaaataccaggactggcaataagcagagattgtaaggacaatgctttgttcctatgcatcctcctatttcaagctaaagtgcattttaagcatttccttctatttctattattttcctttctatttttgttcttttcatcatttttttctgtcttgcaatctacgttccctgagcaaccataggaaccaagttacattaagcttcaacacaaagaccttgtaagaataatgaatcctcatttgcatcgacatttgtattcagatttgccaggctataaacttggcagatcaagcggaatattaagtagaggcttccatggtaaattgtggctcttgaaattgctaactaccccctccccttttttttctctctatctgtggtggcaggtgaagtctcatgactacttgcttcttaagaagcgtattggctccttcatctttcattatatgatgccagtttcaagcagaagaggggcaaagccggtagtaggtgtgctagttgaaggtacaaaatgacatgtgactgtagcattaattctagagtccatatatcacaagaggtgtctttaagtagttgaagctgtaagaaaattaattctcatgtgtgggctaaggtttgatctttctggtatgttcaaaacgcattaacctcatgaaagttcacactcattttttaaagcttctaaaggttggaggaggaccaaggtagctctttactcacaaaataattcagttacaccattctgagtcatcgtcactgatctactcatgcccattcttgaaatattttaaatgcctcattctattaagcctccatggattgactgacttaatccttagttttgcttgattctgaaatggtaaaataggaacagttatacttactgctagcaaacttataaattcagcagtatgacctataaggtcatttctacaacacagccaacaatggggtgaaaaatgtagactttaatttccatgcttggtccaccctatgtgatgccaaacaagtgagtaattggaaacatttgtgcataacttaatttttcatgcattaccccagtgtttcagatttctgtaaacagagcctaaatctatgacctattaacaaactctcacttcttgccatccctttttctctctagaacttttcactagtggggagcaacaaaacatattagaactaacaaacttacaatggacatttaatagtggttttcctttctattctattttttaaaatgtaaatggagtaaatgataaaatgtagactgaatttatcataaagacattttcttttggtatactgcaaggaactatgaacttttagtaactactataagcaactgacaggtaagtcttactctagattgaggtaaagtttaattgcatatggaaaaaatgggagaatgtttcatgaaagatgctata

SEQ ID NO: 40673 - DNA, 2300 bp, Homo sapien
tgcacgtatgtttcttaaggcatatggataagccccactgaggtgcaatcagatactgctagcaaattggtgatacaattgctgtgtaaaggtggggctgtaaacaaagtaactttaaaatgttagaaagctttccactttcaacaaatttcttcccaaagaagtttaaaatcgaataaagtctttggagagacagatgattttctttctgttaacatttagtagccttggtttctaaaacactagtacctgccctgactctggatccctaaggtggtgatttgcttttttctcttaataaagaccatatctaggggtttttttctccactccatgcctctggactttcattgtaactttagccagctgctgaaggcaaccagctttcctgatctgggcctaggtctgcttttttgaggactgtgcttttatcctcccaggtgttttgtttggtttttaatccatttgcatcagtcctaggattttccaaacgttccctgataatgcaaggtttttggcctggaaagatgcatttttgcagtctctgttgttccaaatacttgtgcgataaatctttctgttggtatttggtagatttggtgcttaaggcctaagacaaggttttgaagcagatcctggcgatccagaacttcaaaggcctgtcaactcaaaggcagctgacacatcacctgtccaggaaactggacattgcaagtatttcctgtttttagttcatttgatttgttattcttactttctctttagaattcctatttttgaaatattacatagatggtgtctacctgtgacctgtagtatagtagtgcgaagtgcatcaagatgctgagtagcaatgcatatatatatatatatatatatatatatatatatatatatatattttttttttttttccatatatatattccaaattcagtagggggtatttaaaagtatgtctattcctagttttagttaattatcttttaatgaaagtgtcactcatattcacatctgtaatattggaaagagataattagattttcaaatgagaatcagccaccttaaattttgcaccagaaaataccaagtatatttcattctaatgagatctgtagtggggttttaaaattcatcataatgtgcttcaagaaagataactcaacagactcaaaagatgaaaggtttttcttttctaagtcttcttaaagttattacattgaacttatgcaattctgataaaatattcaagaatattacataaaggctagaactgtaccccacccccccatcattcttgcaaccgtcacttattctcatttggaagttttctttgactaaccgcttccatctcccataccctgggttttctctcctgcgtatacaagtgaaggatacgtgtttaaatagagtgcctaaggatccagagtgcaattcctcctttgaaataggctgggctgagcggtgtttgcacacagccaggcaccctttatttacatatatctgcatatttgctcaggcccccgcatttcgccattaaagtgcattcatgtgcacagcagaataaactaggcagagaaaagctcttcattaccctaactcatatttctgcttaaagctccctagtaaacaaatctctggtccgataataattactttgcctcattaaaataaaaaaaaaatctcgaatggttaaagggccatgctttggcggtatctatgttttatttctttccccttcttgctctgtgtgtgtctgtgtttgtgtgtaagagcgcgtgtgtgtctaatgaagtttgggagtcgcgcgcaggggcgcgtagggtgcgagacccggaggtccccatcccctgtcctctccgcggtcgccgcatccggggctccagccgcagcgctgggagctttggaagccgtgaggctccggagctgctctgagtccgggctgcgcgtcatttgcagtctggggaatgttgatcacctcactaattacacctctctctcccccctctccctctccctctccctcgctctcctctctcattcccagagtgcatatcgggaatagacacacaaagacatgcgcactcaacttaatcagccatttttttaaacagggctaaaacgataataattagcagaataaagacatatcggattttcatttcctttcctccttttcccaaccccttcacaaccaaacagcgagaccgcggtcggcacatgctttaactcctcccggacccccgaggaccgctccatgccccccactttctgctccagcgtttttattttcacccaat

SEQ ID NO: 40674 - DNA, 2300 bp, Homo sapien
attttaaatcatccagcctcttctaatagacttgagacttattgaggtagaaaccataaaaaatgaaggagggaaatttaatccctgaaatattgatttgcacattaatatcatataggcagagggcaatttggcttcgtggaaatgacacattgtcgacccttggtgaagtcagagccaatctaactgctgaacatgtctgaatctcaagagttattaagggcttcccttcttgcctttatgacttttcttcagcctaccaatgcaatcttaaatgtattatctttaagaaataattgtaaaacctcaggggttttccagttaatggaggggaggccaaaccacatcagattctgaaatgcaacattaaacccttgcaatcaacaaaaccacctcaattctcatccatccagtgcaggatctaatattgttattagagataatcaaatttcattgtgtaaatttaggctcatggtcagaatggaagcagtaaattctgcaatattaaacagtgattttctcagcctcctttatgttttcctttgctcatgaagaatcttttaaaataatccaactagctcaaaattaatgaacagatttgggctcatctgctaaaaactgcaaaagattacaaaagcactgaacatgtttgcctcatttttaactttaagtggcaactttcacttcatagaaccagagtccactatccctgtctaaccccacagttggtgctattgctttgacttacacagctggtttacctgacctttctttgttccttgggtacatttcacttttcagatttatgatatttcccccatatttcattgaccctatcttcattgccataaacatgaaaacacctaaatatgagtttacttttttaaaaatccaaaatcaaccagcaactgaataaaaacacagtggtgctctccccagtttatgccataaatattaaaaccattcaaaaaaagaactgtataaaccttatgatccccacactgaagccaggtgcaagaggttaaaacagctggctagccatcttttatttttgtgtgccttcctgctgactgaaaccacaaaccttgaaaactatcaaatattcccttaaggatttttttttttaagatgaggaaggaaaaaagaaaaccttcattctctttaatatgctcttcagtggaaaaggaaaactccaaaacacagtcagtcacagaggtagtgaaataattccgaatatctcctttctgttttatttaaaccacccttttcagcaatttctatacacaattgtttttagtcttcagttagtaaagaaacagaaaaaaaaaaaccaaaacagaaagaaagtctgagcttgctctgtcagttttgccagtaaatacaaagtaaaacaagtgttgatggcaccgagagtgttacatacccgggctgtgtttttgcattgctctcaatggaagcgatcgatgcccgtgtcactgtcgcgtcccaatcgcagccaagtctcagccttaatctaagcaacacccgaaaaggcagcggcagccgcagcctctctctcactcttccatccatccacccaactaaaaatataatactacatatgagctttaaccactccacgtttatagggatcaagccactgaaaatccaggagaacacaataaaaaaaaaaaaaccctcctctgtctcttgtctcttctctccctctctctctctctctctccctctctccccccctctctctcttcctctctcctctctgtctctctttttgccatctacatgatccttgattaaacatggaacagagttaataaaaagggtgggggggagactcaaggagaggaaatgcaactgtcagaaatcaggacggccagatttcctggtgaacctgcctctgtctgagtcagtgtcaatccaccatcttctgccagtgaacttgtctttgggtttttgtttggtgtgtgtgtggggggggatgttgttgtgtgtgtgtgtatgtgtgtgtgtgctttttttggaaggggggaggggaaagacaaagtgggggccggaggtggggggaagagtagggagaatgtgtgtctgtgagtgtgtgttgagtgtgagtgtgtctctgtgtgtgtaggggtcgaggtggggggggtccgtgtttgcgatctgaacctttggtacctacaaggagggtgtctcaccgaacggtagctaaaacctcaccagaaccgcgcggaagtgagaagtcgcggccaaaggcgcccgcagaagcctcctctctgggccggaccccagcccgagcggcc

SEQ ID NO: 40675 - DNA, 2300 bp, Homo sapien
tctagtctctttctgactccctcatttccttcaggccagcaagagattatattttaggcattttggctgccttcagtatgaatacgttatttgtgcagaattggcaaatgcaaagataaacattaatgtttatggactaattagaaaattattaggttttcttacttatgattatcagattatttcaggtggttttgaaagctgtatgcatgccataaggataattaacctgaagctcatcaatgattaaaattaaaattacacactagggtttgtgatgtttgatttgtgagcaattagaatgtcagataccaaaacgaattttgaattcattttcagggtcccatctcagataccaaaacgaattttgaattcattttcaatctatgcagatcttttaatgttttctaaactgatcactttctctctgattggcctgacaagattggatttgattacagtaaagagagtattaataagctattctttatacttcatatgccagtgaccttcactgatgtctttcttgtataagaacattttaaaagggatttctaaaatgcttagtaatattagtgaacccaatattctgttttgttttcttctagttctctgccactctgaagactgtgtaataaggtatagggatgggaggagcatccaggctgagatagtacatatttatcataaccaatatgatatgcaatgtaatatagcaacattaatctttcttgttttagaaattgtcaggatatgtgaaagtgttgatacttttaaattaaggtgctggccttgaagttatgagactcttcaaatttaagatttgaaataaggttgcttacctgtttcatgaaatcaagacagtgcctatgttacaggccgaaaataaacacaagtttcagaccactccattgttgtgtacagtgccatcattctgcaaactgagagatctgcagggactcagagaagcttaagctgtaatcaaactgctattacagtagctgaggttctcaggcaagacacacacacacacacacacacacacaaacgaagagaatgagactttttaccagtgtatgcccaactttcactagtactttaccctgctgtcagaaactgatatggcttttatggagtgcatcttgtcctcaacaaatagggtttctggtctaagacgcctgcttgcaaaaaaactttaaaaaaaatgaaggattttcattgggagtgcttgtgtgtgatttgttaagccaggggagatgtcgattgaggcagtggttgagagatgggcaactcaccaggattggtaacatcaaaatggtatttgaaatggtgttcattacgcattgcagtgaaaaaaactaagtgaatgtgattgtcccctaggatgataggactggttgcagtaaatattaatttctgttctgttgcccattgaggtgactgaagtgtggggaggaattgtgattggtgcttaatcagggccagccagatacctgctgagagcttttgcacaaggaagatttgtagtaagctgatttactggcaaaatgaaaaccagagaagtttggtcggtgctgcctgtggctgtaatatttctaattttaaggtttctttatttgttggtctccctcccacactcatctccccttctagtcactgcctgataaagaaaaggtaaatttttagaattataagttatttctgttgttctttcattccagctgctgtatacaaaagctatttacattcctattactgcaaagggggttttagagtggtcacgtatattgtgtatttttttggaaaacaggaatgaaaaaactcaggattattgatataaattttagacttcttatgaatgctcatagcgactatgaaaacaccttggatgtctaggcatgcctgtgatagctatctacattattttgctacatttatacaaagtccgtctgtgatagataggcacgccggttttaagtttttccccttacctttttagatagtcacgtttacagcagctgtaaattagtgatgggctattagtgagctgtgtcattatttaataaaaatggcttctctcaccttattttttatccaggtccctgacaggctggatgaaatgagatccccatgtagcaattgccatggaaacctgtgactcccctcctatctcaaggcaggaaaatgggcagagcacatcaaagctatgtggaacgacacaacttgataatgaggtgccagagaaagttgcagggatggagcctgacagggaaaacagctccacagatgacaacctgaaa

SEQ ID NO: 40676 - DNA, 2300 bp, Homo sapien
cacacaaacgaagagaatgagactttttaccagtgtatgcccaactttcactagtactttaccctgctgtcagaaactgatatggcttttatggagtgcatcttgtcctcaacaaatagggtttctggtctaagacgcctgcttgcaaaaaaactttaaaaaaaatgaaggattttcattgggagtgcttgtgtgtgatttgttaagccaggggagatgtcgattgaggcagtggttgagagatgggcaactcaccaggattggtaacatcaaaatggtatttgaaatggtgttcattacgcattgcagtgaaaaaaactaagtgaatgtgattgtcccctaggatgataggactggttgcagtaaatattaatttctgttctgttgcccattgaggtgactgaagtgtggggaggaattgtgattggtgcttaatcagggccagccagatacctgctgagagcttttgcacaaggaagatttgtagtaagctgatttactggcaaaatgaaaaccagagaagtttggtcggtgctgcctgtggctgtaatatttctaattttaaggtttctttatttgttggtctccctcccacactcatctccccttctagtcactgcctgataaagaaaaggtaaatttttagaattataagttatttctgttgttctttcattccagctgctgtatacaaaagctatttacattcctattactgcaaagggggttttagagtggtcacgtatattgtgtatttttttggaaaacaggaatgaaaaaactcaggattattgatataaattttagacttcttatgaatgctcatagcgactatgaaaacaccttggatgtctaggcatgcctgtgatagctatctacattattttgctacatttatacaaagtccgtctgtgatagataggcacgccggttttaagtttttccccttacctttttagatagtcacgtttacagcagctgtaaattagtgatgggctattagtgagctgtgtcattatttaataaaaatggcttctctcaccttattttttatccaggtccctgacaggctggatgaaatgagatccccatgtagcaattgccatggaaacctgtgactcccctcctatctcaaggcaggaaaatgggcagagcacatcaaagctatgtggaacgacacaacttgataatgaggtgccagagaaagttgcagggatggagcctgacagggaaaacagctccacagatgacaacctgaaaacggatgagcgcaaaagtgaagccttgctgggtttcagcgttgagaatgcagctgccactcaggttacctcagcaaaggagataccctgcaacgaatgtgccacttcttttcccagtttacagaaatacatggaacaccactgccctaatgcccgccttcctgtcctgaaggatgacaacgagagcgagatcagcgagttagaggacagtgacgtggaaaatctaacaggggagatcgtttaccagcctgatgggtcagcatatataattgaggactccaaagaaagtgggcagaatgcacagactggggcaaatagcaaactcttttctacagcgatgttcctggactccctggcatctgctggagagaagagtgatcagtctgcttctgcacctatgtcgttctacccacagatcatcaacacttttcatatcgcttcatccctcgggaaaccatttacagccgatcaggctttcccaaatacctcagcattagcaggagttggtcctgtgttgcacagtttccgtgtctatgatctccgacacaagagagagaaagactatctaaccagtgatggctcagccaaaaactcctgtgtgtccaaagatgtccctaacaatgtggacttgtccaaattcgatggttgtgttagcgatgggaaaaggaaacctgttttaatgtgtttcttgtgcaagttgtcttttggttatatcaggtcatttgtaacccatgctgtgcatgatcatcggatgaccctcaatgacgaggagcagaagctcctcagtaataaatgcgtctccgccataatacaggggattggcaaagacaaagaacctcttataagctttctggaaccaaaaaaatccacttctgtttatccccatttttctactacaaacctcataggacccgatccaaccttccgcggtttatggagcgcttttcatgttgaaaatggtgactctttgccggctggctttgccttcttaaaaggaagcgcgagcacctcgagctcagcagagcagccgctggggattac

SEQ ID NO: 40677 - DNA, 2300 bp, Homo sapien
ttaccttttagaaaagggcccaattttacgatggaaaaattccttgatccatctcgtccatataaatgtacagtgtgtaaagagtcattcacccaaaagaacattctcttggtccactataattcagtttctcacttgcataagctgaaaaaagttttgcaggaagcctccagtcctgtcccacaagaaaccaacagcaacacagataacaaaccctacaagtgcagcatctgcaatgttgcatacagccaaagctcaacattggaaatccacatgaggtctgtgctccaccagacaaaggctagggctgcaaagctggagcccagtggtcatgtggctggtgggcacagcattgcagcaaatgtcaacagccctggccaggggatgttagattccatgagtttagcagctgtaaacagcaaagatacccatttagatgccaaagaattaaataaaaagcaaactcctgatttaatctctgctcaacctgcacatcacccaccacagtcaccagcacaaattcagatgcaactacagcacgaattacaacagcaagccgcattctttcagcctcagtttctaaacccagcctttttgcctcattttcctatgaccccagaagcactgctgcagtttcagcagcctcagtttctctttccattttatatacctgggacggagttcagcttggggccagatttgggcttgccaggctctgccacatttgggatgcctggcatgacaggaatggctggctccttgcttgaagacctaaagcagcagattcaaacccaacatcacgttggtcaaactcaactccagatactacagcaacaagcacaacaataccaagccacacagccccagctgcagcctcaaaaacaacagcagcagccaccacctccacagcagcagcagcaacagcaggcaagcaaattattgaaacaagagcaaagtaacatagtgagtgcagactgccaaatcatgaaggatgtgccatcttataaggaggcagaagatatttctgaaaagccagaaaaaccaaagcaggaatttataagtgaaggtgaaggactcaaagaaggcaaagacacaaagaagcaaaaatccttggaaccatccatcccaccaccccgaatagcttcaggggccagaggaaatgctgccaaagcgttattggaaaactttggttttgaactggtcattcagtataacgaaaacaggcagaaggtacagaagaagggcaaaagtggtgaaggcgaaaacactgacaaactagaatgtggaacatgtggtaaattgttttccaatgttcttattttaaagagtcaccaagaacatgtacatgggcaattttttccatatgcagcgctagaaaaatttgctcgtcaatacagggaggcctatgacaagctttatccaatttctccatcttctccagaaacgccgcccccgccacctcctcctcctcccttgcctccggctcctccacagccttcttctatgggtcctgtaaagatccccaacacggtttctactcctctgcaagctccaccacccactcctcccccaccaccaccacctcctcctcctcctcctcctccccccccacctcctccaccttctgctcctccacaggtccaactgccggtttctctggacctgccgctctttccttccattatgatgcaacctgtgcaacaccctgcgcttcctccccagcttgccctgcagctgccacagatggacgcactctctgcagacctcacccaactttgccagcagcagctcggattagatcccaacttcttaagacattctcagttcaaacgcccacggacaagaattacagatgatcagctaaaaatcctgagggcttattttgacattaataattctccaagtgaagaacagatccaggaaatggcagagaaatctggcctctcccaaaaagttatcaaacactggtttagaaatacgctttttaaggaacgacagagaaataaagattcaccatacaacttcagtaaccctcctataacggttttagaagatatcagaattgatccacagcccacctctttagaacattacaaatctgatgcatcattcagtaaaaggtcttctagaacgagatttactgactaccagcttagggttctgcaagacttttttgacacaaacgcttacccaaaagatgatgaaatagaacaactctccactgttctcaatctgcctacccgggttattgttgtatggttccagaatgctcgtcagaaagcacgaaagagttatgagaa

SEQ ID NO: 40678 - DNA, 2300 bp, Homo sapien
tgcagcctcaaaaacaacagcagcagccaccacctccacagcagcagcagcaacagcaggcaagcaaattattgaaacaagagcaaagtaacatagtgagtgcagactgccaaatcatgaaggatgtgccatcttataaggaggcagaagatatttctgaaaagccagaaaaaccaaagcaggaatttataagtgaaggtgaaggactcaaagaaggcaaagacacaaagaagcaaaaatccttggaaccatccatcccaccaccccgaatagcttcaggggccagaggaaatgctgccaaagcgttattggaaaactttggttttgaactggtcattcagtataacgaaaacaggcagaaggtacagaagaagggcaaaagtggtgaaggcgaaaacactgacaaactagaatgtggaacatgtggtaaattgttttccaatgttcttattttaaagagtcaccaagaacatgtacatgggcaattttttccatatgcagcgctagaaaaatttgctcgtcaatacagggaggcctatgacaagctttatccaatttctccatcttctccagaaacgccgcccccgccacctcctcctcctcccttgcctccggctcctccacagccttcttctatgggtcctgtaaagatccccaacacggtttctactcctctgcaagctccaccacccactcctcccccaccaccaccacctcctcctcctcctcctcctccccccccacctcctccaccttctgctcctccacaggtccaactgccggtttctctggacctgccgctctttccttccattatgatgcaacctgtgcaacaccctgcgcttcctccccagcttgccctgcagctgccacagatggacgcactctctgcagacctcacccaactttgccagcagcagctcggattagatcccaacttcttaagacattctcagttcaaacgcccacggacaagaattacagatgatcagctaaaaatcctgagggcttattttgacattaataattctccaagtgaagaacagatccaggaaatggcagagaaatctggcctctcccaaaaagttatcaaacactggtttagaaatacgctttttaaggaacgacagagaaataaagattcaccatacaacttcagtaaccctcctataacggttttagaagatatcagaattgatccacagcccacctctttagaacattacaaatctgatgcatcattcagtaaaaggtcttctagaacgagatttactgactaccagcttagggttctgcaagacttttttgacacaaacgcttacccaaaagatgatgaaatagaacaactctccactgttctcaatctgcctacccgggttattgttgtatggttccagaatgctcgtcagaaagcacgaaagagttatgagaatcaagcagaaacaaaagataatgaaaaaagagaactcactaatgaacggtacattcgaacaagcaacatgcagtaccagtgtaaaaagtgcaatgtggttttccccaggatctttgacttgattacgcatcagaaaaagcagtgttacaaggatgaagatgatgatgcccaagatgaaagccaaacagaagactccatggatgccactgatcaagtggtatacaagcattgcacagtgtctggccaaacggatgcagctaaaaacgctgctgcccctgcagcaagttctggctctgggaccagcacccccctgattccatcacccaaaccagaacctgagaagacttctccaaaacctgaatatcccgcagaaaagccaaagcagagtgacccctctcccccttctcaaggcaccaaaccagccctgccattagcatcgacttcctcggacccaccacaggcatccacagcccagccacagccacagccacagccaccaaaacaaccccaacttatcggaagacctccctcggcctctcaaacaccggtcccttccagtccactgcaaatttccatgacgtctctccagaacagtctacctccacagttactacaataccaatgtgatcagtgtacagttgccttcccaactctggaactctggcaggaacaccagcacatgcacttccttgctgctcaaaaccaattccttcactctccgttcttggaaaggcccatggacatgccctacatgatatttgaccccaacaatccgctgatgactggacaactgctgggcagttccctcactcaaatgccccctcaggccagttcctcccacaccacagcccccacaacggttgctgct

SEQ ID NO: 40679 - DNA, 2300 bp, Homo sapien
atgaagatgatgatgcccaagatgaaagccaaacagaagactccatggatgccactgatcaagtggtatacaagcattgcacagtgtctggccaaacggatgcagctaaaaacgctgctgcccctgcagcaagttctggctctgggaccagcacccccctgattccatcacccaaaccagaacctgagaagacttctccaaaacctgaatatcccgcagaaaagccaaagcagagtgacccctctcccccttctcaaggcaccaaaccagccctgccattagcatcgacttcctcggacccaccacaggcatccacagcccagccacagccacagccacagccaccaaaacaaccccaacttatcggaagacctccctcggcctctcaaacaccggtcccttccagtccactgcaaatttccatgacgtctctccagaacagtctacctccacagttactacaataccaatgtgatcagtgtacagttgccttcccaactctggaactctggcaggaacaccagcacatgcacttccttgctgctcaaaaccaattccttcactctccgttcttggaaaggcccatggacatgccctacatgatatttgaccccaacaatccgctgatgactggacaactgctgggcagttccctcactcaaatgccccctcaggccagttcctcccacaccacagcccccacaacggttgctgcttccctaaaaaggaaactagacgataaagaagataataattgcagtgaaaaagaaggagggaatagcggtgaagaccaacaccgagataaacgcttgagaaccacgatcaccccggaacagctggaaatactctatgaaaaatacttgctggattccaatcctaccagaaaaatgcttgatcatattgcccgcgaagtcgggctgaaaaaaagggtcgtgcaagtctggttccagaatacacgagcgcgggagaggaaaggccagttccgggcggtgggtccagcacagtctcataaacggtgtccgttttgccgagccctgtttaaagcaaagtcggccttagaaagccacattcgctctcggcactggaatgaaggaaagcaggcaggttacagcttgccaccaagccctttaatatccaccgaagatgggggagaaagcccacagaaatacatctattttgattacccatctttgccattaactaaaattgatctatcaagtgagaatgaattggcttctacagtgtcaacacctgttagtaaaacagcagagctgtcaccgaagaatcttttaagcccttcttcttttaaagcagagtgttctgaggatgtagagaatttaaatgcccctcctgctgaggctgggtatgatcaaaataaaaccgattttgatgagacttcatcgattaatacggcaatcagtgacgccaccaccggagacgagggaaacactgaaatggaaagcaccacaggaagttccggagatgtgaaaccggctttgtctcccaaagagccaaaaactctggatactctgccaaaacctgcaaccacacctaccacggaggtctgcgatgacaaatttctcttttctctcacaagcccatccatccatttcaatgacaaagatggcgaccacgaccaaagcttttacatcacagatgacccggatgacaacgccgaccgcagcgaaacgtccagcatagcggacccgagctccccaaatccattcggatccagcaatccctttaaatccaaaagtaatgatcggccgggtcacaagcgttttcgaacgcaaatgagcaatcttcaactcaaggttctcaaggcttgctttagtgactaccgaactccaaccatgcaagaatgtgaaatgttagggaatgagattggtctgcccaaacgcgtagtccaggtgtggttccaaaatgcaagggcaaaggaaaagaaatttaaaattaacatagggaagcctttcatgatcaatcaaggcggaacggaaggcaccaaaccagagtgtaccctctgcggggtgaagtactctgcccgcttgtccatcagagatcacattttctccaaacagcacatttcaaaagtgagggagaccgttggcagtcagctcgatcgggagaaagattacttggctccgaccacggttcggcagctgatggcacagcaagaacttgatcgtataaagaaagcttcagacgtgctgggcttgacggtacagcagccaggcatgatggacagcagttctctccacggcatcagcctgccaacagcctaccccggactccccggcctt

SEQ ID NO: 40680 - DNA, 2300 bp, Homo sapien
tttttttcctaatatttttaagtccacagccaagttctaataaagactcttaacatgtcactagaaatatataaattctaggtttaaaataactcatgttttgcatttacagaggtaaacatttactaagaagaaaatattctgtcttggttattatttacttattcactgcctctgaactgatatgaattagctctgagagagtaagagccgtgtctgttttctgtcttcacatttttatcaacactgcctagcaaaactcccgggcctcagaaagcttttgttaaataaatgaatgaaaaataaatatatctttaaaaaactggaaacaaagcttccctggaacctcagctcaccagctcatgggaaaattaagaaggtatactgtatctacaggttaaacattaaaatctagaacttattttaaacaatttcaacagaattttaactgttgcatgtttccccgcattcttaatgagattcattaaatatgattcaagtttcttgatatctttattattttcattcgctactgtgtgatgttcacatgacatacataaggctctatgaaccagaatttgctttctgaaaatgtcctctatgtcaatcaagtctttgtgtgtattttcccccgtccctctcaaaaattaagtgaagcacagcacatctgtaggctacctgagaggtgcagcgtggttggttttcttcacagttgctaaacgaaaggcctactcttcttcagtgagatttttttactctctagaacagcagtatccatagaaatataatggaagccacgtaatttaaaattttccaaaacattctcattttgacatgtaagcaatataaaattaatgaaatactttacattctttttcttttcagaccacgctttagaaatctggtgcatgttctacacttagagcagacctcagttcagactagccacttttcaggtggccagtgactactacactggacagttgcagctctagaaaatccactcccaaacccctaagtgaactacatactctatcaatttgtagcttctactctatctcatttgtaccattgtttcacaatttggatagcattagagttaataaattttattttagcaactctgctccatgggtagtttctgaaataaaaatacaagcaaaaaaaaaaaaactttcctaataacactggttctacagtataagctctccctcgaatgtctaatagagctttcgtagaagtgagtgttccttgtaggaacggtgagtcgagactggaggtaagaactaagacgttcttaaaccctactacgtgctggaatcctgaagtgcctgccatcattcaaacttaagcactaactctctagagagacactgccattcataccacagaacgagaaggcagtggcgatcctcaacggctacatgtcactgcctggtgagcactcttccctcagaccccattcccagaagctctgcctcgattccccaggggtaggcgagctggctgcccgaattcctaagcgttaccggggagatgtgagggcctccgggggcgggaaacctcaggccaggcgcgcgctggcccgctctacggggtctctcgggagcgctttgcagggcggatgactgacgggccagctacctgccttcctgagcctgcagagataaacagcctatcctccctgtgcacacaggccccgagggcgggcaggtctccaagcgcagcacaactgccccaggcccgacgcagccacctgcccgagggctccctccccaccaggccatccctcagccggtcctcctccgacagcgaacaaggaaccccggaggcgcggaggcgtctcgccgccacccggcggcgcctgccagaggcccttcgcgatgtccgcaagcagagaaagccctgccctcccaagccccggcttcccctaggcccctcgacacttgtagtgtcctcacttgcggcccctgacccggggctgaccggttcgtgactctcctgccaatcagagacagagttcttccggccaaccggccaatcaccgcgcgcgggtgtccgcttcggcttttcggcccttcggctcttcggcttgtcggcgttcgcggttgtttggccatccagtgccttcagcagcgccgctaaagcgcagttctcgttggtgtaactttttcttttttttttcagccacttccggctcctgcgtcgctccggaagcctgcgagttccggaagccttggtaatccagattcggctaggaaaagacaagctttccagagaatgtttcagagaaagttacg

SEQ ID NO: 40681 - DNA, 2300 bp, Homo sapien
agtgtggtatcctggatggatgcctggaacagatttaaggatattaggtaaaaaccagggaaacttaaatgtagttagactttatttatagttagtaataatgtatcagtatacattcattgattgtaacccaatgatatggttcagatttgtgtccctacccaaatctcatgtcaaattgtaatccccaattttggaggaggggcctagtgggaggtgacttgatcatgggggaggacttcccccttggctttctggtggtagtgagttctcatgacatctggttgtttaaaagtgtgtagcacctcccccttctctttctcctgctccagccatgtaggccctgcctgcttcccctttgccttccaccatgattataggtttcctgagacctccccaatcatgcttcctgtacagcctacagaaccaccagcccttctttataaattacccaatctcaggtagttctttatagcaatgccagaattacaccaaggtaccttactattgtatgatgtcaataggagacactgggaatgggatatatgggaacaccctgtattatttcttcaatttttctggacaccaaagctgaaaaatatagtctattaaataaaaaaagtagtgatgatttgattataacatcagtgtagtgatagagatatctataaaaacagcaataaggaattagctgttgtttctattggaaacaaagtcccaggtactcctaacattcttgtggtttgttgcctacattatgtttaaaggacatgctaaatgctaaatttcagttagaagttagtgaaactaaaaatgagatttttcccattatacttaatctgtataaaaggagtatatgaatagaattccatttatacagattaagaatctcctgctctatggtaatattaacgggctaatgttatgaaagtgagtctcagagcgatgaattaagctgttctagctttcaaagagcatatattctatgaccaagaattctaactaagttttgttggaaagctgttggctacattatcacctaactttgggactgatagatggatggaaacatctcatttagcaaaggtgcttccctggccttgtgcaattgcactgtttaggttgctggacaaatccatagtgtaaagctggcctgtatcaagtgacggtcaattcaaacagcaaggcaagttaaaagagggaactccattccacagaaccctagtgtcaaggaacctcccgactggaaaatgactcaacagctaggcggaaaccctggctcagctacaaagagagcaaatttagtcccatttttccttaaacattcaaccctcaaacctgaagagatttgggaaagaagcaaaacgggagggtgggggagagagaacagtcttgttaacagctagtgttaatttaaaaagagaaggaaagggcttatatgaatacatgcttatttcattcccaaagcaaattttcataaatccttagggaaagagagatagtcatttgctaatgtagactctgctttttgattcccaaatgttacagctgtcaccacaacagtttgcccaattatgtggcagggaggggagggggtccagagcaaaggaagtaggaggaagagatgttagagggaacatctgtgcacaagtgcaccataaacacaacaaaatcatggggccaccccactgtttctttgagcgctttctctggttggccccacttctccagtcttttaggagattcccgttctattacgtaggtgagagggcgaaaggttctagctttcaaaattgtgagtggtttggctgtgtgcatacgtgtgtgtgcgcgcgtgtgtgcgtgtgtgtgtgtgtttgcgtgtgtgtctgttggcgggggcgggggtgatggagagagctatgaagggcttagaaagcttcattaccaatttaaaatgtttttgtagtgcttgaatgtttatcttaaaagacaattcctgctctcaaattcagccaaatgaacaatgctgataaggaagatgaagagggtgggaaacccacaggggcaaatggaacagtccatgcagccggggtgacgggggagcgctcggaggaaggacgctatgcagagaaagcccccctggctcttctctctcaatccataatccagcgatgctgcagctgtaaaagcattaatagaaaatcaatccacaacctcgcggggcagcgatcgtcgagcgccgtttccaggctgccttccctggggtcgggagcggccccgctccccccgtggctggcgcggaatgtggtgatccgtcc

SEQ ID NO: 40682 - DNA, 2300 bp, Homo sapien
tccttgatgaattgagtcccaatattagtaatattcatcactttagttattaatgttcatatgtttaagatattttaatgtaaggtaaatcattactcaagagaatagctaagctggctttgtcaaagatttcaatgagctaccagtacatcttaatcagaattaactttcaaagacagggagagcaatgattcaaggtgtgaatagaaaaacgttttctttttgtacaaaatgttactgtcatttgttctggtggggaaaaagcttagagttaacctaatttacattttatgattagtttaaagaaagtgttatataaatttagaatgaaaataaatcagttttctttaaacagaaatgcagatttaaaaatgtctttttatgcaactgccagaaggaagcactgttttgtctgcaaattcccagattctgctctagttttaaaggctaacgactgtgaaatgcaaatataatcagggttccagatgtggcaatcaggaaatgatttgtgtaccagctatttttaacaaaaggcttgcaaacatgataaatgaatagtgaaagtcaaaatgatatcaaatatgcatgaaagtagcatatatataattataaattacctttaggaattaattataacattacttcagagagattcgtatgatttattcctatggagaatgtagagtcagatgatctaggttatcactttgggactaggatatcaccaaaaatctttatgttacaacatatgtgatagaaatgaacacaattttacaggaagaactaatcagatgaattcagatttcatttgtactttggtataaatagatcaaactgggttttctcaactagatgtataataactacagataaaaagaactatgctggtttgccagaatgtaaaacactggcgaaagtgagggggctgtatcaatgagctcgggaaagcagctccatagcctctatctccatcacacagacatttagttcagatttgaaagagaacttgagatcagtcatttcaacacatctccaaaccagttatgttcaaacatgaagggatggatagatatcagtctattatttttaaactgcataaaggtataactcttcagttttcatcaaaaccacactttttaggttatcagggtccacagttcttaagcaagcaatgcatgcttagtgctatctccctgctataaatagcttctcagtcttcccaccactgcccatcccttctctccttaatgtcttggtcaaaaccatcccccaggaacccctttccacttaattgctgatcatgttgatgttttgatcaccttagctacttcctagagtcggtagtatatatgtgagatttaactttaaaaatacccataaagggctgggcacggtggcttatgcctgtaatcctagcactttgggaggccgaggcgggtggatcacctgaggtcaggagtttgagaccaccctggccaacatggtgaaaccctgtctctactaaaaatacaaacattagccaggcgttgtggcgcatgcctgttattccagctactcgggaggctgaggcaggagaatcgctggaacccaggaggcggaggttgcagtgagccgagatggcgccattgcactgtagcctgggcaacagagcaaggctccgtctcaaaacaaacaaacaaacaaacaaacccataatgtattaaatgcacagtttctaacataatatgaatatccagtaactgctgactagcattattattataacatttacattaaaactaatctgcactggtttaagtatcgcttaatgattgattctgtttctttcacacacctgttcttttactccacctgatgtaaaggaaatacgtgaacatttgttgattattaatatggtttggctgtgtccccaccaaatctcaacttaaattgtatctcccagaattcccacatgtcacaggagggacccaggtggaggtaattgaatcgtggtcgggcgggggggaagggggtggtcttgccgtgctgttctcgtgatagtgagtacctctcacgagatctgatgagtttatcaggagtttccgcttttgcttcttcctcatcgtctcttgccgctgccatgaaaggagtgctttttgcctcccaccatgattctgaggcctccccagccatgtagaattgtaagtccaattaagcctctttttcttcccagactcgggtatatctttatcagcagcatgaaaacagactaatacaattacctacagtgagagaggcagtgaaaggtatagaattagtgg

SEQ ID NO: 40683 - DNA, 2300 bp, Homo sapien
acaaagtttcactctcgccgcccaggctggagtgcaatgggcgtgatctcacctcactgtgatctccgcctcccgggttcaagtgattctcctgtttcagcctcttgagtagctgggattacaggcacccaacaccaggcctagctaatttttgtatttttagtagagacggatttcaccatgttggtcaggctggtctcagactcctgaccccaggtgatccacccaccttggcctcccagagtgctgggattacaggcgtgagccaccgcttgttgatttaagctccttttcagttctggatattagaattttgtcagatgcataatttgagactattttctgccattctgtggtttgtttgtttactctgttcatagtttcttttgctgtgcagaagctctttagtttaattatgtcccatttgtcaatttttgcttttgtggcaattctttttggagtctttgacataaattatttgcaagggcctatgtccagaaaaatattccctatgttttcctctagagtttttacagtttcaggttttacatttaagtctttaatcaattgaaattgacttagtccttgagttgatttttgtacatggtaaaaggaaaaggtccagtcttcaatctacatgtggctagccagttatcccagcaccatttattgaagagagagtcctttagccattgcttgtttttgtcaattttgttgaagatcagatagctttaagtgtggctttatttctgggttctttaacctgattcattggtctctgtatctgtttttataccagtatcatgctgttttaggttcccatagccttgtagtatagcttaagtttgggtagcgtgatgcttctggcttttttctttttgcttagggttgctttggccatttggactcttttttggttctttacgaatttcagaaaattttttttctaattctgtggaaaatatcgttggtagtttgataggaatagcattgaatctgtgaatttgggcagtatggccattttaatgatagaaatgaaagggttttgagtaatcagtttttgtaccttttgacattttatttccaagatttaatcaagagtgtttgttactcctctcaagtaatgacttatcaaggggaacgtggggagctgtttttctggactggaagcgctatttgatcactgaaaatatttagaattgctggtgcatggtgcatagtggtaataaaaagcaaactgaattttggcccatttcattaacagactgtacagacaatgctctcacttagtgcttacccctaggatgaaccactttttacttagcaccccccacctgatctcaagttctctctggagttgaagaatgactaaaatggtattagagaaagaaaattttataatgtaaactaaatgtcaacaaactatggcatgcaggccaaatctggcccattctctatttttgttagtaaagtttgtttattacatttgttttacgtattggctatggctgcttttgtactgtaaggacaaagttgagtagttgggatagagatcatatgaccctcagagcctaaatatgtactatcaggcttgataatcctacctaaatgcccatcaacagtggacgagatcatgtctgttgcagcaacatggatggagctgaaggccattatcctaagtaaattaatgcaggaacagaaaaccaaacactgcacgttctcacgtataagtggtagctaaaaactgagtacaaatggacacaaatataatacataatactgtatattatgtaaaaatacataataatatgtattattaattattaataataattaatattattacatttaatattaatatattaatattaaatgaatattaaatattacatttaaatatgtaaaaatgtacatatttaaatatgtacattaaaggttcccagacctttgatctaaatacttaggaccagaaaaggcattacttgttttgtgaacttgtaaacaggacaattgtttcacattcatatactaagtcggtagttaaatgtttagcattgactaccattatattcacctattaattttcctttcttttgtagtccctgctatgtggatatttggtagcaatgactgatgtggaaactacatatgcagattttattgcttcaggaagaacaggtagaagaaatgcaatacatgatatcctggtttcctctgcaagtggcaacagcaatgaattagccttgaaattagcaggtcttgatatcaacaagacaggtaagtcatctggcacacatttc

SEQ ID NO: 40684 - DNA, 2300 bp, Homo sapien
tttatattcctatgtgatatactgttattaatgcatgtggtgccatgcttgtctttaaatatataaatagtgctaaattgcaaagtcatatggagctttggatttagtttgacttcttactactgctttgtctgctatattcaaacccaaaggcattcccaagctagggagataaaaattaattttctaaaatgtccacatcctatacattttgcttattcatggcatctttcaaattttattttagtttcctttatttgccaagaatacatatggatttgaatttttaaggagagaaggaaagggtaggaaaccagggccttgggtttagtaacaggcattggatgtctattaaccaactattcttacgctaatggctttgcagctcctattctcccatttgatcctcaaacaattctattagagtggtatttttatccaatttcacagattaaaatataagcactcaataaaatataacctttagaagcttaaaaagctagtaagtgatgaactgaggatttgaacccatgtttgtcaccaaggagctttccagggcacatgtcataaaattagagccaactgcagagctgtaagggaacttttagagatgaacttcttcagcctccatattttacagaaggaaactgaatcccagaaggagaaattgccgttctcaaggctccctggatgggtaataacacagatatgagtaggtcacataaagtatatcttttttaaaaaaaagaaattcaattatgtcttatttggggggtatatttcccagaagatatttttctggcatgtggtctgtaaacacagcatgattcatattttttatgtttcatgctactcattttgtttaattaccaacaaacatggggactttggctttttgacttatttgcaacaagcatgaaattgttaaatttaccttttatcaattgtaatcatcctatgccaacatattatcataaattcatagaaatatttttaaaaataaataacagacattgaaatccaattcttagataatactcccagaacagccaatggtaaatgccctatacttgagtcttacttagatgctgtggtaatgcaccattttagaagatgaatgatactgctatttctcttcagggaaacaataatggataaagaaatgtaactgccgggcagcaaagcttctaagtgaaacctgtagtagcagtagtagtagggagaaaatgtgtagtcatcaagtgaaaataggaaaggatctatgatttatgatgtcttaatagaccctaaattgttctttaattacaagagtggcagtctctgaagtcatttgtgagcttgtatgacttttgtatttagcaatgttgcatgctcacataattgaaaattaaaagtaacacatttttctgaaatgtacacagtctattaagagtatttattgaattcacactatgtactttgtgctagagagtgctgcaggtgataaaggagaaattatatgcctcagtcatcccgcagtggacaaacccaggactccagcttcactctttcctggcctttattctaatcattttcaactccattccactcgagtagcccacttcctagtctttgtcatctaccagaaccatcccacctcctagatcttaacccccaataccatgcctatggttcttacttgctcatctgtagggagatgacattcagtcaggagaaagacaggtgtttatcagaattcttggaaagtttttacagcacccaccctctacccaccccccacatagatacattcatacacaaacactctctcttaaaataactttctgcatgactctgatacctttcttccacccacctgcacccccaccactttagaaccactgatctagaagttcaaggcttcctgatgcacccaccctgcccactccactgcaaggctttgaaatgagtcaggaacaaaatgcaatcctcacattactgcattaagggtaatgcacatggttttactgcattaagggtaaatttttagggtaaagaagcaaagagagctcttcttttatcttagtgtttctctctttccatcattttatttttaccacacacaggcagtaatgaccaaacagagaccaaggtggagctcaagagaaagtaagcatcaaacagcactcagcctgaatccaggcacgttcttcagtccaaaaagcaaaggggatgtaaatacttaagttcatcttactcagatcgcaagaataaaacaccacatagggacttgggaccaacaaaatgctaaccagtgaaat

SEQ ID NO: 40685 - DNA, 2300 bp, Homo sapien
ggcggcagaggaaagaacttattgaaggcagataggaagaagtcctctttactcaggggtcagaatcagggaaaagctgcaggagccagggtagctgtagcgtaaaagttatgaagagaccaaaagcataaaagttatgaagatacctgtagggaagactagcaatcatgttttagagaattaagattcacaatagaaatgcctactcaaatatatgttaaacaacatgtctgaacgcttgggtttacacttgaggcagctataataaaaggcaaggcaaggaaagggagtgaggagcccaatcaaatcaccataggctttagaatttaacagacaagagtgtagccaagctctaccatccactaataatacaaatattgacaaaatattaattgctctgagacatctagaaaatgaacattttaattctgataaatgaagattgtagtatctactttgtagatttcttttgaagatttgtgaatatatgaaaatggcctaaaacatgcctcacatgatttattctttaatgctatttttattatttttaatgttactgtagattttatgtcgaataaggtatcagccaactcaatattcgtcttgccttcagtgaaagaacttgtaatttgtaaaataatggcttccttatttttgtattttcttctgtgtgcttttttttctccttaatgctcttttaaaaggccttccctcccaaccaaaaattctacctttgccttagtagcactaaggaagaaaaaggacctttccgcagcacccagtctagagtagcttattgcctgcaaggctatgggttggccaaggaggcccaggatctcagagaagcagaagagccaggggaaccagggaagggcggagggagtcattgaggcatggttgaagtggtctttacatggctccacacaacagatggactctaccacattcaaatgcacttggagcaccttctcagtaagagatgatgccccctcaagtgtttgcttgtttaaacataccttcatgtgagtggagagtaggaggaatcctgcttcctgaaggtaactgatttcatagtagatgaagttagatatgaagttaaactcttcaattaaacagattaacaataacattaatccgaggtttgttatggacaacacattaatactggtaacttgccagtagatacgctatagtcagcaaacagtacagcttgtttacgattgctaaatcaaattttcaaagaaatgtagttctggtaattgtaagcaaaaccgttaaaatggtctgagttagttttgaagttactttcatcttcaggaggttttgaactctgttagagacgggcgggcctcattctgtcaggttgtaggttaattccccaactcaaacttccccgatcaaacattgtcaggccaggcgactgttttggtttatggatgataaagtatagggccaaggtaggccaagagtagaagacagagggagggctgggtttcacttctaatttttggcccaagctttcatggtgaggaaactgttttcaagggcttagagcaatcgcagttccacaatcgcagatagaaagtatgatttctctggaaaaaaagtgtcttaacctatgaagctgtgtgtgaagatcaagtgtaggggatacgctgaggtcaagtcatgcgaccaaagaccggaaaacggagattgctgcatgcaagcgtgctgggcgtttgtttggtttgcttgcctgcttaaagtatccactgggagggatggcggctagaagtcagaggcattgactgattgaggaactggtgaagcggagcccatgaggtgctgaggtactctaaataggaggataaggtatgaggcaaaacaaggctggagtcaaacaaaggcgccgttgcatcgcagattgcaacctgaagcggctcccggctccctggagagtaacccggagagacggacaggggtggcagccaggaggagaccgcaggaacctcgcctccgccgcggccccgcccccacggatccccgcccccgcagttgcggaaccaatgggagctcggaatgttagcgggtgggaggtgcggctgggttgctacagccagagctgggcggtggcgggcgctgctgaaggagtctcgctgagctcgaggaggtggcgcgatggagggactggaaggtgaggcgatgaagggatgagggcaggacggctagagcgggcccgaaacagctggggaccctggacaccagtagcaggaaggcgagggctggttcggtgcggcggacctcgccgcgtcccgccg

SEQ ID NO: 40686 - DNA, 2300 bp, Homo sapien
cattttattcttgtccatctatcttataaaaaataatattcagtttatcaaaatatcaaaagctaatttaagacttcattttggatttttttctaaatggtattaattatctcacagacagaaaaaaaaaatcattacttgatgttgttagaatgtgcccatttcatataaccctaacaattcccaaagctttatgaatattctcttcagaaagattctttatagttgggggcagaatccagtgtaacatttacattgcctttcctgcagctctgaataacttcctttcatgcttcccaaaagttcagatatgtacaacccttattctacctggatttatggtgattgtgataaaaggaagacggatttccttttgtgcaaagtattgatggatgctcttttactttgttcctggaaagttaaaaaaagaaaaaggtgcaggctatgaacagttacatacttcaatgctgctgtcagggatttaaaataaataaataaataaataaataaataaataaataaataaatccccaacctaggcgtgtttcattatagaaatcatttttaaaactcactccagtgtcatgtctgtcctcctccccacctcccactctaggttccagtcaaatggaaatatgtggcttttctcactccattctgtctctcttttccatttgcttacccccttcgcttcctctttcattctatttccttctgctttcatgaactttctctttcacacatattcactgatgcattcccactcacctgttctctcttactctgtcaccccccagtacttactgaatgccagccatgggctaaagaccatagtaagtggacgctgggcaggaagagaaaggccattgtggctggaggatagtgatgtggtaccacgaaacgtcagagagggcagtggggcccagatcaccagggcactgagggcctggtacccagtgggaagtgaccagaaggtggggcacaaaatagaatcagatatcctgctgctctgagaagaatgaaggggttgtgggcaaaagtgaaagctggaagatcccttagacagtctctatagtcaccttagggttaattttggaggtggggcagacaggacttgtctatggatttgatgtgggaaatgagaccaaaaaaggaatcagagacccaagtttcaggcttgagcaactctgttctccctagttcattgccatccttttttttcctttctccttccctcctcttccttgttcacgctatagcagaatgtgacatactccttaccagccccaagttcattcctcttcaagtgtcagtttagaagtcacagactccaggaaactttcctgaagtccccacactggggcaaagccacacacgtactgtcatctccctcccggcatcagtgtgcacattattactttattcacaggagttccaagcaggagtttctacagcccaaatgcagcaagtctgtgtctaagctcagttagctaagtgaaatttggaaagttacttaaggaagtctcagtccccacatctgtaaagtgcagataagaaaatggtctacctcacacaaagttttgcatgagatgatatacataaaatgcttagcacaaaactggcagagagcaaatgctagataaatgatagtcgttattattatcgctgttgttactggtttacattatccaccttcatctaagcagggtttctgcagaatagcagaaaccaaactaatgtagcaaataagctacataattcaagcccaggaaaaagttaacatttcagtggcatgcattcaagacgaatagtttgatttattagccaattcagataaatgtgcacgtggaagtcatagttaaatattatcgtcagtttccacgtcctgcgtttaatttggggtttgattttccaaatacaacacttaccagattaggtggacccacaggattatttttccttgaggtctcacctgagcaggtgcatgtacagcagacggagcagaaagagactgattagagaggttggagtggtagagggcgtgaccctcttaatcattcttcacttccttttttaaaagacgacttggcatcgtccaccacatccgcggcaacgcctccttggtgtcgtccgcttccaataacccagcttgcgtcctgcacacttgtggcttccgtgcacacattaacaactcatggttctagctcccagtcgccaagcgttgccaaggcgttgagagatcatctgggaagtcttttacccagaattgctttgattcaggccagctggtttttcctgcg

SEQ ID NO: 40687 - DNA, 2300 bp, Homo sapien
ggcagtagaatgagtgttttgttttcctcatagtcatcaaaagtgcaatcgatttcattcagcagccaactgcagttgttaaagaaactaatgccatgacttagggcccttgttctccaaggaagctgaagaatgtgtagagatgacacacagcctgaggggaaagggtgtggtggggagaagagaaatactttgaaaatattagtcacacagacatgctgaagatccttcacctcatgagtgataactactccagtgagaggtgattaactgttacatttaaagtgggaaatgcctatatatagagagaaaatggttatttatttccagaccctgccaacttccatattgctctcttgctgtgtcatagtcacagacctgttcaaagataggaaatataatttctaatcttcctgttcaagaaataattttattgatctccacttcatcttttattttccccatgattcagcaggtcaaaactgttccagttccagtagcatcctatcagtcagcaaaatgtccatgaggttaaaatgtcttacaagttaataggaggtgaagaaattcatttcagcaccaaggagagtgccctgctattttcaattggttttatgtatttgaaactgtgtattgttcctgaggatagaaaaaaaagttgaaatgtgattggacagaaagctgctaaaaacctattttaataagaagaaaaaaatacattcatttttctgaaattaaaaacttgccagggtttcatacctgttcatgattgcaacaatgtgctcttcttttggctttcaaacgtcggaattagcaattctttgcctatttttctaatattaaaaccagtttctgcatggaattagactggctcaataaagttacagaagagttaaattagcagtaattaaaaacttcatgcagcaactcctaaactttttctcaccattttcagagctgtgcacatggtaaatgctcaatacatatttaagtcaagtgaaagagaacaaatgaatgactggcatccattaagtgagaaggaggaactaataaatgccttgtttgtaatgaaagtcattttttgcaactagtctcaaagatcctcacatacgacattgctcaatccgaaacttgaacacagccttcctgggcctacataaacgtagtctctctggatctcagaaaaataatgacccagaccacacctttcatctcttctaagttttccatgtaaagcattctccttagagccctggaaaggttactaaaattttgacccacttaatcctacaccttcagggcaacatggcattcacctgtggtttccttaatgcccaaaccagccagccaacctgttttctgccgtgttaacaaatggacaggacacaggcaccagaggttaaactttcttcctcttcccccatgtccccaggtggaccattattaccatccctattcccaagcaaccaggtagccccttcctctgtgccaagggaagaaaacaccatgcttccctctcctgagagaccttcaagagtttagagacgcctaagtccagctgtgctaaaagataaaggacaataatgcaagtctgctctgagctgccaccatagccagacatagggtagccctgaaagactagaaccaaggacagagccaaaggtgaaagaaaatatgaaaaagtgaaaacacagtatttaaacagaattttccaacagcctgcatatagtgaggacttctcaagcttctgaatccttttccattgaattgtgcaatggcacatgtatgagcaaagtcaagcctcctggctcccaggtaggcacagcccagttcttagctcctaggaagcttcagggcttaaagctccactctacttggactgtactatcaggcccccaaaatggggggagccgacagggaaggactgatttccatttcaaactgcattctggtactttgtactccagcaccattggccgatcaatatttaatgcttggagattctgactctgcgggagtcatgtcaggggaccttgggagccaatctgcttgagcttctgagtgataattattcatgggctcctgcctcttgctctttctctagcacggtcccactctgcagactcagtgccttattcagtcttctctctcgctctctccgctgctgtagccggaccctttgccttcgccactgctcagcgtctgcacatccctacaatggctaaaacagcaatgggtaaggcactgcgcctcgttctccgtcggctctacctggagcccacctctcacctcctctcttg

SEQ ID NO: 40688 - DNA, 2300 bp, Homo sapien
tgggtagcttcagacttcaaacaaggatcagtgggctaaaaccagagagatggagtttgggactcaaagaatgctcatctgaaattgagggctgaccagcgaggttcttttaaaaatcattgcattttactaaattgtgagttctgtaattataaatgtcctagcaggtgctagctgtcatcttttctattataaattatactattttatgttataatttgtattatacaggcttaaaacataagggtctgataatctgcttatctttaatacataagccactgatagaaaataagtggctaaccattcttcagttctttttttaattgacaaaaattgtatatgtttgcggtgtatggcatattttgaaatatgtatacattagagaatggctaagtgaagcaaattcacatatgcattacctcacacacctgtcatttatttgtgatgagaacaaaaaatctactctttcagtgattttcaagaatacagtacattgttattaacaatagtcagcatggtgtacaataagtcttctgcggccgggcgtggtggctcacgcctataatcccagcactttgggaggccaaggctggcagatcacgaggtcaggagttcgagaccagcctgaccaacatgctgaaaccttgcctctactaaaaatagaaaaattagctgagtgtggtggtaagcgcctgtagtcccagctactcaggaggctgaggcaggagaattgcttgaacctgggaggcggaggttgcagtgagtcgagatagtgccactgcactccagcctggcaaaagagggaaactccgtctcaataataagtctcttgcatttgttcttcctgtttaactgaaattatgtattctttgatcaacatctccccagtctccacccctaacccctggtaaccacaattctactctgcttccgtgagttcaactttatgaatagtccacatgtaagtgagatcatgtggtatttgtctttctgtgcctagcttatttcacttagcatagtgtcctccaggttcacccatgttgtcaaaaatgacaggatttcccccaacttttttaaggctgaacagtattccatgtgtatgtgtataaattagattagtagatgttgccactccctcctccaccacagtggctctatccctggctcctggctccagccgagtacactagaggaggatattctaaacagcaacaacacaggagcaaagacattacaatggggtgttgtcttattgcccccattagactgtaagcatcttgaagacaaggacccccatcacagagtgatgttgtcatccctggagtgggcactgtgcatgattgatgactggaagcaatgaacatacagaagggcaaaacagaaatcagcaggatgctttgcatttcagcattgactttgccaaatatgcccaactgttcagggagttacattggttctaacgaagctcctgtgattcctaagcacaggaatggtgataatatatataatggtgcatgcatatatacgcatatctagataatgatatctcattatatgtgagaactgaagaactccgttatgtttctcgtctaaccaaaaagggcctacagctacgataatttccaaacaaataaatctgtgctacttgattttcatgcaaagctcatatttgttcaaaaggaaaataaagcttaatttaaaatcaatttaggctatttttatctaagtatgcttaccgttattcaactccctgcagatattgtcaaatttctcaatatggtaaatatttattctgttaaaatatatccatagttacactaaagacagagaggtcttatatgttctaaacaacatagagcaaatgctcataaacagcattttattcctatctcccggaataacaacgctacttccaattgctggaatctaaattattaaaataaacccatgctgcaagctttgtatgcttaacattctcaaatgttcacttttcagatatggaagtgaagcaaatcaacaaacgtgcctctggccaggcttttgagctgatcttgaagccaccatctcctatctcagaagccccacgaactttagcttctccaaagaagaaagacctgtccctggaggagatccagaagaaactggaggctgcagaggaaagaagaaaggtaactttttccataggttttccttctctctctccctcccctgctcctccctctcacacactcgggcacacatgcacgcacacacacacacacacacacacacacacacacacacacacacatacagag

SEQ ID NO: 40689 - DNA, 2300 bp, Homo sapien
gccagcagcaacaaacccaggctggctgatggaagggcccagcctagacagggaagcagaggggctgcatggaaaggctcagggctggaggtgatgtgaagtggaataagcttcagtgggagccaggaggttgtatttcccgttgggggcggtggtggagggatgggggtgcccagagaggaactatggattaggcccaggccggccactcagagtgcttggcatccaggatgtgttaagatggcattgaggccgagcgcggtggcttaggcctgtaatcccagtactttgggaggccaaggcaggcggatcacctttggtcaggagtttgagacaagcctggccaacatggtgaaacctcgtttctactaaaaataccaaaaacaattagctgagcatggtggcgcgcgtctgtaatcccagcttctggggaggccgaggcaggagaattgcttcaacccgggaggcggaggttgcagtgagccgagatcgcgccactgcactccagcctgggcgacagagtgagacaccatctcaaaaaaaaaatagcattgagatcaataaggaagtctagaaaccaggaagctttttgcaaagagaaaacgccttttgttattctcaccgatggatattaagctttccctcacagacaggactacaagcttcagagtggatctgagatgaatgcgaattgctgtgtacctttgtaagggacagaagaccggattttcaaatttaaaacaaccattctgtttctggaatcagaaatcagtttcgagatttacaactgtattttttaaaaaatctgtcttcttagtggactcgggggggacttcacgtggcacccagtacacgccacgccaagccaccgaagccagaggtgtgtgtctggggccagagacgtgcattccctcagcaaggccggcctcagacgcaaacgccagcaccgccaccctgtcgcccgctgagaggatctggccgccggggggagggggcgggggggggggcagcgggggaacaacaaaaaaatcccagcataatgattattcccagggaccgttgggtttttttttccccaaggcggccgaaaaaacaagtgctccccttccccggaaatgagatgcacaggggtattcattccattccgcggctgggaagcccctgcggaaacgagtctggctgcatgtgcggcctcggtcccagaaatcaaaaagagcgtcccctgagcccacagcttgctcctccatgtgaccggcccctgggctggtggccactgtggacgcgcccggcgccccctctcccggctccctgcgggttccgcggagccgccggcgcgcagcccggccaggtgcacccggcacggccccactaacagcgcgcgcctccagccgccgggcactggcggccacgcgggcgagatttacggtggcgctaggcggcggcttccgaggccggccggcgcccaggctccgattacaggttcacactgggggcccggccggcggccgcccagcccccgccggcgcgccctcgcgcggcccggctccccgcctgcccattcttctccattcatgcggacgcccagcgccgccgccgccgccgccagcgcggccgccgccgtcgccgtcgccggccgcccggattggctggcggccgcggcgccggcactttcccacggcccgcggcgcgtgcggctcaccggaggcgctgcaggctcggccctggcgcgcggccaggccaatcggggcgcgcggggcggggaggagccgcggccgccggcgggcttgtgtcccggcccggcctcccgcgcctccccgccgcccgcgcctcctccttcccctgagtgcaggctggacagagcccccgcggagccgacgcaccgccgccgggcaggggcgggcgcggagggcgggggcgcggtccgctagagccctcggcctcgctcccgcccctccccggagcggctgccaatcagcggcgcgagaaaccggattggccggggggcggctgttgccctggagttgccgccccgcctctccgccccctcgcccgccttccccactcccccgccctccccagggccctgggaaggggctcagcgtgggaaaggatggttgagttttaaccagaggcaaagcgtgagcgggatcagtgtgtgcggaacgcaagcagccgagagcggagaggcgccgctgtagttaactcctccctgcccgccgcgccgaccctccccaggaacccccagggagccagcatgaagcgagctcaccccgagtacagctcctcggacagcgagctgg

SEQ ID NO: 40690 - DNA, 2300 bp, Homo sapien
gctcagaatgctgcccccctgcctttctttcttgggtccataaatgactctagtgaggtgggaggtaggctcttcattgtttctacttggagccactgactttaaagttttaataaaaaaaaaaatagagcacaaagacattttcaagagaagccttatgttgcttctgaaagcattacagtataatcaagagtttgcctccttgagttctttgtaagtttggttgcctagagaaacagcctggcggcctccagggtcatcactgtgaacaaacagcagctccagtgggatggctcacacctcttaatcacttccagcgccaagagcgcaggagtcaagtgcacgggaagaaaagagccaacctggtcaaactagtttgacttttaaaatgaacctgaatcatacgtttctgttcactttgaaaatagttctggactatcatttaaatgccaccttacactgaggcaagtcttctgaactaccagatgtttaaaaaaaaatagatcagattctggttctgaattttttcagcagcaatcacaagagttgaatttttattcatttgtctgctcattcattcattcattcatttattcatctattcatcactcaacaggcattcattgtgctaaattccttgtgctaaattctgcttggtgaatatttgcaatcttcgtattattgttcaagtgattgcccgttttttgaaaaataacaaacagaaagaagattatgaaggccaggcacggtggctcacgcctgtaatcccagcactttgggagggtgaggcagttggatcacctgaggtcaggagttcaagaccagcctggccaacatggtgaaaccccgtctctactaaaaataaaaaaaaattagctgggcatagtggcagatgcctgtaaacccagctatgaggcaggagaattgttttaaccccggaggcagaagttgcagtgagccgggaccgtgccactgtactccagcctgggtgacagagaccctgtctaaaaaaaaaaaaaaaaaaaaagattatgactttgcatagaattcagttgggggatggagaggagacagagtggttaggatattttaactataaaatatatagggccggatacggtggttcacgcctgtaatcccaacactttgggaggctgaggcgagtggattgcttgggctcaggagtttgaaaccagcttgagcaacatgccaaaaccccatctctacaaaaaataccaaaaattagctgggtgtggtgacccatgtctgcagtcccagctacttggaggctgaggtgggagagtggcttgagcccagcaggcatagcttgcagtgagccaagatcatgccactgcacttcagcctcgatgacagagccagactctgtgtcaaaaaaagaaaaaaaaaagtgtgtgtgtgaatatatatatatatatatggcagaatatgattattcttatggttctgtttcaatggtacattaccttggaatattagtccctaggttttgatgatatatttgcttttataactcatcagtattttttcactgtgtagatcagtaccttttgggtggttttgagtacattataatattgtagtttactttttgtgatgtactgagtatttgagggtactgcaaggtgagtatttgcagatactaccttttttagtttaaatattaataatatccccagtttcataagctggttatgaatgtaagactgactgataaacagatctgactttttctggagggggcctgggcaggagcggtattaaaactttctgcaaaatttctcctaagtttcaccaaataacagaaagctgtgtctgttggtcagcattactagtttgtggaagttgggtcagcattactggtttgtggaagtggctttaccctctcatatttgctcatagtcattttccaaaatacttctaggtttctagttaaagtactgttgccatgccaggcccctgaattatggcggacatctgaggccaggaccaggaactgccaaggctagactgggaatggaacaaaaggagagccagacccgggagctggcaggaccggggattgcttagaaactagcggttaaagatggagtctagggaacagtcgagagtcacgcaaatgttagaggtgcccttggcctcatgagtggtcggtagaaggcggctgcaaggagcctttgaaatggtgccgagttcttcctctgccagaaagcctttcctccgcgctgactgtgtcaaaggctactcccaggtgtgctgagcaggggagccgtgtgggggga

SEQ ID NO: 40691 - DNA, 2300 bp, Homo sapien
agatggcgtatgtgaaaacatcactattacagaggatgctactcttggcacttgtataggcaaggagaaagttatgcggacatccccctattgacttgttcagttctttacagtccctctcatttgatgcttctgatcctctaccaaagacagaactaaggccaaatttgaagtcatttgatacaaacttactcattttttttttttttttttttttttgagctggagtctcgctctgtcacccaggctggagaacagtggtgtgatcttggctcactgcaacctccacctcctgggttcaagtgattctcctgcctcagcctcctgagtggatgggattacagccatgtgtcatcacgcccagctaatttttgtatttttagtagagacagggtttcaccatgttggccaggctgatctcgaactcctgacttcaggtgatctgccctccttggcctcccaaagtgctgggattacaggtgtgagccaccacgccaggggtgtgtttttacggatacttgagttttgcacttttcacccatgctggagtgaagtggcaggaacatagctcactgcagcctcaaactcctgggctcaagtgatcctcctccatcagcctcccaagtagccgggactacaggcatgcaccactgccccaggctgatttttctattttttggtagagactggttcttgctatggcccaagctggtctcggactcctcatctcaagcaatcctccctcctcaacctcacaaagtgctgggattacaagtgtaagccaccctgcccagtcagactgagggttcttgaagaccactggccatgctctttacaatttaccacactttctcctgaaaaaaagtggaagtagcactatccgtagaaaataatgttctaggcaagagtccattaatagtctcgggagataaacagttttaactgccaagagggagaactcacctggagaatttaatgaatttgtaaggactaccatacagttagctagtaataattttatgtgattcatacaattgtgcaccattctgagatcagtgtacttcgtgttcttaacactatctgtaccattagagagcatcagaaaagcttaaaacccatagtcaaggcattcttaaaatagggtctgtgatcataaaaattctttctctcgaagtacttgcaaatgaactggaaaggtgtgtgcccccaaaataaaactaactgtggattaatattaaactgctgggtcaaagatagacggacaactaattaataaacacttaagaatgatgttaggctgttttgaacagggtgggtaaattttgggaattaacactgcaggagaaaagggaaagaaaatccagagtgagggtgggggcctacggcggtgcaatacttagggacattccaaaacttctgaactcctaagttagataataggtatctagaggtgtcaaaacatttcagaaaaactatttttgtggcgtgagtggactggctgcagaagtggcaaaggacaaacttggatgcagggtttggcaaatgttgggtgagccctaatctgtgcctggtgctagggaccctacagcaaagttcctcttttcaaagtttaaaaagttgggagtagacactaaatattattaaatatttaatattaatatgtggcatattagaaagtgctacatggtactaagaaaaacaggtgccagagagtctgcatttgggcttccacttctaaatagggtaatcaaggagaccctcatatttgagtgaagaccccaaactcgagtgctggcggccatgtaggggggacggcagggcgggagaacgagcgtcgcgttagcagaatttacagtacaatggggtccaacggatgcccaggaaggcgaaattcctgcaagttaaacgcacttctaacgcaaaacttaaccaggcccctttccaactatttagcccaccaattttagcttaagtctcttcttccccacgccactcccagatgaaaggaagacacgcctcgttggcctccagagctctgcgtccggggggcggacctctcatagctccgccccgtgacccgcgcgcttgcggaggggaggtcaaaggtcagaggtaaagaagtcatggcggcgctgtgtcggacccgtgctgtggctgccgagagccattttctgcgagtgtttctcttcttcaggccctttcggggtgtaggcactgagagtggatccgaaagtggtagttccaatgccaaggagcctaagacgcgcgcaggcggtttcgcgagcgcgttggagcggcac

SEQ ID NO: 40692 - DNA, 2300 bp, Homo sapien
ttgaaatgctcacatttattaataaggcatgtaacatctacatgagccatcatttgcttttttaattccacattgattaggagccaaaccttcagggcaggtatccggtagagcgccctggagaggccctggataggcacaggcgcctgtcagggggctcttcacatgctgtgtgctgctgctgggagaagagggggccagagactagggggcttctaagaagaggtggcatttctgcctcagtgttgaaggatgaataactttgacaggctggaaaaaggtgacatttcaggtagagcgtgtcacatggatgtaaataccaaaggtcaaggacatgggcttgagagatggtgagaaggatggaggtgactgtggcttgcattctatccgtatcactattaattaccttctaatgcctttggctctaggtggtggaacaagtaaagtaatggacaaatactttttctaccaatatttagtgaccaaatgcagagttatggagagggccagggacctcatgaaccatactctttctagtctagggacataactccaatgcctttcctgtcccagtaagaggccatggatttcaagaagccagacaatccattctttcagataatgataaaaaagaaaccatttattttatttctaagtatagaatgaaacatttatagttgcccaaattttggtaccttttaggagaaaaatacagatttttttgttgttaaaaataaacttaaaaaaaaaaaaaaaagacttaccatagtccgggcacggtggctcacacctgtaatccgagaactttgggaggccgaggcaggcggatcacctgaggtcaggagtttgagaccagcctggccaacatggcgaaaccccatctctactaaaaatacaaaaattagccgggcatagtgggtggtgggtgcctgtaatcccagctacttgggaggctgaggcaggagaatcacttgaacccagaaggtggaggttgcagtgagctgagattgtgccattgtactccagcctggtcacaagagcgaagctctgtatcgaaaacaaaacaaaaaaagacctactgtaaatagagtacaacatgagactaacaaaaataacaaataaaatcatccagcatatattctgtatttaaaaaaaaaaaatcacaagatgaatacagaccatcttggtgcatatgtattttatacactagacacatgctgatgtttttaatgcttaaaatatattaggtttcatacttgcttccaatccaaggagagtatatctgagctctttttttttagatttgaaaaccgccttttagattagattagaacactgcctttttttttgttatgcagtaacagatcattgcccacctgaaagcgagtcgcctttatttttacctccttagtagaaccagcaggagctgcaattgctgttgcttgagccaaggccacagtcagcatagaaaggttctgctaagagactgtgttaaaggaaataaatttggtgacttagttttgttttacaagctagctgtggcccagtccttctgcagggtgggtacgcaggtttattgcagctctgcagagccatggccttagacaaacaaagaaggtgtgggaatacccgggagctttccattcaaagtagattcttctcctttgagtgcatgtaactgaagcaccagctttctaaaaaaaaaaaaaaaaaaaaaaagagagagaaaagaaaagtcagtctgaagtttttgtgacactcagccagactccacattagataaagtaatcatggaaatacagctttatttttataccaagttgtgcttagaaagctgattgctaaaccaggaagcttggctttcagaattttactgtaatccagggtggaaaaaaagtatcactcagatggcatttgtgggagattactgactggtaatccctccttgtcctagaagattaagtctgccctggtgtagtcatggtcagctgatttttttatttatttattttaaataaattgtagtttcttgttgtaagtcagccagtgtctgatgtttgcctgaactgtttgtacctctgggccatattgcagaaccctgcccttctttgttgactgaggaaagctcgctccctgcccaggtttttcattgttgatcgaaattaacaccaggtggtgaatagagcccctcctaaggttgctcaggataaatcatttattaaataggtctgcttatcaggaggggcgtgaaggctcccaaaaggaaatgctggcacctgggcccagaagccagggcctct

SEQ ID NO: 40693 - DNA, 2300 bp, Homo sapien
ttaaacagatacaaacaataaatatttgtaacggacactcacgttcaagtgctatttatttgtccacaaattagtacattgagagattgtctctccagatgtttatttctatacaatagatctcagcatcagctagtcaaaaattctttaccacatacagaattttctgctgatgccaaaatttacctttatgttacattaaaaattttttaaaaaatattgcacctttttgggctcaagcaatcctcttgccttagcctcctgagtagctgggtttacaggcaaacaccaccatgcctggtttaaaattacaatatttattaattgcatggtagaattaaaggatgcagagatgaccaaaataatctttgcccacctggaacttttttttttttttttgagatggagtctcactctgttgcccatgctggagtgcagtggcgtgatctcagttcactgcaacctctgcctcccgggttcatgccattctcctgcctcagcctgccgagtagctgggactacaggcgcccgccaccacacctggctaatttttggtatttttagtagagatggggtttcaccgtgttagccaggatggtctcgatctcctgacctcgtgatccgcccgcctcggcctcccaaagtgctgggattacaggcgtgagccaccgcgcccgacaatttttgtatttttagtagacacaaggtttcaccatgttggccaggctggtctcaaactcctgacctcaagtgatccacccgccttggcctcccggagtgctgggattacaggcgtgagccaccgtgccaggcctgttttttgatttttttaataggccattttaaggactttaccacctggagcttgtaacctaataggactgtgaaacatacactggtagcatcctggcaccagtgctggggtgagtgccacaggagaggagccaagtgcagtcagagtagaaggactcaaatagaagagatcacatctggttgagtcaaacagtaaacgtccccagaagacactggaagatgcaggctggagagagctacactttacatacagcacgacagtatagagatattaatagcatacagtcacttcaggtaactacaagtaattttaaaacatctgaataagtgcttctttgttgtctgtggagtgctacacaatgcttcggcctaaacgtcaagcaacacagaaaagaagccccacttcatttgcagcctcagatagcttacgaaattgagacaccacctgaagaccatgacccatacaatcaaagtgacttcatggaagacgagtaactgcaaaaccctgtgaaaacagattgttaacgctactaatgaaaagaactggattgttacgggaacctcaaactgtcctttgatcaacggacatgacgcctcaacacgcattttccaaagatctctgctgataattctgaccttcggttaatttaattaatttcatttgatttaattcattttagtgttgtcctcagtcccgcactcaaaacagatttttattatatgaaaatcttcctagtcacctaaaaaatccgcattctatggaaaagactatataatttttcaagagattctttgcaattttcacctatgctggtttatgacctagttagagaagacatcatagggcattatttaggtaataaaatacagagagaaaagagccactggcatttctaaataacgttcctgtgtttcctactgtaagtataggaaagtaggtgttcgcagatgcagagaaagggcatctccaaggcctcggaggaaacttttgattttataaataacttgatggtggaaggcaaacgccatcccggttcccaagcaggctccacgcagcctccatggccgagtccatctcctcgccgtcctcttccctcctcccggccgacttccagccggtgcgggagtcggggtgcgcccggccctcctagcgctgcgccgcccgcgccgacgtggcggagcgcacaggtcgaccgggtcaggtggttgggtgacgccccaggaaagcgctccaggccgagggcgggcggcgccgccgcgcccgacgcctctgggggtggggacttcgcgggagtcgccggcggaggcgaggaggagctctgcgcggcgcggcgggcgatccgagccgggacgggctgcaggcgggggtgctgcagaggacacgaggcggcgggctggagacatggaccgcggcgagcaaggtgagggcgcggacccagcgggcttgggctcgggcttggactcgggcttggactcgggctttggct

SEQ ID NO: 40694 - DNA, 2300 bp, Homo sapien
tttaacagtttttgaatgaaaacaagctttagagctgaaataaaatttttttttttttcagatggaatctcgctctgtcgcccaggctggagtgcaatggcatgatctcagctcactgcaacctccgcctctctggttcaagtgattcttctacctcagcctcctgagtagctgggattataggcgagcgccaccacacctggctaattttttgaatttttagtagagacggggtttcaccatgttggtcaggctggtcttgaactccagacctcatgatccgcccgtctcggcccccaaagtgctgggattacaggcgtgagccaccgtgcccagcaaaataaaaatttttaagtccattttcatttcccatcaccttgatcctagataagtaattaacttcagtaactcttccctctttttatgggggtggaggctgtggtgattaacatataataaatgtatttattttcaaaatgcctagaatgaaaaaaaaacacgcattaaaaacagagcacaagtattattatggcattcttccatatgtggcacatattatacagcctcacttggcagagttctcttatttcttaagggtacgaattaggtcaagatcagactccactgtcttaagcttcccagcaactaaaacaaagcaggacaaaacaaacaaacaaacaaacaaaaacaccctacaactgtacccacctgaagaactatatcagaatttcaagctcttggtcactggtggccaggtgacaatatgtttattaccggaaaaataactcaaagccaaaatccttttgtggcagggtagtactgtcattctttacattaaaattacatgtaatctacaagataaaaccaatgttttttgtttgatatacaacactgctcatcaacaggtactaaaaattacaatgaatgaagtgaatgttgctttgaataaatgtatacaattaatatgagtctggatgtggattcatgttagtccatttaaaaaatattaagaaaaacggtcttttataatgtttgagaagacttgtttatttaaatatttatttatttttaaaagactagtcaagtggaagtggggaaagagtggtacaacgggcaaccaactgtgaataaccaattgagacaattcactaccttgggaccagccaaagcttgctttttaaagtaaccttgaaatacataccatattccatattatacaaagctttacatattgctcttagttttgaaatagaaaaagaacttttgaagagaataagaatcataaaactaggtctaaaaattgtaacacctgttcttcataaaacatatataactttatttacattaatacattatttaggaggttcaagcctttaacataacccttcccattaatctataactgtaaagagttcatgtatatttctcattttctgcacatatgtattaatgtaaaaaatttgtcctgccgtattttttttagtcaacaattatctggagcattttatcagttcgtgattcaacttctaatacatatgtcgcttaagagtaaaaagcccctccataacttgaaaacatcttttttttcttaacctgaaataggcttaaattctcacattgtcagatgagtcttaacactttagtatttgctaaatttagcatattaaaaatttttaaaaggagtataagggccctaaattggaaaaaaaaactctactacgatcataactgtgggatttcatttccagttcattctgtcagaatcaatctaaagtccatgtaatgtaaacagttcgaaaaaagtcttaaaaatgaattgttgactttaaacacacaatcttcggagccgctcacaacgtccgtagaagcagactcctccccgctcctggggaaaaccctgcctaatatttataacgttatgacatactgtaatactcacaaggtggttgtagaagtataaacacgactggagttatctgattggctgctggtgatgtaacacccatgtcaatacttcccagtgaacgcacgtgttcgaccttttatttaaatttccatttcatcacagcaataagacactcggggcggtgcattttctgtgaaatgactactgtccggggcccgaggtgctgcctcgcacaatgcatcaaaggaggttgtgtccgtggtcgtaacctcttcgcgtgaaaggcaccgcctggtccagtctttgtgaaggaacaaaataagttcacttccttgggcaccgccacccaccctcagcaaatgacaaggctggagcgcagctcccaccgcacagt

SEQ ID NO: 40695 - DNA, 2300 bp, Homo sapien
gggtacgaattaggtcaagatcagactccactgtcttaagcttcccagcaactaaaacaaagcaggacaaaacaaacaaacaaacaaacaaaaacaccctacaactgtacccacctgaagaactatatcagaatttcaagctcttggtcactggtggccaggtgacaatatgtttattaccggaaaaataactcaaagccaaaatccttttgtggcagggtagtactgtcattctttacattaaaattacatgtaatctacaagataaaaccaatgttttttgtttgatatacaacactgctcatcaacaggtactaaaaattacaatgaatgaagtgaatgttgctttgaataaatgtatacaattaatatgagtctggatgtggattcatgttagtccatttaaaaaatattaagaaaaacggtcttttataatgtttgagaagacttgtttatttaaatatttatttatttttaaaagactagtcaagtggaagtggggaaagagtggtacaacgggcaaccaactgtgaataaccaattgagacaattcactaccttgggaccagccaaagcttgctttttaaagtaaccttgaaatacataccatattccatattatacaaagctttacatattgctcttagttttgaaatagaaaaagaacttttgaagagaataagaatcataaaactaggtctaaaaattgtaacacctgttcttcataaaacatatataactttatttacattaatacattatttaggaggttcaagcctttaacataacccttcccattaatctataactgtaaagagttcatgtatatttctcattttctgcacatatgtattaatgtaaaaaatttgtcctgccgtattttttttagtcaacaattatctggagcattttatcagttcgtgattcaacttctaatacatatgtcgcttaagagtaaaaagcccctccataacttgaaaacatcttttttttcttaacctgaaataggcttaaattctcacattgtcagatgagtcttaacactttagtatttgctaaatttagcatattaaaaatttttaaaaggagtataagggccctaaattggaaaaaaaaactctactacgatcataactgtgggatttcatttccagttcattctgtcagaatcaatctaaagtccatgtaatgtaaacagttcgaaaaaagtcttaaaaatgaattgttgactttaaacacacaatcttcggagccgctcacaacgtccgtagaagcagactcctccccgctcctggggaaaaccctgcctaatatttataacgttatgacatactgtaatactcacaaggtggttgtagaagtataaacacgactggagttatctgattggctgctggtgatgtaacacccatgtcaatacttcccagtgaacgcacgtgttcgaccttttatttaaatttccatttcatcacagcaataagacactcggggcggtgcattttctgtgaaatgactactgtccggggcccgaggtgctgcctcgcacaatgcatcaaaggaggttgtgtccgtggtcgtaacctcttcgcgtgaaaggcaccgcctggtccagtctttgtgaaggaacaaaataagttcacttccttgggcaccgccacccaccctcagcaaatgacaaggctggagcgcagctcccaccgcacagttatttgcaaagtcccaggtgaactcgtggcgagagaaggaaaatgcgcgtcccgggcgcgggtaggtgcgtgtgggcagcggggaggcggccagaccctgacactcgccagctgtttgtcctccgcgtagcccggccccggccgcacacgcccgccccctccctgagacccccagcccgccgcccggccttttgtccccaacccctcggccgacttccttccccgcggccgcacccccgcccccaggccggaggcgcagcccagcccctttcccggtcccctggcgcccccaccccaccccagcccagccccaagcccagcccccctcccccagcccggcccccaccctttccccctccagcggttactgctaccccggtgcattgtgggcgcacggtccgttgttcatttgccattcgacctccgccagggcctggtcggacggaaacgctccgccggctttattgtcgcttcgttatgtggcggagccgagcagtttagcgtgcctctcaccctcagcgcctgcgaagccggcggcggcgtcgggactcctcggcgcgcggaggaaggatatctgtgtggaggatcggtgtg

SEQ ID NO: 40696 - DNA, 2300 bp, Homo sapien
gcacaagaagggtatgggaaggttgccaaggatcagtcaaaaatgaggaaatttctctactttgtgtgcttcattctgtagtgatcatatactccagattcgtagagtttttcatactattccattttcacagtgaaacagttgaagtgtgtcctggaatctttttttttttttttttttttttgagacaggtctcagtctgttgcccagactggagtgcagtggcatgatcttggctcaccacaacctctgcctcagcctcccaagtagctgacattacaggcgtgccccactactgcccagctaatgtttgtatttttagtagagacggggtttcaccacattggccaggctggtcttgaactcctgacctcaaatgatctacccacctcagcctttcagtgctgggattacaggcgtgagccaccatgcctggccatgtcctggaatattatttgggttctttcagttgacttctcatacctgggagcagcactataatttttagatggactgggttagtttcagagaattgagatgacagcgtctgtggcctcctgtgacatgcacccaagtaaagctaaaatttttatgatttagccatgcacatgattgcattaagtcatgtttcgtgattgtttagggatccaccatttaggatattgtttgtgagactacttttgcagtctcgtcatctctacaccactaactctcttctaagcatgtcagtactttgagcctgtttacactctagtgtttatttctccatgtttttctccatgctcgtaaaatcatagatccatacatatgtgtatatattttattattttatagaaatggtctatgtttaacttaatattttgtgccaaagaattgacacttgaataaggtcagtattttcagttatcttttctactagaaatggtctaagcaatttttctcttgggaaagagatgattacttcatttgtttagcaaagtgtggcaggcactaatcaaagtgctggagggatattcagctctgccttgagggagcttacccacctagtcactgtatgaggaaagtcataaagttttaactaacatttgtaatactgacttatcgtttaaggaaaaggctcagggatagtgactttccaaggacacgcagttaatggctgatacagacagcattctgaattctggatcatacttttattcttacgattatatcacataattttaattgtgacgccaagtagaactataatgaatacctgtatgataagaagcaaaatttataaacatttagaattttgaattcaggaattttaatttaccttacagtttatagtacttatgaccctaaagagataaagcgttttgaaagttgataggaaattatataactagatattcctatagttgaagcaaattttccccttagggtcttacctttatctctagttagatttaattaacttcattgacctaaactgtttgattttaatgtttgccaagacttaaaatttacctttttattaatggtagatagggtgatatgcctagcataaaatataacttggatattttaagttcaatcgggggagactgttgcttttctatagagataaagcaaacatttaattcctataagagaaagtttcttttcttaagaaaataattgctctttttaattttaattttaagaaattctcaattcatgttcttagcttatatttgaaacatataacatgatgaatgttatttttaaaatgaaaccctgctgatcttcagtcagatgtgtttgatttttttcttttttaataatagcagtgggttgcaccaccactgttcactccatttcttgattactcacaaattaatatatttgattatcgctttttaaaaacttgataattgttttccttggtttgggagtttttaaaaaagtcaataaagtttaatattaatgttttttatccaattacaggagtcagaaataccatcagaggaggggtactgtgactttaatagtaggccaaatgagaactcttattgctatcaacttctgcgacaactaaatgaacagagaaagaaaggtattctttgtgatgtcagcattgtggtaagcggaaaaatcttcaaagctcataagaacatcctggttgcaggcagccgtttctttaagactttatattgcttttcaaacaaagaaagccctaaccaaaacaatactacccacttagatattgctgcagttcaaggtttttcagtcatcttggacttcttgtattctggtaacctggtgctcacaagcca

SEQ ID NO: 40697 - DNA, 2300 bp, Homo sapien
atttaggatattgtttgtgagactacttttgcagtctcgtcatctctacaccactaactctcttctaagcatgtcagtactttgagcctgtttacactctagtgtttatttctccatgtttttctccatgctcgtaaaatcatagatccatacatatgtgtatatattttattattttatagaaatggtctatgtttaacttaatattttgtgccaaagaattgacacttgaataaggtcagtattttcagttatcttttctactagaaatggtctaagcaatttttctcttgggaaagagatgattacttcatttgtttagcaaagtgtggcaggcactaatcaaagtgctggagggatattcagctctgccttgagggagcttacccacctagtcactgtatgaggaaagtcataaagttttaactaacatttgtaatactgacttatcgtttaaggaaaaggctcagggatagtgactttccaaggacacgcagttaatggctgatacagacagcattctgaattctggatcatacttttattcttacgattatatcacataattttaattgtgacgccaagtagaactataatgaatacctgtatgataagaagcaaaatttataaacatttagaattttgaattcaggaattttaatttaccttacagtttatagtacttatgaccctaaagagataaagcgttttgaaagttgataggaaattatataactagatattcctatagttgaagcaaattttccccttagggtcttacctttatctctagttagatttaattaacttcattgacctaaactgtttgattttaatgtttgccaagacttaaaatttacctttttattaatggtagatagggtgatatgcctagcataaaatataacttggatattttaagttcaatcgggggagactgttgcttttctatagagataaagcaaacatttaattcctataagagaaagtttcttttcttaagaaaataattgctctttttaattttaattttaagaaattctcaattcatgttcttagcttatatttgaaacatataacatgatgaatgttatttttaaaatgaaaccctgctgatcttcagtcagatgtgtttgatttttttcttttttaataatagcagtgggttgcaccaccactgttcactccatttcttgattactcacaaattaatatatttgattatcgctttttaaaaacttgataattgttttccttggtttgggagtttttaaaaaagtcaataaagtttaatattaatgttttttatccaattacaggagtcagaaataccatcagaggaggggtactgtgactttaatagtaggccaaatgagaactcttattgctatcaacttctgcgacaactaaatgaacagagaaagaaaggtattctttgtgatgtcagcattgtggtaagcggaaaaatcttcaaagctcataagaacatcctggttgcaggcagccgtttctttaagactttatattgcttttcaaacaaagaaagccctaaccaaaacaatactacccacttagatattgctgcagttcaaggtttttcagtcatcttggacttcttgtattctggtaacctggtgctcacaagccaaaatgccattgaagttatgaccgtggccagctatcttcaaatgagtgaagttgttcaaacttgccgaaatttcattaaagatgccttaaatataagcattaaatcagaagctccagagtctgtagttgtggactataataatagaaaaccagttaatagagatggtctgtcttcatcacgggatcaaaaaattgccagtttttgggcaacacggaatcttaccaatttggcaagtaatgtaaagattgaaaatgatggttgtaatgtcgacgagggccaaatagaaaactaccaaatgaatgacagtagttgggtccaggatggatctcctgaaatggctgaaaatgaatctgaaggtcaaacaaaagtgtttatttggaataatatgggctcccagggaattcaagagactggcaaaacaaggaggaaaaaccaaactacaaaaagatttatttataatattccacctaataatgaaacgaatttagaagattgctcagtaatgcagccacctgttgcctatccagaagaaaatacactactcatcaaggaagaaccaggtaaatattatctatacaaggatacttccttgttcatcctaattctagttggatataatcttgaagtatatttttaattgaattattttagt

SEQ ID NO: 40698 - DNA, 2300 bp, Homo sapien
ccaccatactgttaaacagaaataatccatacagcacaaagacaacgtagctctaatgagaaatctgtcaaggtcttctacattaagacaaaacaaagtgctagctaaggagtctatctacccttaatacttcatttaactaaattgtctcagggattttattgttaaaacttgatataaagtacaaggaaaaagatatatagtattcgttatatatacacacttgatttttcacacagtaaaaatttcacacacacacacacacatacatacacaaaattcctatcactgaaagctaacccaaatctaaaaagccagaggaacatttcacaggattactatggcattttgccctctggcaactaaaaacagtgattcctttaacagaaaatactccatcctcagatgaccaccatcgtataaatcagacactgaacagttacagtgctttgaagtgaaaaaaacaagcattaaataatgtatgacagtggtggacaagcctcaggcatgcataggaaacctcaaacccactgagcttcttcaaataaagatatgcacagccagattaaactaaagacttaacaatggtcttctcgttttaaaaaaattcccactgtaaatgtgattctctaagattcctacggaacttttggagagaaatatattgaagagaaaggcctcagaggctttgcaatgaatgcaaaggtgaatgaaaatcaggtgacagtggacaaacaaaatagcttctatggtgagaacagaacagtacctgctctaggccaggtgtggtggctcatgtctgtaatcccagcactttgggaggccgaggcaagcagatcacctgaggtcaggggttccataccagcctggacaacatggtgaaaccccatctctactaaaaatacaaaattagctgggtgtggtggcacgcacctgcagtcccagctactcaggaggctgaggcaggagaatcgtttgaacctgggaggcggagtttgcagtgagactccagcctgggctatagagtgagactccgactcaaaaaaataaataaacaaaaaataacagaagaacagtagccctaaacaaactagaataccataatctcataattggcaaaattctttgaaacacttaaatatgttttaacagccaaaaataaaataaaaaaggttaagggggtctctgaaacgacagtgattatatattacaactaaagattctatctttcccaacactgggtataaaatagtgagcacagaggctaaaaatgaggaaagtcaaagacccgtacatgcagcagagtccacgttccttgacaatatatgcaatacctggctattaatacatcttttgataaacccacatatatatgtgttgaaaaaagacaaagaaaatataccaaatatgttatgcatttgaatgacgttcccccttcttttgtaaacaactttagtattactttataactaaaataattcaattaaaaatatacttcaagattatatccaactagaattaggatgaacaaggaagtatccttgtatagataatatttacctggttcttccttgatgagtagtgtattttcttctggataggcaacaggtggctgcattactgagcaatcttctaaattcgtttcattattaggtggaatattataaataaatctttttgtagtttggtttttcctccttgttttgccagtctcttgaattccctgggagcccatattattccaaataaacacttttgtttgaccttcagattcattttcagccatttcaggagatccatcctggacccaactactgtcattcatttggtagttttctatttggccctcgtcgacattacaaccatcattttcaatctttacattacttgccaaattggtaagattccgtgttgcccaaaaactggcaattttttgatcccgtgatgaagacagaccatctctattaactggttttctattattatagtccacaactacagactctggagcttctgatttaatgcttatatttaaggcatctttaatgaaatttcggcaagtttgaacaacttcactcatttgaagatagctggccacggtcataacttcaatggcattttggcttgtgagcaccaggttaccagaatacaagaagtccaagatgactgaaaaaccttgaactgcagcaatatctaagtgggtagtattgttttggttagggctttctttgtttgaaaagcaatataaagtcttaaagaaacggctgcctgcaaccaggatgttcttatgagctttgaag

SEQ ID NO: 40699 - DNA, 2300 bp, Homo sapien
ttctgatctttggctaactcttgggagttatttttctagctaaattcttttaactacatctagccatgttttagatataaagacaaagctgaagactcactgtatcttcaagataacctaaaataaattggaatcctattttatttgctaaaaataatctcgatgtttaaattttattctaatgttaaccatgtaaatttactactggattttgaatactttacttccatgaatagtttcttcatagtatattttcctctgccttaaatttggccattttgccctgactatgacctgtcttgtttaagcctaactggctaacaaatgcagagcgaacctcaaaaggagagcattgttttcacttttaaataaccttcttcagggattttcaaactgtgctctagggtcctaggggctctttgaagatgcctctctagcctgtccgggaaggacacagcagagtaggtggggccctgggccttcagctaaacctcaactacagcagcttcacttttatcttatttgttaggctttcagggttttgtgcttaaaaaaaatttttttaaccattaatttaaaaacactcatgaatgataataataatagtagcttttctttatagagcacatatcttgtcccagaccccgctttaaatattaaaaatatttaaatatttttttaaaaatccctctaaaatgtgctttcatcatccctgttttacaaattaagaaactgagacttaaggaaataagcaatttacccacagcgtcatagctactaagtgacagattctgaattcaaatttgggtgcgtcaattaatgtattagtttaagccaggaatgacaaatacagggtaagtgtaccctcaccccatattcccacacctgaggcagacaggactaatggatgaaaacagtcttttttgctaatcaccaacacagccttagaatctttctcagcaaggtgctatgggccgtcagtccaaatctattggttgtggcattaaatgaggcctatttacttcccctactttaaggtgagatatttgtggccccacacttcagaataggaagtctcttcagccctaaaagtgtttgccagttgattgttttgatattactagaaaaacaccaaattatctttgatcctagatgtactttatcataatgaagttttctgtgaactaaaatccctaactgtatcatcttcattctgaccaccttctaatacagaagttttgtttctgtatttatatatttgtaatctgtataatttatacattgataattataaacaccatacagtcctcataatcaggatcagtacgggtttttaaaaaacaaaaaaacattcactttgagtagcctagtggaataaagacctaaagtaatttatattctgagacctaatattttagctgtggagtggaggtggtgagggagaggatggagaactcatgcttggggtaagtcagccagtttccatatagctgagaatttagtggtttgaataaccttcactgtttccactaccagcatgccctgcccaagaatgtcatagccacagggctgggtgaatgcccaaacattttaaaaaaggagtatacacaaccaacccccagctgattttttcaactgctcttgccaggagggaaccagtagttcctgggctgtacccattcttaccagggagagctgggtgcaattaaagtttttcctgttaggtgcaagactttttgaatgactcatcatagttcctgcttaagacgtgtcaaagaggcccaaggctatatttaggaacttactatgaaattgcctgtcagttccaaccaatttttccaatatagtatatatgaagagttagtagcaagtaactttaaatacatgaaaaggtttttgttgtcattttttgttgttgctgtaaactggtattgaagattttcttaaacggatggacattcctttcattgtgaaatgatttaacacccattcagcatacacatgactatactggaatgaccctcatatgaccattgtcatggaacccattaaattcttgtttaaaaaaagtttgaatatgtcttaaaatgtcttctatatgaataaaaaggatcttcctaaaagctctttctgatgcacttttttttctttttttttttgagacggagtttcgctcttgttacccaggctggaatgcagtggcacaatctcggctcactgcaacctctgcctcctaggttcaagcgattctcctgcctcagcctcccgattagctgggattacaggcatgcgccaccacg

SEQ ID NO: 40700 - DNA, 2300 bp, Homo sapien
aaagcacattttgctagttactgacattactgagcttacttaaaagagagctaccttgttattctctgagagtatcccaagccaccttgtttacctaccattacaatgtttagtatgataagcccgcatataaaccctagcttgtcccaggcactcttgtaagctgattgcatttattcactcattactctgcaaaacaactttactactatgatccccatttcacagatgaggaaacaggcacagaaagaggatgagtaaaagtaaagctggtaagttccagagtcaggattcggacctaggtgctcctgagaccatgtgcctaactactagccagcttgcctcacacctttgtcctcctccacctcctccatacctgtctgcccaccccttgccccgatctttccttttcatggccagagaaagatcctgctgcctcactctaaaatcatctcccaaatcaacgaagctaaatttcttccaattgggatgaaaccaccttaatgttctttcttaattctttgcacactctagctgatactgattattcacttattggctagcccctgctattccatgctttgatcagacacacccatctcttaatgttctgttttcttctctctgaattcctgaacagaatatttacaaatataaagtccaacaagaaaatggtgtgatctaaatggggtttcggaaacataaatctggtggtggcatctgaggagggaaagggagggtgtgtgggtgagaaaatgggtgtgtagaactgttagaaacttccacttttgaagtcacaaaatgctgtaagagctttgggaatggaaaggaaggggtggattcaaaatgcattttagaaagaacaatgggttggacttgtgggcaattgcctctagggataaggtagagaagggagttaaaatgataccgctattttgggctcaaatgattataatgagagtttcatcacctgaaataggtacatcaggaagctaatctgattcagggagaacaaaaagttcattttagaatctttgtcatcatccctgttcaacagttggaagccaccataagtgagcatttaatgagccccattcaagtgtctaacagagcatatgatgttaaatgtccaacaataattaactgaaggtgaatacaccttttattctggccccacggaggtgcctaccagggtatttgatgcgtaagatcctccccagccctcctctacagggatggaattgggggtatgatttgaatgtaagaaatacgacttaaggccgggcacggtggctcacacctgtaatcccagcactttgggaggccaaggcaggcaaatcatctgaggtcaggagtttgagaccagcctggccaacatggtgaaaccctgtctctacgaaaaatacaaaattagcatggcatggtggagcgcgcctttaatcccaggtactcaggaggctgaggcaggagaatcgcttgaacccaggtggcggaggttacagtgagcccagaccatgacattgcactccagccttggcaacaagagcgaaactccatctgaaaaataaagaaatatatataaataaaaattaaaataaataaaagaagaaataccacttactacatagcctaaccccacgcaatagcaaatatattttctttatcacacctaaaaatcgtcagaaaatggcaaaattagtcatgttatgtgcttgatttccagatttggtcttacttcatattaatttcttaagtaaccaactcaaacgatcttgaactcccacccatttgtttcttcaaagtcctgaacaatgccagaagagagtctacagatcagacagtgcaaacagaaagcttcttggaattcagccattaaaatcaggcactcaaggtagaatagcaggagtaaaagctgaaagacctacacactcagcacagagccaaggcagctcaatcgcagggcctagagtggtgcgttcaaagagtgtgagattggtagacaatcgctcatgaaacagtgtttcgaaaatctaagcgactctgatgattcatattaggaattcatcccaaacctcagattggtacaccttccttgatttcacacaagctcaggagtagctgccatgcacatcagtgtccattaaaatgacttgtagcaaatctctacgttcaaagtctaactttgacagacaaccttacttccagcgaagtctactcccctccctccggagggaagaatgggctgcggttaagcgtttgccctggtgtcagggccaactgcttcgaagcgccagactttc

SEQ ID NO: 40701 - DNA, 2300 bp, Homo sapien
acatttacaatgttcaataccttagctatttgtgatgggttaatcaagctcttaacaagtctttgaaatcaggagaaaggaattttatgggtaaatggcggtagtgtaatcagtgaacatctggggtacaaagcatgtcagacaagggacccttgtgttggaactgttctgtattttaattctgtttaattctatcacacatgtagattcgatgaatctacatgtgtgatagaattaaacagaattaaatacacacacactactgcactgtaaatacacacagaattaaatacacacacacacacacacacacacaactgtaaaacttgtgaaatctgaacaaggtggattgtattgtcaatatcctagttaggatattctactgcagttattcaagatgttaccgttggggaaaactgggtacattggacaaaactatgtacacataatctctgttatttcttacaactgcatgtgactctaaaataatctcagaattcaaagttcaaaaaagaattgctgcagagaggacaagactggtggatgtcagaatgcagagtcccgggttttcagtgaaaagattgtgggagcccagagaagaggacagaacccaaatctaaggggaagagtggcatggaagggaagatgaggaatgctcctagggaaaacttcattttcctcctgtctttaaattatactgaggagaatatagtctatcaccaagtcataattcctagaacaatcatccatcagatgtgaaagcaataatagtactagatgacacttactgagtgctgccagctgctggtttctttacatgagttatcttgtttgatcctctgatgtcctatggggtaggtactattattatatccatttttatagatgagaaaatcaaggcacagagaatcaagaaacataactggcaactggcaaagccaggatttacctgatatgctcagcagtgcagcatcaacactattgggtgctcaccatgtgctaggtatacttccctaaatgctttctctttatgctgaagaaagtggcctatcatatctggaaaattctctgtcagatactggcgtcaaattacatttgtttgttgtgtgcttaagtgtcaggcactttacgtaagtcatcccattgcatcctcacagcaagtctggatgtattatctccacctcattgatgagaaagccaggcctagagaagttggctgtcttcaaaatcacacgaccaacatgtgcggaacagcaaaggcgctcagccgtgaactccagagctctgagcgctgtggcctccaactcagaaaccacaacctcaaagtcatttaattttccccaaagctagaggctcctagtattcactgaccaggcatgaatctattttatttatcctggtatgcaaaggatagacatttagcatactcattttatctagtataacttgggaactttctttgctatgtgaatctattagccactcaaggcatggacaagctctttttagtttcacggttcaatacacaacagcagcacacacaacacgatgtttaataagccttctttaatgatgatggtcatgactttttgctttgaaggtttgcaagaagtgatgaacatctctaacataagtgatctcctccttccgtttctctcaccttcgtgtcattccagagcacctagtaggggactggggatttaaatggttttctatctatcagtccctctgagtgaagtggacacattctgtgctacatcatcgccctgtaatcacaaagactggacacacgaaaccatgaggaacttgtcaggggaatttcttgcaggctgatggggtgaaccaaataaattcacagcatctcagccgcaggctcggggttacaatgcggattcctcctgggcggcgggccccagtaggctttcacttttctgcaagggcgcacgcccactccgagcgaactccacgtcctggttttcgtcctcgcctccttcccgccggcagccggctgcctgtaaacacgcgggggttcgcagaaagaggcggctgctattggaggagcccatccaggcctcccctacgcctagctccggagctgtcagttactcgaacagtgcaacgagattttggcgccacagctgggagtgaggcttttgttccataacaaaaacaagcgcctgagtggcaaggctgccagcgcccagcccagccgagcaggcataaaggagcccgcgtcgcggatgtttgtgacctgtcattagagacagctccctcagcttccaaacgatcacatggagaca

SEQ ID NO: 40702 - DNA, 2300 bp, Homo sapien
tactgtacgcctgtcgtgtttacaggcacaatatacatacaatcaaacataggaagaaagaagttctgtattacgcagggagtcctgcatttatataattatagagccttagaagacgttcatgttgattcaaagattgaggaaaacaacttcatctctcagaactctctctgcatacattgtaggtaaaagtctctttttcttcagctttttaatattctttaactttgaatattcaaataaatgtgacagtgtttcacctggagatgatttggtccaattgaaccacatttgccaaaatggcttttattctccccgttttaggaggcaccctggtttgctgcgaagccacccctgccgtcttgatgtctgtgctcagggatggctgaaaacagtcacagctttatcactgaagcaaacgaaaatgtaaatactttttcaaagaagatattgcactattatcaaaaaaccaaagtatttgcttattcatgacacttgagaccaacttaaaggctatttcttttcatttagaatgttctagaattgagcaaagcaaatattctttaaacaaggcctctgtgatgacagatcatttgatatacgactccatttttaaaatatctgtagctcttaaaatatttcacacaaggaatctgaccatttctgtttcgaagtattgggacagggtgcagtgaccctgtgagtcccagcatccccacagtgacaacgagctttccttgatggacacagagcacaggctttggagtctgagacagctggactcatccctccctgccacttagctcctgtgacactcaggggaagtcaccgctctgctgggatttagcttccatctctgtaaaagggggattaacagtgcctcctacacagggtggtgacagcaattaaatgaggaaagcatttagcagaatccctggtacataccaggtacggaaatgtactaggtagagctcttatgcttctcttgcaattgtttataaataggtcttatttattcccagggatgtattcttagcacatacttcattcattcatttgaaaatgcatttattgggtactcacagcagggtagtgtaaacatactcagaatacataacatactcagaataaataaatgcaggtgaatataaagacattctatttcattagttacattgaccttaaaccttctcagacaacagtgggtgagggagatgagagatggcagtgggtagggagatgagagatggcagtggattagggagattagagatggcagtgggttagggagatgagagatggcagtggggggcaggggcaggtgatgagttgcatttttgcaaaagctatataagaattgttatatactgttctgattttttttaatgaacctaaatgagcatggatttatttgctatggagtacttgaaatctttatttgaagacattaagaatccatccaggccaggtgcagtggcacactgtaatcccagcactttgggaggctgaggcaggaggattacttgagcccaggagtccaagaccagtgtaggcaatatggtgagacttcgtctctacaaaaaataaaaatattagccaggaatggtggcgcatgcctgtagtcccagcagtggggggcaggggggtggttcaggagaggattgcttgagcccagggaggtcaaggctgcagtgatccatgattgcgcccctgtactctgggcaacagagcaagaccctggttgaagaaaaaaaaaaaaaaaaaagaacaagaagaatccacccccaaacatatcaagataagacatccattgcttcaaacactgggccaggcagctgtatgttcccgctttcgttttcaggtaagaaaaatgaagacctagaccatggaggggacttgcccagagtccaatttcaagtccagtccggggctctcctcagcatccagcacacgcttccctgactttgcgcaaaggtcttgctcctgacagggaccgaattacagattctgccactttacccgagaattactctccaaacgcactggtctctttgcaggacacagctctctgcctccatgtcaccacctttgaaggactgactgattccctcggctggtgccagtgcctgctcctgccatggggcccgcggggagcctgctgggcagcggacagatgcagatcaccctgtggggaagtctggctgctgtcgccattttcttcgtcatcaccttcctcatcttcctgtgctctagttgtgacaggtgagaaccagagtgtatatacctgtgccttaaactaa

SEQ ID NO: 40703 - DNA, 2300 bp, Homo sapien
ttctaatagttttgtagtttacgcttttacatttaggtatttgatccattttgcattaactttttctgcggtctgagttaaggatccaactttattcttttatatatggctgtctagttgttccagaaccatttgttgaaaaagcctgttctttccccgttgaatagtcttggcacccttgccaaaaactcaactggccatataattgaaggaatataaatatatgggtttattcctggatgctaaagtattgatctgtatgtctatccttatgactgcaccacagtgtcttgatgaccttgtttcgttggaatatttttaagtcgcaaaatgtatattttgaaaattcaaaactgtgcaccatttttatattattaaattaactgtcaaatcttgtctccagttttcaagtcaggatcttactcatatctggtgatagagaaagcacatccaaacattatttttaatacacattaatagaatttgacattttttaaaaaattgttagttctttaaattttaccttttaattgcagcaatttgatttagataattaaatcttgctcatatttctggctaattcaggagaattccctggattgaccatgatgacaagaaaaagtggagaggtttatggttggaatccacatctaaatatatctgcatggcaggggttcagaaggaggcttgacttgaagtctaataaaagagtggaacgatggcttgggaactcagttgtctatcaagccctgcacccagcgaagctctgtctcctagttgatgagattgacagcagaaagacctggagtcggcttagaagaagacagcccatgattgtgtgtcttgttctgatctttttaaacttattaaaagaaaataataatgtagctaaatgcagtggcaaacaaaagacagcagtttctcactttctaactgtcagggaaacaatagatatacctcaagataatataaatattctgctgactctgctatcagagaaagcaacacacagtctaagatgataatatgtggttctaacaaaagaacatcagtagatgcaaatctagaaggctcacgttccactccgtttgttatgtcagaaatcaggaattatgcctcagttggttaaaatgattgagaggttctgaatcttagtcaacagccaagatattctccttagagcataaacacagccgttctttcatccgtttgttcgttcgttcattcattcattccgtccctctcccctcctccctttcttactgcacttgtcatggtgtcttatgtaaagtgagtgttcaatatgggagagacttatttgaggatgggaagagaactagagaggaagggggcaggaggaagggctaggcaccaaaaacagcagaacaacaggtaggattggggagctgttgaatcaggagggagagcgagggaagtcgcccatgtagcctctcttttctgaacatcttccccatttccacagcagaatgcgtgaagggacaactcggggctagatctgcatgtcgtccaggtgacactgttcacgctgcaccaaagtctccttctaataagaaattttcagaactgaatcacagcttaccttaccaaaaagtataaatgctcttttcaaataaatcacttgttttatttcaaattcagaaaacagttatttgaattttagtatcactgtagtaacacagaggtttacttggcataaactaggaaaaatatagaaagagcaagtaaattgatttgtatttgattagacacttacgtggcttttttattaaaaatttttgggtggatggggagataggaagttttctttattgaaatttttttatttaattattactgtctatagttgtgcctctacatttcagtttgctttgttcaggaaggaatataagaatataaatctcagtgtttggcataagtacactagcatttttacagtgaactgaacaagtatctttcacagtgtatatccatctgcctttttttctaactttccttctctttggctataggccaagaaagaagagagaactctcaccacaacatttcaaagggaatacattgccagaacttggaatactctactggacaaacatttcctccaaggtaaatattaccattgtaccaataaagggacacatcactagaatttttgaatggcagtggtacagcacaaaggtttaattgtttagtctcatacagacctagagtgacataagagaaagagagagagggagagagagagaagaaagcagtgctgttggggtatcctgcagcctctt

SEQ ID NO: 40704 - DNA, 2300 bp, Homo sapien
agaccgagagtatagcccatagcatctaccacaagcacaagaattgatcctgacacttttggttctctatctaggagtggctttgaaatacatttgagttccaatttactgatggcaaatcctgatatgaaaaatttggaaatgaaaaacaatcctcagcatgttacttggtgaaaagagagcagaggaaaaggacagaggctagagattggctcctgcctgcattcgtgaatttgtctaaatcacttagcttctgagcctgggtaaaatgaggatggtaattacacttgtcaccagataacgtgaatattgcccttcaaactcctcaatgaagcctgcactgtggaactgcaatgtcctaggaccgggttgctcttagaacattttgttctaagtgtatcctaacaagtgtagcaaaactggaagacacaaaatgtatttcctccccacaagaatgaaagccttcctaactccaaatttaggcacagcctgtaaaagatgtgactagtaaacacagaaaccatttgctttataaggtctaaattgtcctcttctccagagttgtagaagccaagtccaacacggagatccctacttttattcaagttccaccattagtcaactcatgtccaggatgtcttctttaatatataaaatggggatacttttttatattattattcaacttaagagaccactgtgaaatttcagtgaggtaacgtatgtgaaatgttatactccataagttcttaaacacctgagtttcataccatgctctgaagcaagaggccaagtctggttcctgggtccgcttccccaatgggcttttccaagctgtaggctgagtctaaactgtttcctcccacatacccttccctctgcgacacactaacaacatcccttactccatcactgtcttccttaccctctcctgatgagccttcttccccagccacctttaagctcccattaatgatatgtgtaacgagtgttcaatagagtgtgtgtgtgtatatttaatgccatttatatgttttttcttgctaagtaatgcatcataattttagaaaattgggactagtcagataaagcacccgttggtttagaatccctgactcaaagtcagatgtcctgagttctagacttggtttgtctccttgtaagtgcaaaagtttattcccaattccaggttgctagtgtaaacttgaagtttggcccaaacaaaacccctatcagatttatttagagtgttgatgccaaatggaattctagaagcccacctttgccaggggctgagccagaaccactatcactgggggtacggcctgggcatttgttctgcgttttttataagcccctcgggtgactgtcagacaggccaactgtttcagaagctctgctccaggctctagatcacacgttaagtagcaaggatgggggtctggacctccagtattggcatcctccgagagcttgttagaaaggatgtctccctcattatcccaggcctactgaatctgaatcttgcatctcatcacaatccgcaggagattctgtcacacactgagggtttgagaagcactgctgtaccttggtatctttagatacctactgatacctgggtgggccccacccagacattgtcctgtacttgttctgggatgcgtccggggcaaagggttcttacaagctccccaagttattttaatgcacagccacaatagaagatcactgtcccccaaatggcaaccctttacggttaagctgtaacctgaattaaattggcttttgtgggctccccagggaccttaaggaccgcttaaacggtgctgtttaaaggacaatgggctcctgggacaagttcaaccacagagctttgggttcataaaatcagggcagggaagacttcctgcatcctcccgcgagcaagccaggccccgcgccggtcctcacccgtgtgcacccccagcccggccccgcccggctcgccccctcccgccccgcggcccgcccctcctcccccgtgacgtgccgctgcggccaggatcatgcgcactcgcgccccgctccccgcgcggctgctccgcctcggcgcctgtcattctccgcggcgcggcggcgagtgctggctgcggtaccctcccgctcgcttgtccgtctgcgcgcccgcgatgtgaccagccgactgggggcgggctggcggctctgcctgcggcagcgcatcggtttttctcctggcaggtccctaattgagccgtgattcccttggagccagagacacccaccaggggctcggagcg

SEQ ID NO: 40705 - DNA, 2300 bp, Homo sapien
caaggtaagtagcctagaataggcctttacttagcgggtgaaggcagtacttaactgctttttcacagcttaaaatccattaccattactctggagaaggaaagaatctgagtagtagagcttaaggggcattagaaataatctactccaatcatacatctgtatatgcatcagatgtggtgtctgaaaacaagacattcaatgtgtttccctgaggaacagagcaatcaccatgcccttttttgttccacaagatacaataacggttattattctggccatatagctttgttttgtctgtatgttttaacacaaaagaattatttccactcatcacatcagagattgtgtttaaacttaagttttaagtaaggccttgggattaaaggctatttcttaagtacctaagtatctagtactccagtgccattatctttttgatatttctgtaacatgttagattatgatcatttaaaaattagtatcagagtgctgcgtcctattattactacatatagtctatacagaaatggataagacatgttgaaatagcacatgaagagctcaagttcaaacacacaggcagccctaaggagctgcctgaagtgcctggtagccagggcttctcatcactgagtaaatgatgcactcagcttccctcagaacacgaatattttctgagcagtagggcctcgggtgtgggacatgcagacccttattgggaaaacaattgagtgttaaatggtaccacaaggaagactggtgtgaccctaaactgagggcagggacttgaaatgaaagggatgcagttcaggggagtacatgtcctgcagcatgttgggagatagcaaaccaacctcagatttcaattttgtcaaggatgatacaagaactagtagtgtctcggtgactgtggtctactcagagctccatcacagctaccctgagcccaaggcagtcaggtgtggtctgatttcataaggtcttcagtgagacggacctggatggggattctggttctaccactgtgagaactatctttgccctattttctcttttgaaaaattgggataacacccctagcaaaaatatagtggagaccaatgtctataaagtgcccaggaagcacatctagcacttagtagctactcaataaatgcacattaccgctatcgaaacggccagcctgtgtggcaacttcctcacctcagtccatctgacttccaacaggcacccgggagcaccaagtaataaattgtgaagagtacactttgaaacgtatcatgttctacgcacatgtgtagggtattattatagttcaagagaaagagggaacccgctggtgtctgagaagaaacccgctggtgtctgagaagaaacggtgaagggtgcactacgaagggaatataaactaatcaaacattcttgaatggcaatgacagtcactaaagttgacacttcctgcagtcttttagtttagaaaccacacttcccgagacgtcccccatcccaacagggataaaatcctctagctcaactcaggtatatccccactattgggccagggagacctgcggatggcgagagcaggttctcttaggagggtgtggattgtgagcttgtgcgctggcgaggagcagaaggtcagggaggcaccgtagttaatgaatcaataaaccaaacagccgatcaatcacttcctgcagtccgagtccggcgagggctaatcgattggtccgggtattttgaaaggaaaaacggcggtggatatgttgtcaaacggaggggtgcaggagaggcggggccaggcctccaggtgacccctctggcttcctgggcctgcagaggcgccgaaacgtgcaggcgccggcgtccatgaggcgtggggcgcgccgggcgagtccctgcttgcaggaggcgcccgagaggccgtcgcgtaccctggcaagaggagctggttagcacctcccgaccccgagaaggcccagggggcgcccggcgggcggggcggggaccgggcgaggcccgcctcccattggccgcatagcgccgcccagcgcgggccgccgttataaagcagccgccggcgccgggtgcctcacagcacgctgccacgccgacgcagacccctctctgcacgccagcccgcccgcacccaccatggccacagttcagcagctggaaggaagatggcgcctggtggacagcaaaggctttgatgaatacatgaaggagctaggtgaggcacccggcctggcagcgcctgcaacgtggcgtgttgtgcggtcgtctgtccctag

SEQ ID NO: 40706 - DNA, 2300 bp, Homo sapien
ctgtgcctttggcccatatattggcctcagaatcccatcacggtccaaacttgtctggtcagttctattaatagcagtcaggtacaattgctgataagccttaagtagaaaatttttctcttggtctaatattgcttcaaagttataagttttctctcttggaaatatatggctcaatgtttatgttttaaactccactgctgttcctatgtgcaacacagagtcagcttaaaattcacacagctttcttgtagcagtcccactgaatacaaggtctcagctctagtgtgagggtttgggagtccttcatttatttaggcagaaaacctaaatgttgaatgctgtactccttaatagtgtacagctaacaaaaaaaaaaaagttttgaaggtacaagtgatatcatcatttctgtaaagtgttttggaaaataaaataacatatccactaatcaaaagctttttctttcacagttgttttttctatcccagtacaatgtactccctccagttacattctcttgggtttaggattgggttagttggttagctgaggaattttcctattcaccatttctttcccaccttgagctattcaggcactgggattgtaaatgaaacttcagcccactgtatatgatttcacgtgttttactcagcttgaactctaactatgtaactgcaatagttatgtcacagctatgcgactgggtttcttgagcccttcttgctagtaattctacctgttatgagcaaattcatcatatttttgttgttgtaaacagtgccaacctgtttactaaatgtataaaacttggtaatatcagttgtctccagccagaattaatgctaaggtaaaaacaaacaacaaacaaacaacaacaaaaacaaacaaacaaaaaacctgctaggaaagatatagcagtaatcagagattctcaagagcaacacttatgttctaagtggatttacgtttgttccccttggccaaagactggggctttgatgtaatatagtaggctggatcttttgattttttacctctcttgatttttgagaagagagagagtgtttctagctaatcgtggtgctatcagcatcaggtgatctctggccagggcctccgtgcacgtagcatgtatggtatagtataatagaagcagggtaagatcatggttcagaacccgggcactggcagcaatgctgggttcaaacctgtcctctccttattcaacttttgggagcaatttacctaatgtccccaagctcatttttatcattggtaaaatggatataataatagttcctaactcttggaattagtgatataattaaatgagatcacccgtattaagcacttagcacagtgtctggcccatagtgagttgtcaatataaattagtactctttctatagaaaatcctctttataaaattgtagattcattttaaatgacttaaacacaaatagttatagtatccaggaacctgcttagttcagactttaagtatttctagctgaaaatctttgttgtgctcaaagaacatgttatagtgctacttcttgtttcatcacatgaatacaatttctgtgctctgctgcaatagactgacttctttgtctgcctactctgcctgcctgggatatgtgaactatgccaagccttcttacctatgaatacttcctcacactgctcccctacgtttctctcccacaacatatttgagactgttatcataatacttacagacattttcctctttttcttccctttcaataagaattcttaattgtgcagactcaggattgagagtgaccgacatgcctaaacacacacacattcattcatgatcacagaattcatgcagtcttttccaaagcatgaagggcctaagccttcttataaatgtaagattgatcaaaaaatttttgaagattcaaatagtaatctcattcattttataaatttttttggagacaaagggaagtattatgtggggttttcttttatcctattgggcgggcagctggccattgaagagccattcattgcttagtcccgacactgcctttccccattgggtctctgtaagagtcacacgctttgggcatccttgaaaagaatcttctgaggcctcagcattttatctgagtcttctgaatcccacttagaactgtgttgagctctcacccatcacgatgagcaacaaattcctgggcacctggaaacttgtctctagtgagaactttgacgattacatgaaagctctgggtaagaaatgctttttgttgttctgctga

SEQ ID NO: 40707 - DNA, 2300 bp, Homo sapien
aagggatgagatcatttcttttgcagcaacataggtgaaactggagaccattatcttaagtgaaataaatcagaaacagaaagtcaaataccacatattctcacttataagtgggagctaaacaatgtgtacacacagacgtacagagtggcataatagacaattggagactccaaaaggtgggaaggtgggaaggtgggagggggcaagggataagaaattacctatcagggccgggcacagtggctcacgcctgtaatcccagcactttgggagactgaggcgagtgggtcacctgaggtcaggagttcaagaccagcctggccaacatggcgaaaccctgtctctactaaaaatatgagaaaaaaaattatccaggcatgtggtgggcacctgtaatccccgctactagggaggctgaggtaggagaatcgcttgaacctgggaggcagaggttgcagtgagccaagatcgcgccactgcattccagcctggacaataaaatcaaaactccatctcaaaaaaaaaaaaaaaaaagaaagaaattaccaattgagtacaatatacactatttgggtgatgattacactaaaagtccagactttattacaactcaatatacatatgtaacaaaaatgcacatgtagtccgaaatctatagaaacaaaaattttaaaaaaccaaattgcagtgttagaatacacatagtatgtattcaaattcaatcatttaaaaacctgtaggaagcaaattaatttaaaacattatcaaaaacatccctctattaagatttgtcacttttatttactttccatctgaacagtcttattcaatgggaaacaggtggatcactaatagcaagcctacctggatggtacatcaccacagtctgtgtatctatgcaacagtccagagtagatgagcgttattactgtgccattaacaaatgcaaaacctaactttatcaggctttcatagcaacttgctttcctacagaaaatcctgttgcttacagaatttcctgccacaaacatttttgggaagccctcaggacacttacacaggcttgtgaatcaatcacatgctcagcaggtactgttcagtgggatacacagtgtagcgatgcatcactctgaaatattttagtttctttttttcccctaaatctgggtatgttcgtgggaatttgcagcacatgtgaacaacttctgtcattcttgcatgaggcaaagggaattgaaaaccacgattactttagaaaactagtttcacagattggtcactgtataaaagaaggatattggttttggtagcttgtgaccacacaccatttctgatctgaataaattcagaacttataatacagttcagaaattgaatgcagtttctcaatatgaggaaagtattttagaataaggcctatttttcaaaggatctgtggaaatcaatgctatgctctcatttaggagatggaaagagtgaggttaaattatcatttcgattaaatctacagtccagattactggtggatgaattgaatgtacttttttattcatataaaacatttgaaatcagaaatctggagtacttttaaatcccattatttattttgttttaatcgccaggtaattcctgagacaggagtgtcccgaagagcctttgcaattatgtaagaatctccgaggcagttcttatgttcctcaattcaaaagaaccacataactgcaatttaaataacaccccacacacacacacaaaataaggtcgaagtttatctcaaaataatttcccctctctacactgggataaatatgtataggaataatagggggaaattcagtgcactgagcattaagctgtcaaaacaggaatgtttaaaatatcctgttagtggtttaaaaataatttgtactctaagtccagtgactatttgccagggagaaccaaagttgagaaatttctattaaaaacatgactcagagaaaaaaatgcagaggccggtaatgaaggaaatgattggatctcattcccaattggtcattcctaagatcacatgttctgagcatctttaaaaggaagttatctggactcaagagggtcacagcaccctcctgaaaactgcagcttccttctcaccttgaagaataatcctagaaaactcacaaaatgtgtgatgcttttgtaggtacctggaaacttgtctccagtgaaaactttgatgattatatgaaagaagtaggtaaggaaatgcgttgtggaatgactggatttataatattttcttttgggaaaaagagttt

SEQ ID NO: 40708 - DNA, 2300 bp, Homo sapien
ggatcagttgaggtcaggagttccagaccagcctggccaacatggcgaaatcctgtctctactaaaaatacaaaaatagctgggcatagtggtgtgtacctgtaatcccagctactagggaggctgaagcaggagaatcgcttgaacctgggaggcagaggttgcagtgagacaagattgcaccactgcactccaacctggacaacagagcgagattccatctaaaaaaaaagaaagaaaaaagaaaagaaacatttgttttataatctgttgcttatacattcctggagattagtacacccatgtgatgtctttccaatatatcacttctctatggagttgatcaagatcagcaagcatgacttcattctccttctatccccggctctcatgcagtgtctggtgcacagcagatgtgcagcaaatcctgaattacaacatcactcaggagctgtggtatgtcttgtttgatttggtttatttagatcagtttcccaaccatccctgagagatatgcacttcgatcaaccacagtaaatgattttctactttaatgattctcaactgcataaaggaaatgagaagacaggaggcatgctgctcatctctcctggaaatgtgcagttgctgttgttgtatttttgtgggttgttttttcagttgagtactcaaacatccctagattttatcagattgttgacaaatgaaatcatattaacacctacatccaatgtcatgctcctgttcatgaaaaactctagcccttgaaagtccatccttctcccagcccctggcccccaggtgttcctgagagtcatcagggatgtctttcctgggttctcctggtatctgctaactatcccttcagcacaaggcttcctgcattggttcttattgcctatgagagtatcttcatgaccacagtaggcaagacaccctaatgccaaagccaggagcaccgtttttcaaagttcccatagctactgactgtggaggtgtcagagcagtgctgggctcctttccaatagggggactgcttctcctctgtctttgcagcaagctgttacttgggcctgcagtagagctgctcacatccacagccatgcacagggcctcaggaaaactgctctttcagcgtctgcctcgaatcctctctctgtccagtccaagtagctgagggtacagatatctttgtgtgccttccattgtcctcttcgtcatttcagtacaccaaaaaataaacaagcacttcttccacatctaccagacgactgagatcccccatatatcaattcagacaaataggcaatgacaggcctcaggttcaaacggtaaaactctatatcctcatctggactcagctgtggcatcctgctacacattttaagacaaatggaagcttgtttattcattagtataatgtagtattacacttggttcataattgtacaccataaacctctttctacctaactgttccaatctaagttcactttgttatggttgtaaggttaataactgggcaacatggattctggttctaattcttcctgaaaccatctgagtgatagtaaagtgtacaattaactgtctcgggcctgttcccccaaccacaaaataaagtgttcagtccacacagtttctaaaatccctcctaagcctgagagtgcatgaggttttgtgctaataaaacagaatattctttgcagtggctttcagtgatgttggtagtggatatggagttctctgtcataacagtttagtattacattaggatgtcaattactgccttagttctagacatggtttcttatcttttcatatataactgaggtgtacctgcaaggtgcgctgtattctatttattaaaaaatattattttcccaataaagtgcagattatgttgaatttagagggtggacataaaatgcatcataagaaaaaaatcaacatgaagtgcctctctgaaaatatcccagccttgcattgaacaggatatatcatcctggattctcatggccgcgaatgccaaagtactacatgatacaggcatgtgcaatttggcaagcaaaattattgatgcttgtgcaaagaaaggctctctcatattaatagtcgtaatattttactttggagttttatttaaacaacctcagtagtttggatgacagcttgagaaagccttaagagtttgagactgagtttgatgatactttctcgtatgttcgtgtacagataacactgttcacagtactttcctacaagacaaaagaaatatgaggtatttcagtatagttagt

SEQ ID NO: 40709 - DNA, 2300 bp, Homo sapien
gcctcccaaagtgatgggattacaggcatgagccactgcacctggccaactctttcaagaagaagaaacattttaagaccataactagtccttgtacctcatataatgtgatctcattgtgccatatattctcagtgtgtaaacttttgtagggccaaagaaaaaacttcccttttgtcctctgaaggtttggtgaaaatcaactgacaaaaggcagataaatagaagaaaaggattttatttgatcatagttttatgtgacttgggagccttcagaatgaagacccaaaggtataaggggacagtccattttatgcttagtttcaacagcatatggacagctgtgtagaatatggttggacaaagagggtataacctaatgctattagactggggaaatccagtaagacctgtctgcttagattcttcttggcctctctccataggaccctctttggaatgggggtcttatgacctaaactcagacagggtgagtcatataatttcttcgtggtcagattttacatagaaacacagggagaatgctagagtaatatctatctatctatctatctatctatctatctatctatctatctatctatctatatctctctctctatatatatatattttttttttgagacggaggctccctctgtcgcccaggctggagtgcagtggcgcgatctccactcactggaagctccacctcccaggttcatgccattctcctgcctcagcctcccgagtagctgggactgcaggtgccagccaccacacccggctaatttttttgtgtttttaatagaaacggggcttcaccgtgttagccaggacggtctcgatctcctgacctcgtgatccgcctgccttggcctcccaaagtggtgggattacaggcgtgagccaccttgcctggcctagagtagtatttttatgttttatggctggctttataaaaaaggggtcctgatttctgggacctgatttgggaaagaggaattctagcttctatgactagtctggggaagaatgtgggaccagagacaggagaccaaaaggagtcagaggaaaatttttccttctaaggctgcttctgaggccttcattgtggggtatcattttctgaaccccaaaactttgaactcagtgtgtttcactctctgctcttgctgtgtgacctgaggacaaatcacttaactactctgagcctcagtttcctcatctgtctgacaaagctaatcatacctttttcaagaaactgttaaaactttaaggaaaataatgcatataaaaacacatttcggccaggcgtggtggctcatgcctgtaatctttgggaggccgaggtaggcggatcacttgagtccaggagtttgagaccagcctgagcaacatggtgaaaccccgtctctacaagatacaaaaattagccgggcgttgtggcaggcgtctgtaatcccagctactcaggaggctgaggcatgagaatcgcttgaatccaagaggcggacgttgcagtgagccgagatcgcgccattgcacttcagcccgggcgacaaaagtgaaattccgtctcaaaaaaacaaaacaataaaaccccacacaattgcttgaagcatagtaagtcctcaataaatagtatgtaagtaaattatcaagaattgggcagttggttctggttatcagtttatttttttttaatctagtataggtttaccagctttaggttagcacctaaaagctgcataatcggaatcatatctgcaatctgggttttgtcaaaatagtactatagaataaatgggagaaagaagaaagcaagctaaatgggaaaccgtgaatgaatggaggacgaaagaagaaaaaggcaaagtaaagagagaagtaatgtttaaaaactgagagatgaaaagacaagcaggagaaaagaaccagaagctagaatgaagaggcagtatcccatgctccagcgcgggtcaggacccggcccggcctggcagaggctcgcagggcgcagctcggggcggggcccagcaaagcaaccacgccccctcaggaatggagtttttaagggcggaacttcctgttgcgagtagcccctctacctccggaagagacgagtgcggtaacaccgttcacagagctagccggacgtcctccgactcaaggtgagaccgttattttcctcaccgcaccctccgggttcagcgggcgctgtgggtttccagggaggccccttccctcctcaggagcgggcgcgagcgccgtgcgcggtcggcgcctagggtggaggc

SEQ ID NO: 40710 - DNA, 2300 bp, Homo sapien
ccttggccaccaaaagtgctgagactacaggcataagccactgtacccagcctcataacacctttataataagcagacgttattgttctttggctctccagaaagtcaacaagaaaaatgctttgagcatcccaaaaaatagttgccatgaccttgcttttgactagtccacttttattttgactggaccacttccacctcttggtagctattgctctgtttgtgctttgttttcgggattattctggtaaagccatgtttcatctcctgttacaattcttggaagaaatccttcaggatcttgatcccacttgtttaaaatttttattgaaagacaactgaaattttaagtagaaaacccaccaggagaacaaaagtactcttgtctgtagctgatctgggtgcaatagtttcggtacccatcaagtggaaagtttgctcaagtttaatttttctgtcagcattgtgtaagctgaaccaactgagacatctatgatgttggatattgtattagtccattctcacactgctataaagaactacatgaggtcgggcgtggtggctcacacctgtaatcccagcactttgggaggccaagacaggtggatcacctgagatcaggagttcgagacaaacctggccaacatggtgaaaccccatatctactaaaaatacaaaaatttgctgggcatgatgacaaacacctgtaatccctgctactcacaaggctgaggcaggagaatcacttgaacctgggaggcggagcttgcagtgaaccgagagagcaccactgcattccagtctgggtgacaagagtgaaactctgtcctcccaaaaaagaattacctgagagtgcgtactgtataaagaaaagaagcttgactcagttccacaggctctacaggaagcatggctgggaggctcaggaaacttaaaatcatgggagaaggggaagaaagcacatcttcacatggccagcaggagacagcaagtgaagagggaggtgctacacactttcaaacaaccagatcttgtgagaactctatcatgggacagcactagggcgatggtgctaaaccatcagaagccatgcacatgatccaatcatctccctccatgtccctcctccaacacttcctgtcattacacttctgcatgagatttgggtggggacacacagccaaaccatattagatattgtctgtgctttttttcttcacaaattgctgtgaatggtctgctgctacgggcttcatcttcaacattgtctcatctcttaaaatgagttatccatttgtaaactgcagatctccttggggtattgtctccataacctttatgtgaagcatcaatgatttcaccattcttccacccaaacctcaccataaatttgatgtgtgttcttccttcaattttagcagaatttatgtttctctgataaaagagctcttttctaaatgtcttatcatagttagtgtccctcactagatcctgttcagacatgttacaaaaagtttattctggtgcaaaaaaaaaattgaaattcatacacacttttttataatacatattttccatgaaaatttagaagaacacttatatagatgaatgatagattatcaaagttttcctagatttgtcaggctttgttcttcacggttttcaaatgaaagggcctggagaaaccgaagaactaaaagggttgcagaaagagtcctaaggggaaagaaaaactgatatactcacatcttcgacctaggcaacaaaagttatgagtcaagatatttggtcacataactaaagataacttaggttttatgacatttttgttttttgttttgtttttgtcagttaaaatagggaaattttaactgaaatatcaatgaacagtcccattccctatcctcaccattggtacagcggatcttgtttttcttaatgtggtacatattaataaaatttatgagacctaaggtctactgcatttgaaagattaaccgacataaatggtatacttttataaaactcgttaaaatgacaaaaaggtttcacatttttgaggaacaaatgatctaaaatacttaatacaaattggcattaccttgaacacattgcatcatgattacatgaaagagctgctgaaatggtcatgtgttcagagactactacatctgtaggcttaatagtaaacgtttggttggttggttggtcggctggttggtttgctgcttagcatcaggacacccaccccttgtgtgggaaatatacaagtgtgtgagtctatgggttgaaatccaaaa

SEQ ID NO: 40711 - DNA, 2300 bp, Homo sapien
gctaattttgaatttttagtggagacggagtttctgcatgttggtcaggctggtctgaaactcccgacctcaggtgatctgcctacctcagcctcacaaagtgctgggattacaggcgtgaaccaccatgtccggccgagattccctcttaagaaaccactctttgctcatccataagaagcaacacctcatccattcagcttttgttaagagattgcagcaattcaatcacatcatcaaactctacttctacttcttgttttcttgccaattccaccacatctacaattataagatcactaattgcagatcacaaaaacagatgtaataataatgaaaaagtttgaaatattgagagactcaccagactgtgacacagatacacaaagtaaatgcatgctattagaaaaatggctctggtaggtcgggcgtggtggctcacacctgtaatcccagcactttgggaggccgaggcgggtggatcacttgaggtcaggagttcgagaccagcctggccaacatagtgaaaccctgtctctactaaaaatacaaaaattagcttggtgtggtcgtgggcgcctgtaatcccagctactggggaggatgaggcaggagaatcacttgagcctgggaggtagaggttgcagtgagccgagatcatgccactgcactccagcctggtgacaaagcaaaaaagactgcatttgatttaatctgatgcaacacaaaatggagtgccataacatgtgctatgtttgcacttacatacaaagtagtgtagcggatgctaatttagtagataatcagtatgcctatgttccaataactcttttatcagaaagtataacacttaaatatatgcccagataccaataaattttagtgacaactaatactgtaatgcttagcacaattacttgcacatacgagaagatcagcacatggtcatgcagttgactaaaactatgccagaaaaataatgaggttgagaagtggggaagtaaggctgacaggaattgagttaaacctaaggagaatgaagaagtcctatcaatgattagatagaaaagagacaaggcagtctggatggaaggacttatattattaatattagcaggcttactggtggtaagttaggtgtggtcccagatagtggagcaaactagtctggtggagacaggagctagcatccttagtactggggactggtggctgcagcaggaactgtctcctaaagagaacaagatgtgggagaaagggaaaagactcagtttctagcctctatttctaaattactcagaaagcagacaactttctcaggctttcgattagggttttcagttgaggatgcttagaaaaattttaaagattcactctccccactccactctagcatctttccacctgcttgcagacaaatttcaagtagcaaatccacaaagagaataaaagtgttttaaatttacataagtaatggaaataacaatataataaaaatgagttctagtttaaaaaatcaggcagcaaatgctagggaacttcaaaaagttcatggaaaaactgaaagataaaaataggccagggctgggcacagtggctcaaggctgtaatcccagcactttgggagactgaggtgggtggatcacttgaggtcaggagttcaagaccagcctggccaacatggtgaaacccatctctactaaaaatacaaaaaactagccaggcatggtggtgcatgcctgtaatcccagctacctgggaggctgagacaggagaatcacatgaacccaggagggggaggttgcagtgaaccaagattataccattgcaccccagcctgggtgacagagcaagacttcgtctcaaaaaaaaaaaaaaaaaggacaggtgtggtggctcacacctgtaatcctgatactttgggaggccgaggcagcaggatcactggagcccaggaggtcgaggctgcagtgagccatgatcttgccactatactccagcctgggcaataaagcgagaccctgtctcaaaaaagaaaacagataaaaatataaaacataaactttatttttcaacataagctccatcaagtttaagacactttcgtaagcaatgacgccagccacttagtccattgcaaaataactgatggtcctggatatttaatcatgttaatgcagtctgtttcttaactaaagaaaaatgggtgccctttaaagtttttttttttttttaaagattaggaaacaggaagtcagaagaagcaaaattagacctcctaaggtagatgcctaatgatt

SEQ ID NO: 40712 - DNA, 2300 bp, Homo sapien
agacatttctgagggagaattgacagtgtttaatggctacttccatgagaagtaagaaaggagaggtggagaataaatccaagattgattgattggttgaatgaaacaagtatgtggcaggctgcctttgttagaaaggggatgatatggtaggaaattatcccattttgggcttaagacaccatgacaaatgaatgcacatagatagatctatcagacagttggaaatagttacttcatgtttggtaaagtgttctcagggctgagaatatgggtatgagagtctttaatatggaagccatgggaatttcacttgcatgaggatgtaaattgataaatggaccaaagacataaacatagtgaaatagatgtgtttaagcagcacctagagaagaaatcagcaaaggagactaaatagagaaagcagaggtagcaactgcaatcttggctacgctaatcatctgatgttctatgaggtgtccaataactgaaaaaataaaaacatatccataataattggactgataaaacatatatttgccacctatctagaacattccaaacacctagtaaaattccaggaaacctgttattgattgatctgatcaacttaaacataaaatctaggtaagccactgatccctagatccaagaataccaaaagtctttagtacttgcattttttgtcctggttcatccactaatgtgagccaatcatttaatgtctatgaactggttttctcatcttaataaaagaaaagctatggaggctgggatagccagatgacatcttataaagtttctccagagactcaagcaattctgagacggaaatcttaaatagattggctcaagagcaaatgcagaagaaatgattcccctttcctagtgtcacccttcgcccttcctcagtgattattgattgggaatctccaaaggtatataggaggcatcgaatacttttctagttcctgtcaggagtgcaggtgattgtcacccatccacgctgaatggtgcctggcatcacgttggtggaatggcattcatatgtaccccacccagaagtacctctccttcagtacctttgcagtggctcaccaggcacctgatactcccctacatcccagtggaatcccataagctttcttcaggtagttgtgctaaatgagtctgggttctctgaggaactctgtaaggttcagtacacattcaggggctcaggagttaagactttttttttccccctaccagaatttaaaaaaaaaaaaaaaaaggacaaagataaagaaatattaactttttaaaaagcctgatgactgttttgcaaggggcatgtatgttacactacataatcaagtaacactggttgagggatggctcaggaattgaataacccatgtctgtctcttttgcttgattattgcaacactgtgtgcccggcactgttctggttcctggagttctactaacttttaaaaaaataaatgtgaagccgttgctgattttcgtggccgtatgcagggaaccgcggtaagcagtcgtccagaaaggcaggtgggcatttctttttcattttctttttttatgttttgagacggagtttcgctcttcttgcccaggctggagtgcaatggtccaattttggctcactgcgacctccgcctcccaggttcaagcgtttctcctgcctcagtctcccgagtagctgggattacaggcatgtgccaccacgcccggctaattttgcatttttagtagagacgggggtttcgccacactggtcaggctggtctcgaactcctgacctcaggtgatccgcccgcctcggcctcacagggtgctgggattacaggcgtgagccaccgcgcccggctgcaggtgggtatttctttaaggactaggcgagaggccttccgctccgagaagaacactcacagaacagtggcctttcctggtcacggcgaatgcacctaggacaaatcgcacagctggtttccaggccccgcccccacctgtagactccgcctctgggtccgccactctcccgtcaggcgccgcgcgcgctcattgccccgcccctcaggctttgccccgccccttacggcgccggagagatggcggagttggacatcgggcagcactgccaggtggagcattgccggcagcgaggtgatccgggagcttccagcccccatccccggccgcgggagaccagggctccgctttggctccgcggatggtggcggcgggtgaagggaggccacaaggctgggcagggcctgaggagcggggtgggagcg

SEQ ID NO: 40713 - DNA, 2300 bp, Homo sapien
ttcctcagttataactttgtctctctgttctactgtccaatgttctcacaacaaaaaaagtaactaacgaaccccaaagaatgccttagtattctggataagttcttatttaaatgcactcctccatgaattcaataatgcttggaggatcccttaaagataatgcctaataattacctcttcaccccatgctatttaattaaacaaatacttaatgagtttttcctctagtccaagttgcacagagggaaataccatcatgtaaatagtgaaaagaccatgcgttttcaaacagaaagatctctttcacttttgctgcctgttaaatttggttaagttatcaactgagccttgggttcttcttctgtctaacagaaacagcaatacctattttgcagggtttatgtaaggattagtgataagcatatatttattgataagcctgacacatagtcagtgctcaaaagatggtagctgttattactgtcactggaaggtaagctcttagagggcagactatacttgcattccctgtaccttacactcaataaaggctagttaaactgaaaagcaacgggaacaatagcagaatatgtgctacttctcaactctcaagggccttaaaaatctaatcaagaaaatacactccaaaacttattcatgaaatatttagataataaagaaaaacaatacttacgacaacttatacatgaaattagagcaaaatgtgtgttatagaccatacatgctttacatggccagccaggaaatgataggaggtggctggctgcagttactgtgaaatgataagttcacatatttgtgtgttagaagatgcttactgtaagcctcctatggaagtgttcaatttctttggcaaaattttatgctatctatgccaatgttggataaatagattaacttgctgctttgtgtttgtatgcttgcagacaaaattgtgttattgatcttgggtatcaaggtgaatttgtcagagtaatgggtgttttttttttttttttttctcttaaacagtggctggctaacaatcaaaaataggttttggtaatgttgggtaacgttgctcaaatacggctatattatgcagagcacatggcaatcgttgaagagtaaaacacagataattccacttctttgtagtgtgcttgacacaggtttgcagcagtattgcatcatctataagcattacatatggctgtcctttcatcttactaaattatttgccagcagatctaatagatgggctgagatagtgagcatgaacaaaagaatgtttctcttctccaggatattctctactttttgttacttaagtatctatgtaatagcatttgacatacagccaaacaccagggcagccccatttaaggtttttgatacactgaggatcattcagaaaacttcggattcctagttatagagttgaatccaaccaccaacacactccagaagtcctgacattaggaaaagagatggccaccatctttcacccacttcaagtcctgtaaggatgatctagaatctacactgtgccaactagcatccaggcacacatcaacctgcccggactaccaaatgcagaaacaagcccagtagcagcagctgctccgagcttgcccacacacctgcatcctagtggcagacaaatatcctggaagcctttgtgtccacacactcatacctacatgacatacacttagaggaaaagatctgaatattcttattcacaagaacagaggcctgaatacaggaacactatgctcacgtacacacaaaagacacgcatggaataaagcattttgcatatccagtcttgcgcacttacactttcaggtcctgcacaagacccctggacatcggtttgcttttctttgagccattcacaaactagttcctcgttcctgggaccgtccctagtgtggataaaagccaacttcccacagtctttgtcggtcttttcaacttttctctgctctcgctcaactcccagagggccgggtggcgccggccagccgacgtcccagcggtggcctccccgcccagccgctgtgcagcggggcggggccgaactggcagccaggaaatgccctggagtgtgtgtcacctgtccaggacgacttgttgattcccaggagggccgcctttccggtctgggtccccgagaggactgccttgctcacctgtcccctcggcgcggccccggggagctcccgagaggcccccgggatcgctggccctccgaactccacagcaatgagcaagttgggcaagttctttaa

SEQ ID NO: 40714 - DNA, 2300 bp, Homo sapien
gctcgttttctttctctttctctctctctctctctctctctctctctctctctctctctctctctctctctctctgtctctcgctcttgccctctctctctctctttctctctgtctctgtctctctctctctctctctctctctctctctctctctctccctccctccctccctccctccctctctctctctctctctccccccccccccccccccgcccagttcggcccctccttccacacagcagggatcttgggcccgggcagagactggctgaggcggggagcagctgcttttggggcgggggtgtcacgtgaggcttctcgctgctgagggaggaggcgaaaagctgcggttaaggagagtccggtttaaccgtcaccgggaagcgcgctcgttcgggatcgccgagggggctgaggtaaagactgggtcattacctcaggacaggcggtcgctgtcccgggttctcgtacgggtgacacctgcaaccttgatgtctggcgggcggcaaggggctccgcgggagagtggagaggcgccgcaggaagcccagccaccttcaggccaccgccgaccccactgtgcgtctgggaggcgctgggcgcgcaccggtcagcggaggcgggagagtctgtgatcccagggagctgcgggtctcgccgcctgcagtgcggaagacccgtgaccggcgcagaccccggccttaccttccgagggtcgaactgtgcctggtatttgcctctttcctcccgcccacggggttgctcagagtcgggccacctcacctgaggttttccagagtgagaatgaactgagcgtcctgggagcaactccgcatcagggtagaggcgaagacgctcctaatgagcacagcacgtttttttgtttgtttgtttgcttgttttgtttttttaacgcttgggtagcgctcacatcttcggacgtcagtggttgtgttgatatgtattgatatgcgacctccccccagccaggcggcctcaggtagtagagtggcaaaggccaggtagatccctcggaccttgagaaggttgagatttcagacttacttgtttttggggaggccgtcaggcggaaccgaggagcggtgaatcagcagctaaagtttcatgaatctttgataatggggaaatgttgccgagagccacttgagttaaaaatcttttttttttttttttttgagacggagttttcctcttgtagcccaggctggagtgcaatggcacgatctcggcaaactgcaacctccgcctcccgggttcaagcgattctcctgcctcagcctcccaagtagctgggattataggcctgcgccaccatgcccggctaatttttgtatttttagtagagacggggtttcaccatgttggccaggctagcctcgaactcctgacctcaggcgatccacccgcttcatcctcccaaagtgctgggattacaggcgtgagccacagcgcccagcccagagttaaaaatcttatttcagcatctttccaagtccaggtgactcatttcttacctttcccaccagtagagtttcgtatgaaaagttgggcagttattgttgtgtgtagtcttgtcattttgttggtctgtagttgttacagtttcttatgagtttattatttaacaaagtaatagtaaaccatttcttctttgtgttatgatactattctgacacaagatatactggtccgtttgataacagattcttgagtgtaagttataaagatttaaataccctcagtttatcgtagagcagaattagtgatgacctgtaagctgtgaagaacggttacaattttcactatttaattttgttgcatataagttcagtgttcactgggttttatttgagtaacttgaccaagtgtgtatttttaatcctgggttctatagaattatactatgtagcatcaaagcatctggttcattgttactactctgtgtaaatctttatagtttcactaattaaattgaaaggtaatgtgaatagatttcctccctttctgattaaatccagaggtaatgtaaatagttttcttccttttcttttttctctcttgtactgaatgtagtactgtcaagatgataagcatggaataaagcttcagaagggtctttaccaatctttctcctaccaacttttacatacatgaaatcaggttaaaatgaactttacagaaatacttcacaagggaataaagtagaggaaaaagggataacatgtaacatggagtcaaggaaaaagagtgtgaagtagttttgctctctctat

SEQ ID NO: 40715 - DNA, 2300 bp, Homo sapien
aacacacaaacaaggcatggaaagcagagatttattttaaatgaaagtatactccacagaaggaaaacagactcagtcaaggggttcaagagcatcagctacagaattttctggggcttaaataccctctagagggttcccattggcctatgcccagtctgattggttgtggaaggagaccaatcagagtgaaaagtaggccctcaaccagtctgattggttgagggaggggctctatcagaggttctttcatttttcaactgccacccaaagaaaggagggttgcaactgccacgcagcaactgccacgcagaaaaaagaggggttgaaaatggagtcgcctctgatatcagtcagcatgaatcagccttaggtcccctgtttccagaccctattctcctacctaacattgtttctacagaattctatttttatttcattcacactaaaagggcagaatctcttaaaccaaaaccatcatcatgtcacaaaccagactattttccaaccttcatttcaaaatgaccactatcaccttttctcactcttagtcgggcagtagaatagggtccggaggcagggaacctaaggcccattcacgctgacttcctagaactaaatcaaaaggaaaactccaactttccaagcccaagtaacaaaaagaccagaggctattccctttgcaaccccctgcccaaccttctaggcccttggtatctgggcctagtcttcatttccataggagtacaactttgtaacttaactttagcctctgattggttgcaggctactccttaatttacagagggtgtaaaccaagtaaccaatgggaaatctctagcggatatttaaactccagaaaatcctgtaaccagggctcttgagccactggctggaggccattcccactctgtggagtgtacagtcatttcaatctctgctttccttgcttcattctttccttgctttctttgtgcgttttgtccaattctttgttaaaaaaaccaagaacctggatgacttgtagtcaagaccctccatgggtaacattgggactatacaaaagccttagaaatcgtggaatgatttttcaaccacattatctgattctaatgatgaacagacctgtagaccggtctgaatcttgggatttgcctatcaaaaaactcggctttccctactgcacaggtcttcagaagcgcatgtctaacaaggctaatattccatcatcgggatcaaattgctcaccggatagtaaaaagacactacagaatttcaggggttctctgccaatgagaacttctgaattatgtagaacggatcagctactaagcagtgttctatcttcctactcttctaatcgattgtcatcccttaaagcgctgctaattctagaaaacaatctataacctgttagaatcagcgcaagctggtgatgactacaagtcccatgatgcaaagtatgagcacggaccaatgttggtcgcagttccttctgggaattgtagtcttctcctgtttggcaaactaggtattgtagcctccatttctcagaagttcagttggaaaactaaagatagtgcagagaatgtcgatttcctgccacaagattacatttatcttcgctacctgagcgcccagccgatcaactccagtcgctcctccggtgggcgggcgcccatgccgtgacatcacttccggcagagatgtgtgtgtgacgctctctctctctctctctcgctctcgctctctccctcgctcgttttctttctctttctctctctctctctctctctctctctctctctctctctctctctctctctctctctgtctctcgctcttgccctctctctctctctttctctctgtctctgtctctctctctctctctctctctctctctctctctctctccctccctccctccctccctccctctctctctctctctctccccccccccccccccccgcccagttcggcccctccttccacacagcagggatcttgggcccgggcagagactggctgaggcggggagcagctgcttttggggcgggggtgtcacgtgaggcttctcgctgctgagggaggaggcgaaaagctgcggttaaggagagtccggtttaaccgtcaccgggaagcgcgctcgttcgggatcgccgagggggctgaggtaaagactgggtcattacctcaggacaggcggtcgctgtcccgggttctcgtacgggtgacacctgcaaccttgatgtctggcgggcggcaaggggctccgcgggagagtggagaggcgc

SEQ ID NO: 40716 - DNA, 2300 bp, Homo sapien
aattctgtgacatgcttttcaggaactgagagagaaaatgactccatgaataagtcccttggcagttctcctgctttttgcattaaaataaacttggcttgagtcaagttacatgttgatattatttaaaaataaaaagtattctcttctccttgatgtctttccttgtagttttctgtgactcttctgaccattagtgtggtaacactgagaaggccaacattagtaatatggtactaagagaaaaaagtcaatatttaggtttgatttcagtccacacaggaaaaggagtatttgagattcatatgtggcatgtcctaggtaaccatggtaaagttgcaagcatgaaccagaattcattttatcaatcttgatcaacatatacagtagcaaaaccatggtatcagttaaaaaactaaaatttgaaatcttggtaatacagtattttcgcctaatggtcaggttcaaattttggtcatattgacaatttgtcttaagtggaaagtagataaatattctctaaattaaggaagctgataactttaaagtcaattttaaattgatcactagcatgaatattaaaatcagtgatgatcaaagaatatgggacatgtataaaactgccaaaatacaaagatattcaaaatttaagaaagcccaaatatctctctgggactaaaacataaaactaaattaaaatttcattctaaaaatggaaaagcactagtttgtaagtttccttaactataaaatagcatgatggcatgttttacaatatatttttatatcaataaatttgaactaataagatgttctggctttgtttataacatctacctcatttcctcattaataagaagttaattaaatattccacaggtttttttatccacgtgagtcacaattttactcataaaaacttttactcattagaaaagctgtaagaaagtatcatataataattttatataattttatgacttttacctgtttggaggtcttccaacaagatgcccaatgaattcacctgagagagatggtggactttttttccagagcagtgctgtttatttgagcttttaagcctagttgtgtcattttgagaggtgacagcgtgctggcagtcctcagagccctcgcttgctcgcggcacctcccctgcctgggctcccactttggtggcatttgaggagcccttcagtcccccactgcactgtgggagccctttctgggctggccaaggccggagcccactccctcagcttgcagggaggtgtggagggagagacacgagcgggaaccggggctgtgtgcggcacttgcgggccagctggagttctgggtgggcgtgggcttggtgggccccgcactcggagcagccagccagccagccctgctggccccgggcagtgggggacttagcacccgggccagtggctgcggagggtgtactgagtcccccagcagtgctggcccaccggcgctgcgctcgatttctcgccgggccttggctgccttcccacggggcagggctcgggacctgcagcccgccatgcctgagcctcccacccacccactccatgggctcctgtgcggcccgagcctccccgacgagcgccaccccctgctccacggcgcccagtcccatcgaccacccaaggactgaggaatgcgagcgcatggcgcaggactggcaggcagctccacctgcagccccggtgtgggatccactaggtgaagccagctggtctcctgagtctggtggggacgtggagagtctttatatctagctcaggaattgtaaatacaccaatcagcaccctgtgcttagctcaaggtttgtgagtgcaccaatcgacactctgtatctagctgctctggtggggccttggagaacctgtgtgtggaaactctgtatctaactaatctgatggggaggtggagaacctttgtatgtagctcagggattgtaaagggcaccaatcggcgccctgacaaaacagaccacgccgctctaccaatcagcaggatgtgggtgaggccagataagagaataaaagcaggctgcctgggccagcattggcaacccgctcgggtccccttccacatcgtggaagctttgttctttcgctctttgcaataaatcttgctactgctcactctttgggtccacgctgcttttatgagctgtaacactcaccgcgaagatctgcagcttcactcccgagccagcgagaccacgaacccaccagaaggaagaaactccgaacacatctgaacatcagaagggcagactccag

SEQ ID NO: 40717 - DNA, 2300 bp, Homo sapien
ataaaagactgacaatcactgtgattggctgacagccattagtgcagtgtaattctaaatagcttgtttttcaaagttcttcttgaataactcttcccagcctggttgaaaggttcaaaactcatttttaaagtgaagtttttcacatttgaataccactgtgatatgaatgatggaaaaagatatgcattaaaatattttcttcttaaatgtttagaatcagatatattttcaaatggaagagaaaatgtggaaaatttaacaaactaagttttaaatcctagataaaattaattcaggacttgtggaagaaaaagatcacgtgtaaagagatcttacttaataaaataaaataaaataagtccaacatgttttacagcgagagcacaatatttgatctgtattagccagcttaaaattctgtgatttccgagtagaactcaaggcttccaaagttatcaaatccactttgatgtattcatctctctctgtcagtattcctaatcaacagtcctccctggaaagtatgtataataagtgggtgtacagttggcaactcaccaaaataaatatttagtgatattttaatggctattttaaatctcttatttaaattgcggattaaaactttatttggccaatgaattctgagcacaatgtttgaggaccatatttgctactgaagctctgtgtgaaggatgtgtacttaattttcagaatgtcgaggttagatcatctctgatggaggcattttatatgaaacgtcagcattggaaacattgagataaagatcgggagcaggaatctttgaactgcagaattgtgttaattgctcattctcaaatatagagacgccaattaattccacacaacctagattcaaagcagcacagggaaatggtcctgaggtgagtattgtacaaaaatgaagaaaaatagatgtgttctagcgtccacaaagctgattcttcaacaggcagtaatagaagcccaatgcacccagcgattggctgatggcatctttgttcaggcgatcgatgagcgccctaacccacacgctgggtggagaaatccctctgccaccctcaccttcagaatccactgctcagccacctggctcccgcggggtgcgccaccgcctcactgctggtacacgtctccccctctcgaccgccaagtgcttgctccctccaggcgagcactcacacaatggactcacttgtttcccatgcccctctcctttgacttccagcctcagcgaacaacttgagcaagagtcaaacaggagtctctgccatggagcatagacccttggagctttccagaccagctcagaagcacgggcgcacacacagacaaaacaatgccttgtccacgaatgaataaaggacacccatgcccccacccaccgctccgcaacccgcagaaagaaacccgggacggggtttcctaaataagagattttgttgtgtctttcaaactgcaagcattccccttgaagacggcgaaagagaggctgtgcgttcagatggcaataaagattgacagtggctttgcccgtgacaacgcccccagcatcgcgctgagccaggttccctgagaaccgggagggggaaacgcagatctagggaggagggaacagcagaggcaaaggcagcttgggagggatgggaaatggaaaatcagggaaacaaacaaacaaacaaacaaaatgaatgagtgaatgtgggcttgaatagtaaaacttccagagagaagacgatgggatctctccccaggtaactacctgtagatgaaaaatagatgaaatacacaaggaagtggcaagcaacaactttgaggtgagcagcaagttgtgcacctcctctcaaggcgctggatcagcacccctgagctgcccccacagcacacactcccaatgcgaggcggcggcggcagcaacagaggcagcagcagcaatcgcggcagcagcggcagaggcggcggcagctgcgcgcctcgggcccaaccccgctcggctccccctctcgccggcgccctgcctgtcttgcgtgtgcgtgtgcgtgtgctcagcctcagcgtgaggggcacctgctcgtctgggctcacagcgaaggcagcctcgccgcgagctgccgctgccgctgctgccgccactggtgttgccgctctcaggcgccaggctccccgtcgccgccgccgccgcctcgccagccagagttgggctccgtgggcttcccccctcgcagcctcggtccttccccgctgcctgcaagtcagcctggctccgagtcacgtgt

SEQ ID NO: 40718 - DNA, 2300 bp, Homo sapien
agggggaaacgcagatctagggaggagggaacagcagaggcaaaggcagcttgggagggatgggaaatggaaaatcagggaaacaaacaaacaaacaaacaaaatgaatgagtgaatgtgggcttgaatagtaaaacttccagagagaagacgatgggatctctccccaggtaactacctgtagatgaaaaatagatgaaatacacaaggaagtggcaagcaacaactttgaggtgagcagcaagttgtgcacctcctctcaaggcgctggatcagcacccctgagctgcccccacagcacacactcccaatgcgaggcggcggcggcagcaacagaggcagcagcagcaatcgcggcagcagcggcagaggcggcggcagctgcgcgcctcgggcccaaccccgctcggctccccctctcgccggcgccctgcctgtcttgcgtgtgcgtgtgcgtgtgctcagcctcagcgtgaggggcacctgctcgtctgggctcacagcgaaggcagcctcgccgcgagctgccgctgccgctgctgccgccactggtgttgccgctctcaggcgccaggctccccgtcgccgccgccgccgcctcgccagccagagttgggctccgtgggcttcccccctcgcagcctcggtccttccccgctgcctgcaagtcagcctggctccgagtcacgtgtcagtgcctgaggcagagactgcgagaaaaaaacgcgcttcattccttcttccaccgccatactgtattttatactaaatctcatttttattccaacattttactcccgctcggtgagtaccttctcagtggcattcttgtcctattcttttttttgtccttttttttggttttttgttttttttgtttttgttttttttctttttttccacttctttgattattgtttatatttgggaaagctggaggagcatggttttgagccttttcctgaatccaagtttttctagcatgcgatcgttctgtagacaaggcgctgtgtctcggagtccgcggcgaccgtgcccgctgggagcgtctcccaagtccagcaaaatgtgcaactggttttatggaaaaagcgatgtgaagtatggtgcctatttttttcctttgtaaaaataaaaagcatgtttctaactctttttttgcatactctttttctgataacatttttgtataggtgggattttacggcagtgtttacaagtttgtggtcttgcaatactggtgcaaaccactgagcaaagacattaattttatattttttgtgccctttttggaagccggtgaaaacaaattcgttttttttccctcctgtttttgatacccattgataacatgaaacttttcttacagctggtgattgggatcatttttaagcaaaatacttttttcctcctttaaattaactatgacttttgcacatttgacttttttaaaaaaccgagataattttatgatagatatcctgatatctatatctatattgtcccttatttctcccccttccctccccgtaaatcaattttcaaatgatggcagtggaaggtttttctggaaaaaaaaaaatgaagtgcggtttggtttccttgtcaacggaggatgaagtgaacagctgagcagctcgcagagagcaggtacttggtccccttggaggcgtttcccgggtgtgcagtggcaacactggtcctagcaaagaaatgtgtgagtgtgagtgtgtgtgtgtgtctgtgtttgcgcgcgcgcatctccgggcagtgtccgagcccgaggtggggagagcggcgcagggagccagggaaaaccaaagtccgttccctgcttcaggatcgttttctagatgtgcgcaaaatacagtcccctccccccacccctcccacggtgagctgcgcccaggtcgtctcccggcggggcgggtggcgtctgcgctgcgggccgcgccggccgggcactaggcggccggcgggccctgtaagttctccgagggccacttgcacagcaggaggggcgagggccgtgtacgtggcgctggccgtcgggcgggctagaggggaccctcagagcacccgggagatgggggtagaagcggcagagaccgcatattccggaggggctggctccaggccacgcgagccggagctggagacatttccagagccttgaggatggcaccggccctcgcacgctcaactcctgctcctcctcttcgcaatgagtaaacgacgcagtaggtcctacccagcctattttgctttaccaaagggctttgctttcttagggatgctgt

SEQ ID NO: 40719 - DNA, 2300 bp, Homo sapien
gcaaatagcttttataaaggagacattgcttattaaatatggctttgttcctgtgaatttaaaatacatcattagatcttcatacctgtgaatatgtacaatttcatcaaaatctatatactgagaactcacgtaatgagagaatgcattcaaattaacactgggactaaaagatgtgaaatgacaagtattttaattatataaaaaagttactgtagtcaataaacatgaattggctcttgtctaaatttattgaaaaagaatttgtgattgtatggactttatcattgaaacttgtttattaaaatttattcatggccgggcatggtggctcacacctgtaatcccagcactttgggaggccaaggtgggcggatcacctgaggtcaggagttcgagatcagcctggccaacatggcgaaaccctgtctctaccaaaaatataaaaattagctgggcgtggtggcaggcacctgtaatcccagctactcaggaggctgaggcaggagaatcgcttgaacctgggaggcagagtttgcagtgagcctagatcgcacaactgtactccagcctaggtaacagagcgagactctataccaccagccccccaatacacacagacacacacacacacacacacacacacacacacacacaacaactcatttattccacaaatgtttattaagagcctactttgtgccaggcattgatctaacctctggacatacatctctggaaaaaaaatgaagttttatcctcagaaatgtatgttctaataggaagagaaagacagcagtggaatgtacagtaatgcagacactgactatgccctaaagcaagatataaccataggggtctttgacaaacagtcttaccaaagagtttagttcatcaaaagtcaaggacactgaacagaatattgctgaaaacttatagaatattattcttggtatatgtggttacaaaatataattatttaagtaaaaaaaaatcctttacactgaaacaatgcttctatgaagagttatggagatgatatttcccgctactagtaggtagcctggatttgttcacacttaaaaaagaataactttgaacagctgagtatctccacttctgcttcttggcaaaaaggtgaaacttaatacataacaaggaagtcttatgacatagaaatttttcactagcatgtgggtccttctgtattttaaataacaactaatttcagacacccaagtcagcacccaaaggtgtctttgaaaccatgttctcatttggagtgtttgggagaggcagtgttcctgggcttctgctgaatgccaggcattgctctcagaaaaggacagtacaagctataatgaaggcagagcttccaccttgtccacttgagtgacagtgtgaaacatattcagatagggatatgccccaactactgtcaaagtagagaactgaggactaaactgaggccccaggggttgggggtgggggaagcttctggagaggcttcttgcaagcaggagcagagtgcctgctacatagtaggcactcaacaagcctgagaacctattgtgtgcaccttctatgtaaagttctgtggatataaatgtgaaaatgtgcaatttctgttttgcctgagaagtatagactggggaaatagacaaaactaaaattgagaattgctttaataattgaacatacaaagtgtatcagagattctcagaagaaaagaatttagcagagtttcaaaataatatacaaatttcagtattctatagtggttaaaagatatatgaacctaatttttaatttatataaatactaaacaaggtttttatatttagattttcagttttgcaattcttgctaaatatatgaatctattcttaatccaacattgcttcatggacagcagtttagtagtacagatttcattagagaacttaactgctataggatcgggggaggtgaaggaaatacaattttccctagaagatttacattaaacagagtagttacaggctgtagcatctcccctgtaattttatgagaatggtattaccctggctttcactgtgtgattgctggttaccttctgtcagtgagcaacagtcttactgcaaagcaggagcacaacccgtctctttgtctccgtggtcaaatcaattacttcttagaaagtctaatttttttcaaaatgaccatgtacaagagcaaacgcagacatcagagatgtaagtaaaatctgacccaactttttcatatcactggggtagggaaaacatacttgatttcttaaa

SEQ ID NO: 40720 - DNA, 2300 bp, Homo sapien
tggtgatgaattcttttgcttttgcttatcttggaaagactttatttttccttggtttatgaaggataactttgttgagtacttggctggctgttttttctttcagcactttgaatttatcataccattctctgccggcttgtaaagtttttggtgagaaatccactgttagtttgttgagggttcccttataaatgactagatgtttttctcttgctgtttttagaattctttgtctttgacttttatcagtttgactacaatgggccataaaggagactttttcttttcttttcttttttgcgaaagaagacatgcaagcagccaagaaacatatttttaaatgctcaacatcactaataatcagagagatgtaaatcaaaactataataagatatcatctcacagcagtcagagtgggttttattaaaaagtcagaaaatatgagatgttagtgaggttgcagagaaaaagtaatgcttacacaccatcagtgggaatgcaaattgcagccactgtggaaagcagtttggagatttcacaaagaactaaaaatagaattaccgttcaatccaggaatcccatgaccaggtatctagccaaagaaaaataaattgttttaccaaaaagacacccgcattcatatgtttattgcagcacagtagcaaaggcatggaatgagccctgatgcccatcaatgatagactggataaagaaaatgtggcacatatacaccaacatgcagccataaaaaagaacaaaatcatgtcctttgcagcaatatggatgcagctgaaggtcattatcctaagtgaattaacacagaaacagaaaaccaaataccatatgttctcacttccaagtggcagctaaacactggatacacatgaacacaaagatgggaacaatagacactggggactccaaaagggggaaggcaagagttgaataactacctatcaagcgctatatttactatttgggttacaggatcattagaagccacaacctcagcatcgtgcaatatacttatgtaacaaacctgcacatgtacccccgaatctaaaataaaaagtgagatgaaattttttttaaaagaaaacctttttgcattgtatctgtttgggaacctttggcctcctgtgcctgggtgtctaaatctcttgctagacttgggaagttttcatatagtattttgttgaaccatttttccaactctattgttttctctttgccttctgagactccaaaattttgaatatttggtcactttatggtgtcctacatgtcatgtgggttttgctcattttttaaaacatcttttttatttttgtctatatgagttatttcaaaaggaaatagtccacttcaaatggactactgcaccatttgctccgttttaaaatattactatgccttaggaagcaatctagccaggagggttatttgacctcacacaggtattgctttcccacctgtaatgccattcatccagaactccccctaacccagcaagactctattcagtcatcaatcacttcttttagaaaacgtacccactacccatatcactctagagttggtttcgatgcccttgtgttattcttagcattcgtcatactgtatggcaattctgtttcctctatggggctgcgaatgtttccaggaacaagaataggcttcatctttttcttcctcatacagggaagtgactgacatacagtaaggcatcccacaaattgttcaatgaatcaacaggaggtgcaatggccagaggaacaatttatacgtatgtaaggctatgtaaaggcacgtaaagccaaaccgctgtgaaaaccgccttcagaagtcagtcggctactaggcaaatatacagaagcacacaggacaaatccattcattctccagctcctacacgcccgggaagcagttttactttacagcaagttcaagagtcgcaccgcagatgctgtaaaaacgaaagaagcccacagttgggacgaggattccagttttgcgtcaccgtcaaggcgggaaagttcccggctgtcggttggagggtgggtcctcgccccgccccgccccctcgggccgcccttccgcgcttccgggaggcttgtcccaagctcacggacccctcgctgggtgccggttaagaccccgctccccgtcgccagtgctatggaggcggcggcggcggtggtggcggcagaggcggaagtggaaaacgaagacggcgacagcagctgcggggatgtatgcttcatggacaaaggcttgcagaggtaaagggcgctccg

SEQ ID NO: 40721 - DNA, 2300 bp, Homo sapien
atcacatacttatcttctgcaatgggcttttgtatcatatagcccagtttcttaattctgatgtttttattctatcctcaccattacgtctcccattttatctgggttttttgttttgttttgttttgttgtattgcattctttaatacaggtctgtcatttcattctgtgaaaataccagttttttaaattacaataactttttttcttctgtttcctgtaattatttctaacgtcatgcttttcctcaaatgattataacatgtttagagtttcttatggtttcttacccttgaatgagcactaggtttttagacttgacatttgctaacacactttgggaagttgctcttggttccatttcttgtctgattgtgcagtggataattccccttctaaaatctgatttggataagttgatgtacacagttcacagcccagttcccgatttcttttaggcacttttgtgatactgacgtggtgttttctaccccactgcatgtttctctgataggttgtacctgtggagtataaggacaattctaatacgcaacatgcatgctatgagaacctctataattataaagctgtgatgcgttatgttatcactagcccttctaccactacccaccaacttcctgccttatttgtgttttataaatgtctgtctgaattgacacaagaagctactgggtatggatgagggaacaggatgtctcaattaagagtgctctgactacctcagaaaaacagcactcctgctttcagtaagtgcatgagtaaccaacattatgtagtgacagatttatagagatcttgtgactgagtcatggacagatagtagaagagaaaagatatgtcttccttttttcagaatggagcagtttcatgaggcaaagcctgagtgttgtaggagttgtttttaatttcaatttagttccatttgccttgtaattgaaattattcccaaattttggcattctcttatcctttgttttcagttatatgtgtatgaatttttactttattctgtattctaggtatttagtgggatattagaggacgctgtgtctagggctgctagccaaagtccatttaaactggaagactttgggcacactttatctttcttcttacttaacctattgttgtgcccgtgtttcccaagttatgtattcatttttctcatgaaaaatcaatcttttctgattcttcttttatctgtgccacccccccaccccccccaccaccacatgtttgtttgagattagatccttaccaatctccctgttcccttatgtgccttggtagggactctgtatccctaatgcagggtctggcatgtgggtgccatgctgtgagtatatacaatttcaaaaaatgaatcttacctactatggtatctttattatccaaacctccttgatgaccagatctgttcatctaattatctactaaaaatgccttgcctgtattcctcataagtttcttaagatcaccatggcctcaggtggattcattcttcttccttattttatatttcttgccctaataaatggtgccccatccagcatccagtcagtcaccaaaactatagaaatctaggaatctttgttttttgcttcctttctctttctcctatcccacaaccagttgatattaccatctttattgatacttttattcatcaattgatattgatatcatcttaaaagatgttgaactatctcctctgtatcccaaaactgttacctttctttaggcccttaactgttgcttagatgattgttccatttctgtttctctgtggctttccctgcccctacccatatacagtctagcacgctttcatatagcatatcaaacaggagttgagagcatgaacaaaggaagaccagttcagagagtactctcattgaagtcaacaattttatcatttttatatgtgtaatatacttaacaccacatataacttctgctttaggctaaaggaaattatttttagagagagaaattccaaaggacaactcgaagttatggttcacaaacttcaaaatgaaattaaaaaactgactgttgaactaatgaaagcaaaagatcaacaagaggatcaccttaaacacttaagaaccctcgaaaaaacattagaaaaaatggagagacaaaaaaggcagcagcaggcagcacaggtatttctctattttaatatatgagtagcacagattaacacaaattcatagcttctatcgtgaaacaaattatactacctagaaaacctaaaagatgtaaggccatatgca

SEQ ID NO: 40722 - DNA, 2300 bp, Homo sapien
agattctaaaagaaagtcatattctataattagccaaaaaaaactaataaaaattataaaacctaacaatcttcagacttttccattgcattattcattataccgttaatataaaaatgcagacctgattttatacatgaattgtctttatgactaagactggtatactttttaatttaagggaattgtaataaaataagccaattattataaataataacaggttttacttgtatagctttttaaaatttataggttgatttcttctatcttattttgaacccaacagtaatcctgtaaggttggcagaacagtcctgttttatagttgaaaaactcagcttgtgacttgccactagtcacttggctactaagtcatacaattttaaaaaggcttttgatgcatgttccttatgtttaatctgttattactgattgctgtactaaaaccagaaaatgtgctctttttatgaatgttactttttaaatagtattatttgtatttatataaaggaattgttttacctccaggatacttttagtatgaaaattttgtgaataccatttaatgtgtttcgtccactaagcattaccataaggaagtcaaaaatacatattcataaacttaaaccatctgtagtatgcacttctcaaattatcacattgaaaacatggagaaaaaagattggtagtagtcatcatctgtgaaggtgcttataaactatacccttaagccaaatggtggctcacctctgtaatcccagtactttgggaggccgaggcgggcagatcactttagaccaggagttcaagaccagcctatccaacgtagtgaaaccctgtctctactaaaaatacagaaaattagctgggccatggtggtgcacatcctgtaatcttagttacttgggaggctgaagcatgagaatcacttgaacctgggagccagaggttgccttgagccatgatcatgccactgcactccagcctgagtgacacagccagaccctgtctcaaaaataaaataaaaaactatactcctagactcaaaataaatggggaaacagagtactctaactttcagaaaatgaaagtgtaaaaaacattagtgatatattatcctaacctaatgttatcctaatagattctgctggatgatgaactacttacttatatctttagttaccctataatagcctttgatattttcataatactgagttatgtttccattagtatgaatgtgagccacccgagaagaaataacatcctaatctttacattcacaccacatatacacatatatatgtggatgttcttgtttttttaaggaatgcaatggaaaaacttcatagtatggatgatgcctttaaaagacaagttgatgcaattgttgaagctcatcaagctgaaatagcacagctggccaatgaaaagcagaagtgtattgattctgcaaatttaaaggtattgtaagtaaaattcacttcaataatcagtatattacatgattatagctaaataaattagatcttcgagaattataaagagaaaaggcaacatgatctcatgaccaaatagatataaagaatgttaccaaaactatcctaaaaccagggtaaaacgttggtaatacttagattaattgtagaacataattctaatttctaagcaaaacttgtacatttgattctagtgtgtactttctctgctctctggataaaaatttcatatctaactaatcttggataggagtctctttggttacacataggcagggtgagaatctgaaggtattaaacataatccatcaccaccttggaaaaagttatcagagtattagggttcaagactatcaactttattatctcaatattattaataaagtaatgagtttagagtaatgctaaatcagagggaaacatcagaagcacctatgaagctttttaataatacacattcaggccgggcgcagtggctcacgcaagtaatcccagcactttgggaggccaaggcgggtggatcatgaggttaggagatcaagaccaccctggccaacatggtgaaaccccttctctactaaaaatacaaaaattagctgggcgtggtggtgagcacctgtaattccagctactcgggaggctgaggtaggagaatggcttgaacccggaggtggaggttgcagtgagccgagattgcgccactgcactccagcctagtgacaaagcaagattctgtctcaaagaaaaaaaacaccatattcatgaacttcccctcagagactcattcactaagtctgga

SEQ ID NO: 40723 - DNA, 2300 bp, Homo sapien
catttgtatgttgaaaccctaaccctcgggcctttgggaggtgattaggtttagatgaaatcgtgaagattgagccctcagatggaattagtgcccttataagaaatctgagagcttatgctgtctctgttctgtctgtctttctctctctctctgccatttgacacaatgagaaagccacaatctgacagccaagaagggggccctcaccacaacctggccatggcagcctcctgatcgtcgacttgcagcctccagaactgtgagaaaattaatttccgttaagtcacccagtttatggtactttctcaaactaagacaccatagaagtgtaagttttaaaaatattaatacatttagtgttattaattcctgtccctgcacatataacacaatgttctgttataaagttaaaaacaaattagaatcttcctaattcagtatgttctaagaaatactacttgacaataatcaataaaataaatttgcaaaacttgtcaatgatgtgtcccatgtcaaatcaaataaagatagcctttcttggataggttgttggaaaatggttgtatcaactgaatttttcatgttttacttcagattttcaattttaagttttgtttatagatttgattaaaataaaggttattatgaataggttattaataaaggttataaagttctgtgcctatgatgtgttataaatggtgtgttcagctttactagttaatgctgttgtatttgatgtcgcttcagtgaccttttttgttagtttattgttacttaaaattaagcaaaatctttcttgcatgaaatcttcttgattaattattgccatatagaattttcattcacctaatcttttttttttttatttgagacagagtcttgctttgttgcccaggctgaagtgcagtggtggcatctcggctcactgcaacactgcaacgtctgcctcctgggtttaagagattctcctgcctcaggctctggagtagctgggactataggcgggcaccaccaccccccgctaatttttgtatttttagtagagacggggttttaccatgttggccaggttggtctcgaactcctgatctcaaatgatctgcctgcctcggcctcccaaagtgctgggattacaggcgtaagccaccgcgcctggtctcattcgcctaatctttattgtctactatattcaaagtgttgagtgtgacaacaagtcatttaaaatttagtctggattctcaagagtttgtaatataatgaggaaaaaatcccaacgactttcttttactcagatctccataatgtcatttgccatcaatagtttggaatatcactgaagtccaagggcctgtggctacccaatattccaaatacaatataatttggttcaaataagatattaagaactttggtcaagaactttggtcaaacacaggagatctggaatctaacggcatgtctttggcaattcacaacctctccctctacacgtttctccatgtagaaagtaaaggccttggaaaggattgatgaaaaccaaccctaaaactccacgatgcctttttctgtactccgaatctaaaagggtgagctatgaagtaaaactctgcacttggtccaagtcattgaaatatttgcaaacgatgctagagctcgaaaagagcaaagatagcagaaaccgtccagagaaagtaacctactgctgaagctctgcaaacttgagcagtcaaccaacttcaccgctcacaaacgtttggccgctaggcattgtgactttctgcccagataaaagtctttttttcttttgtctcctttttttcttcctccctgctttgccgcgtgagattaccactcctcgggtcagctcgcgaacgccagggaggcgagtgtgaaacacacgcgccaacacccctcctcctcctcgtgcgctcctccttcctacagaaaaatgtgtttctaggcaacggcgggcggcggcgtcacttcctgccatttaaactcaggtccccacccctcgcagccccttctcctcgtttccacccctcccccctcggtcgtgggcctcattcacgcttccccgggcttggggagggggcggaggcccggcgtgacaagcggcccagactcccgtgggcgccgcacacctgttgtttgcagcagccagcgacccgcactaccgctctcggcgggcggggaagcggccgcagcggagccgacccggcaggtggccgcgggcggggccggcgagcgaaagtgcgcgggggcccgaccaccgcggggccgggacgcgatgg

SEQ ID NO: 40724 - DNA, 2300 bp, Homo sapien
aatgggagaagatctttgcaatctacccatctgacaaagagttcatatccaggatctgcaaagaacttagacgaatttacaataaaaaacaaccccatcaaaaagtgggcaaaggatatgaacagacacttctcaaaagaagacttttatgcagccaacaaacatatgaaaaaatgctcatcgtcactggtcattggaaaaatgcgaatcaaaaccacaatgagataccatctcacaccagttacaatggcgatcattaaaaagtcaggaaacaacagatgttggagaggatgtggagaattaggaatgcttttatactgttggtgggagtttaaattagttcaaccattgtggaagacagtgtggtgattcctcaaggatctagaactagaaataccatctgacccagcaatcctattactggctatacacccaaaggagtataaatcattctatgataaagacacatgcacacgtatgtttattgtggcactattcacaatagcaaagacttggaaccaacccaaatatccatcaatggtagactggataaagaaaatctggcacatatacaccatggaatactatgcagccgtaagaaaggatgagttcatgtcctttgcagggacatggatgaagctggaaaccatcattctcagcaaactatcacaataacagaaaaccaaacaccacatgttctcactcgtaagtgggagttgaacaagaacacatggacacagggaggggaacatcacacagtggggcctgttcagggttggggggctaggggagggatagcattaacagaaatacctaatgtgggtgacgagttgatggttgcagcaaaccaccatggcacatgtatacctatgtaacaaaactgcacgttctgcacatgtaccccagaacttaaggtgtgtgtatgtgtgtgtgtatatatatgtacggtatatatatatatggtatatacataaggtatatatatggtgtgtgtgtatatatatgatatatataaagtatatatggtatatataaggtatatatatggtatatatgtaaggtatatatggtgtatatatggtatatatgtaaggtatatatggtatatatatggtatatatggtatatataaggtgtatatatgatatatataaggtatatatatggtatatataaggtgtatatatacggtatatataaggtgtatatatatgatatgtatatataaggtgtatatatatggtatatatatgtaaggtgtatatatatggtgtgtatatataaggtgtatatatatggtatatatatatgtaaggtatatatatggtgtgtatatatataaattcctccttagttttctctaacaatccaagcataaaaaaaaatccctgttagaactgcttttgctgtattccatagattttgttatattgtttccattttcatttgttaagatatttttcagtttccctttgtattttttcattgactcattagatgtttaagagcatgttttttgtttttaaatttccatgtatttgtgaatattctgtagtttctcttgttaatgattttgtcagaaaagatacttgtaattatctcagtcttctagaatttgttatgatttgttttttggcctcatatataatctaacctggagaatgttctgtgtgcagttgagaagcgtgtgtattcttctactgttggatggatgttaggttcatttgatctagagtatagtttaaatttgatattttcttatttactgtctctacgttctgtccattactgaaagtgggctgttgaaatcccctactattgttgtattactgtttatctctcccttcagatttattaatgttttctttatatatttaggtgctgctatattgggttcacacatatttacaactgttatatctcatgttgctgaattgacccttttattattatatagtgacctttgtatctttttatagtttttgacttaaaatctatttaatctgatatatgtatagccacttctgctttcttttggtttctatttgcatggagtatcattttctgttctttcattttcagtctacgtccttacaggtgaagcaagcctcttataggcagcataagttgagtgtttttaaaaatccatttaactactttgcctttttattggagaacttaatccacttacgttcagggttatcattcataggtaagtagttaatactgtcattttgttgttttctagttgttttgtagatattttcttcctttctttctatcttcttttgtggctaaat

SEQ ID NO: 40725 - DNA, 2300 bp, Homo sapien
tatgcccatggaccaaatcaggccaagcacctgtccttgtagtaaagtttaattggaggccaagtgcaggcgcggtggctcacacctataatcccagcactttgggaggcgaaggcagagaccagcctcaccatggtgaaaccctgtctctactacaaatacaaaaattagctgggcgtggtggcacatgcctgtgatcccagctactcgggagactgaggaaggagaatcgcttgaatccggaaggcgaaggttgcagtgagccaagattgcaccagtgcactccagcctgagtgacagagcaagactctgtctcaaaaaaattaattaattaaaaaataaagtttaattggaatacagttatgtccattcaatcatatgctgatatggctgctttcctgctataactatgacccacaaagtccaaaatatttagtgtccgacctttaacagaaagtctgccaactcctggcttaagccatctgcacagtggctatctggcaccaagctatgcgatcgaccttcccaatgttaaaaaccttcaacagttttcccaatgtataaggggcaacgtgccttggcttggcatattactggcactctgaatctaccctaaatctgccacacatatctcctgttacgtccctataaacactgctctagccagcctggtctaactgttctcttgcacagacaccttgaacattcttccttttttacctttgctcagtcgtagtcttgactgaaatttatatcttccttcaatgtagccttactacattgtaagtaattaaggaactacttaactgaaacagcaatgcttttgaacgccaacagtattcctcctacttaaaaaagaatgcagtagaaaatacatggttattacagaagatgcaaaaaataaaatacacataataaaacccctcaaatgaagtactctaaaatcattccaagccgggcgcggtggctcatgcctgtaatcccagcactttgggaggccgaggcggacggatcacttgaggccaggagttcgagaccaccctggccaacatgatgaaaccccgtttccactaaaaaaaattaaaattagccgggcgtggtgacgcgcgcctctaatcccagctactcgggaggctgagacacgaggaggcggaggttgcagtgagccgagatcacgccactgcacaccagcctgggcgacagactgagactcagtctcaaaaataaataaataaaaattaaaataaaataattacaatagtaaccaaaatccaatcattcatctagtataaatcaattgctatatgccacgtgtggtagagaacctatattttatacacaaaaaatatatatggaacataaataatgacagtatatatacggaacatacacagacatgataggtatattgtacatgacactacctataatatacacatggaccatgaacagacagtctacaagtggagaggtttactagagctgtagacctgagcaaggttcgtggagaaagtaatacactagtgggggtgtgcgagtggagggaaattctctgaaaaccacgtagaaactgatcatgaaagacacagcccaaaactgggaccccgtcaggagatgaaagcccaacaagcaccggggtttcgggcctgctacccagtagggctgcctgaggcagagcgcgacggaaccgagcctacaggccacagcggtacgagaccggcccaatccaaccccgacccctgcaaacttcacgccagccctccagaaaacttaatttattaaactctcaccagaagtttaacacttgcgtgcagctttttaagctccaggtaacaccatctggcacgtacggcgtctaggaagttccggggaggatgaaccagtcaggattccgctcacgagccgtagctccgcccaccgaacggagccccgtccataggcggaagtcccgcccatagagtgagttcccacccacctggcgtagtcccgcccatagagccaagtctaaggagcaaggtgcagtgaaaaagcgaagccccacccatagagcgaggttcggaagtccagtctcattagcatcccttgtcttccgcggtgttgcagacttatcctcagctcaagcgagtttggggcgttatggagccagccaagtctccccttgctggcgtgggtacttgtgcagaaacttcccgaggtgcttctgagactgcacagtgaagaccgccgcaccggaggtcagcgctccgccgcggactcccggctgactctgccactctcccaggaggaggcgctgtgcacct

SEQ ID NO: 40726 - DNA, 2300 bp, Homo sapien
tcgccacttcaaaataaaagtgagacctaccagttttcataaacactgtaatgtcgttctgttacatttatttctttgccttctgtatatatatatcaatagcctcacattcaaagaaccaaataattgtacccaacttattcacctcagtatttgtgaataactctggccttataaaaaagtctaacggttttctgtttttgttttgctcttacactttatgggcattttataccagcatttttaggtgtttttaacaggtggatcgtcagaaagaatacaaaagtttgaataaacatacattggcaagcaattattcctctccccttagtatattctgttccttaattttttttgtgatgggcataattaaatgatttattgcaaaaattgcttatctttctgtaagcaggcaagtgcctggtttgttggaaagaggacttgaccaagtgctaaccaatgtggatttgcgaattatcaagtttacaaaacctttttaaaaactgttttaaaaaaatgcttagttttacaaaaccgtctggctttgtcaatttctagttagttgtgtggctgccagcacacggcttaaactctgaaccttagtagtatcatcacttgcaaaacaggagtggttttatcaccttattttgagcatagtgtaggctgaaatcttttgtaagctacaaaatggcatataaatgtcagttttactgacagagcaggagcaccgtcatctcggacaaacaccgccatttttaagttccagctccctttctagcctcatgaatttcaaggaaatcacttctcttctaattacaagcagatagaaagagcagtcagtaaaacacagataagacagctcaggcagagtgaagtagggggaaaatctcttggctaactaccaaacctcaccctcatacaatgagccccagtgaaacagtgggccttaataagcacattcctttcccttcaggtgtactaagatagggaagctaaaagcagacttttagctgcgggtatgcctgcagctgcagaaagatgtatgggaacagacacacaactctccctcccagataagcacagcaaagagacacagaagcagtccaagcctctgttaaactctcccaccctgaatccttaaaaactcttagtctgtaagagagtgtggctctgacctaacttggccagctgccagtctcaggtttatttaaaataaacctgtccctgttgactataaagccacccttcgtgcttctctcctctatttaattcttacatctacgtttgtttgaaatccagcttttcctatgacctcaacaaaataaatagaggcacatgtgaaaacttacctttaatagggttattctcttggaagaattgagtcaattttcttaaagcagaaaaacctagacgacgttatgggttgaatgttttaagttccttggtacctgttttatttgtatattttatactgtgcctggtttcttgtgcctttgcagtgctgtcaaaaattctctttttgaaacaaggaagctgcagtgagaaaaacatttctaactcgcagtgcattacaaatcttcctttcggagattatagctctagatcttttccaacctcaaggctccctctaccgccagccgagccctggaaaccacccagaggtgcacagcgcctcctcctgggagagtggcagagtcagccgggagtccgcggcggagcgctgacctccggtgcggcggtcttcactgtgcagtctcagaagcacctcgggaagtttctgcacaagtacccacgccagcaaggggagacttggctggctccataacgccccaaactcgcttgagctgaggataagtctgcaacaccgcggaagacaagggatgctaatgagactggacttccgaacctcgctctatgggtggggcttcgctttttcactgcaccttgctccttagacttggctctatgggcgggactacgccaggtgggtgggaactcactctatgggcgggacttccgcctatggacggggctccgttcggtgggcggagctacggctcgtgagcggaatcctgactggttcatcctccccggaacttcctagacgccgtacgtgccagatggtgttacctggagcttaaaaagctgcacgcaagtgttaaacttctggtgagagtttaataaattaagttttctggagggctggcgtgaagtttgcaggggtcggggttggattgggccggtctcgtaccgctgtggcctgtaggctcggttccgtcgcgctctgcctcaggcagccc

SEQ ID NO: 40727 - DNA, 2300 bp, Homo sapien
ctcacatctgtaatcccagcactttgggaggccgaggcgggtggatcacctgaggtcagaagttggagaccagcctggccaacatggtgaaaccccatctctactaaaaatacaaaaattagccactagtaatgcatgcttgtaatcccagctactctggaggctgaggcaggagaattgcttgaacctgggaggtggaggttgcagtgagccgagatcgcaccattgcactccagcgtgggcaacaagagcgaaattccatctgaaaaaaatatatatatatataagtccattgaatgatggatgctctacagatgacctaactagtttcctatgaaaggtaatttgattgttgccaatacttaggttgctgttttagaaaattatatagactgcgctatgaatttaaacaagaaggaacttgaaaccactactgcaaaattataattgaaacagtgaaagagattggacctaaccaactctatcttatttctaacttctaagctgtccttactcattcttaggcataggctgaactaactttgaggaggaacatagtttatagtttagaacaaagacaataacagccctttcccaaaacaaaccttctttcctggggactggaccgcctttgcaggactaacaaattagccaaaagattagaaattatggtttaggagtcatacagctggaggctgtatgattctgaccctccccaaattgctcctgggaataacatcactattgtaaagcctaagaccagtgcttcagatatgttgcagaccctgcactggatggatcagcaggcaccactcagctcgataaactggctcatctgatcccatggcccccacccaggaactgacttaatgcaagacagctttgactccctatgatttcacctctgacccaaacaaccaggtctcccgacttactggctctcctccacccaccaaattgtccttaaaaactttgatccccaatgcttgcggagactgatttgtgtaataataaaactccagtcctctgcacagccggctctacgtgaatttccctttatgaattgcaattcccctgtcttgataaatcagctgtgtcttgacagtgggcaaggtaaacccattgggtggttacaaactgtgtacccaagcaataaaagtaacaatttgggaagtatttgagacccaccaaccaaaatttctttaacaattttggtctattcagtcattcatccattcatgtaaccactattattgggtgtcaagaactgatacttacttagaacgttaagagcattattcatcttgacataccaaatcatccgagttactgaaaattggtttactaggttccttacaaagaggttgcttggatttataaaatatgaggcagttgacccgagacaaggacgtagaaagtggttcatgtacccaatttttatttttcactttgaacccagaacattcacgactccaggccagaaattcaagactctgcagctagttctgactccagtcctagggtaacaagcccaccaagaatccagggcagatgtcctgaaaacccttcttgcggggtcaggagggcagcagaattttgggaccaaatctcaacaactggttttggtttcctcactcaccaagccacaagcctgcagagtgagaagaggtaaggaaaggatgaatgggcaatggagccagcccaggaccgggagctggtcctctctaacagcgaccccgcccgctttagctgagcgacccggggcaggttacatagtgtctctaacttaagccacgtgtttctcgaggaaatgctgagaggatctaatgggaaaacgtgggtacacgtcttagctaagaccctcgcccacgataagcccttaataagtagttatttttcagtggtggtgattaccatcgtcattattgttttgtatttgtaatcatcactgccacgaccatcaccgacctcttttacgcctccaccgggatccccacctcccagcctggcagttccaggctctggtgactcattcacttcctggaagtcctctaggcaacactttcctctcccgagtgacgactcctcagaaggcaggagatcccccccggaaacctttctctctccgtctctccctctaactcaaatctctcattcccgagtccaaactaagagagactcgcgccccaggagtcagccagcggcgcgggcgccttccccgcacgcctctgccgtctggaggacgcaggcgggagcgccccggaccgggttcacggtctcgcactcctgccgccggcgcc

SEQ ID NO: 40728 - DNA, 2300 bp, Homo sapien
gctcaagaccatgccattaaagatgacatgccccctgcctcccaaccaactatgggcagtgccaactacactagcacatggaatgtcttgccattcataggagaccagaggctcttggttttccagtagctggttacactgctgacttctgttttaaaaaagcaagacccacaacactggagtaactttccagactttacagacacctataaaactcgaagttctgctctctgtgattgtaattccactctatacctggcttagcccttatgagaccaagtccaatacctccctaatgcttctaagattcaggttcctgctaatcccacccacttctcctgcctaaagggtaacctgactgaagtattccaccctgtgtgctctcctaggagtaaaaggagcatctgctggtctccgactgtcaaaccatttattcccttccatcctcctcgccttccctttctcattgtcagtatccctactcccacccctatcttttccgtcctaacagcatcttctcctcttgccctctaaaagactacgtaagtaaaattcaaacccactgccccagcttctctgatatttatacagacatccaaaatacaaacacatttgactgaagtaggctcttctgcactgactatccataactcatcaccctgcttccacatatcccacatcacacatttacccaactgataattgccccagagatgaaaaatactgagaaatgaaaaccacttccaaacggccttttcttctgtattggggtgccccctcatggcaagtggcaactgcactcgtatttcctcaatacataccacagatgggctacccaatgaacaactgcatattctcaccatatgcccaacaaaagccactgtcttcctccagtcccattctttagtaatttccctttacctaaatcaaggtacaattttccagtctaatggtaatgccacaaaactatattgtgtcccaaccaacaagggtgtttatcccctctcctttgcccttccattactctgaaactggaagccacgagatgcattctggcctctcttggcattcctatttatataaatgttaattattctttccctacccagccaaatgtcattgatgtgccacatttgtacctataatactgggactcaccactgctctgggacttgctgcgatggccacaaggaccattgctttagcccaacagtcaaaaataattgatgctaccctacaaatgtccaaaactctagtatatcatatttctaagttacagcaaatattagtcctgctaaaccagggagctttggcaaaaatgttttttgacagtaaatttgtccttgattatatattaactagtcaaagaggtgtttgtaacattattagagcttcttgttgtaggtgggttaacaccaccaatcaagaggtcattctaacagaaagcctggatcagaaaaccatcaccctaaaaaaacatgccttacatatttaacacactctgaaatccagtcaaaatatgactaaaggcccttgccatgactgatgtattctcctggccaacgccaaacaaatgggagcctggttacgagtcagccttcagggacttgtcacatttctacttggtttcttccttgttattgtcataataaaatgttttctatgctgtttagtgcaacttaggccctattctgtagaagtctcctctactattcaggccactcaaacaccccaaataattgagttcaaaatcgacatcaagatataaaggaatcagtgactaaatatatttcatatatggtatttttattgattattgtgctgtcttgacctagtatggaggccttggctagaggctggtcagtttcctctcttgagcagctgattaaatccacaccccaaccacttcccttatcaggttctcacactctggggccactatgtacccactctaatcaccacagggccagacatcagacaattaaggacagcgcccatgccccaaagcccgccaaaattatgcaaattattcaaaattattcaacctagctaaccccaccctttttgctgtacataagctgcccattccccctccagcctgtggtacccagtcctcaggtgcaaccccctgcgtggtcctctgtggcagccttctctcattcagagctgtaagtaacaaagacttctgcctttcatctagctgagcattgaagtgttttatccgactgccaaaagaatctttaaatcttgtaaaatacagtcctacctacatcttaattactattcaatgaatgaaagct

SEQ ID NO: 40729 - DNA, 2300 bp, Homo sapien
tgcaatctatctatctgacaaaggtctaatatccagaatcttcaaggaacttaaacaaatttataagaaaaaaaatgaacaaccccattaaaaagtgggcaaagcccattaacaaacacttctcaaaagaagacaaatatgtggtcaagaaacataaaaaaagctcaacctcactgatcattacaggaatgcacatcaaaaccacaatgagatatgatctcacacctgtcagaatggtgattattaaaaagtcaagaaacaacagatgctggcgaggctatggagaaataggagtgcttttccactgttggtgagaatgtaaattagttccaccattgtggaagacattgtagcaattccttaaagacctagaaccagaaacagcatttgacacagcaatctcattactgggtatatacacccaaaagaatataaatcattctattataaagatacatgcttatgtatgttaattgcagcactattcacaataacaaagatgtggaatcaacccaaatgcccatcaatgatagactggataaagaaaatgtggtacatatacaccatggaatactacgccaccataaaaaggaacaagatcctgtcctttgtagggacatttagctgcctttaattgagactttgattgtaccattcagattctggcactttggtccaattataggagtattctggatgccagcatctttgctagctgtgcacccacaaagcctttgacttaaaagacatttgtgaatcaagctcccaggacccaacattgtattcaaattctacaaatgactcagccccattataacaccacagagtcacaaaaatacagcccacatcaaccctagtgggtatccatgtgggaaggataccctagtccgacactgccctagctcaagaccatgccattaaagatgacatgccccctgcctcccaaccaactatgggcagtgccaactacactagcacatggaatgtcttgccattcataggagaccagaggctcttggttttccagtagctggttacactgctgacttctgttttaaaaaagcaagacccacaacactggagtaactttccagactttacagacacctataaaactcgaagttctgctctctgtgattgtaattccactctatacctggcttagcccttatgagaccaagtccaatacctccctaatgcttctaagattcaggttcctgctaatcccacccacttctcctgcctaaagggtaacctgactgaagtattccaccctgtgtgctctcctaggagtaaaaggagcatctgctggtctccgactgtcaaaccatttattcccttccatcctcctcgccttccctttctcattgtcagtatccctactcccacccctatcttttccgtcctaacagcatcttctcctcttgccctctaaaagactacgtaagtaaaattcaaacccactgccccagcttctctgatatttatacagacatccaaaatacaaacacatttgactgaagtaggctcttctgcactgactatccataactcatcaccctgcttccacatatcccacatcacacatttacccaactgataattgccccagagatgaaaaatactgagaaatgaaaaccacttccaaacggccttttcttctgtattggggtgccccctcatggcaagtggcaactgcactcgtatttcctcaatacataccacagatgggctacccaatgaacaactgcatattctcaccatatgcccaacaaaagccactgtcttcctccagtcccattctttagtaatttccctttacctaaatcaaggtacaattttccagtctaatggtaatgccacaaaactatattgtgtcccaaccaacaagggtgtttatcccctctcctttgcccttccattactctgaaactggaagccacgagatgcattctggcctctcttggcattcctatttatataaatgttaattattctttccctacccagccaaatgtcattgatgtgccacatttgtacctataatactgggactcaccactgctctgggacttgctgcgatggccacaaggaccattgctttagcccaacagtcaaaaataattgatgctaccctacaaatgtccaaaactctagtatatcatatttctaagttacagcaaatattagtcctgctaaaccagggagctttggcaaaaatgttttttgacagtaaatttgtccttgattatatattaactagtcaaagaggtgtttgtaacattattagagcttcttgt

SEQ ID NO: 40730 - DNA, 2300 bp, Homo sapien
ctctataatatgtaaaatatctaggcaaaattttgcaattactttgtgggcaatttctcactctttttttttttttttttttgtagtgcaatagaaatgccaaatggtaacttgtagaagatttgagttagttatattacctgataccttgcaaaacaaaatgccaagtcatgagtaaaatatagttaaattttatatccttagctcttcaagtttataatgttaacgtacaatcctagatgaaacttctatattggacactatttccccaccaataacttttgtttatttaaatattttcctctctcttactctctctttctctctttctctatatgtgtacagtcatttcctacaaattgcccaatatatcaacttttcagtaatggcactgtgagaaatgctgccaatatgctaggagataatttgtagttaatcattgctcactcttttttttttctggcattatttatctcagtgtatacctaacagttttctttttcaggtgaactccagaaatctcaaagtcttgaacacacagtttagaattatctgtttattgacagagaattttgaaatgtataggcaaacatgctggaataaatcaactaagatgcagatagtaaatttgccgatgaggtttttgaaaaatgtatttgcagaaaaatttagataaagtttctgaaaaacttactatggcctaaaattacatgacttaatataaattgtcttgaaattccaatttctattaacttcttatgggaaagtataatgcaatacaaatcgtaattttaaaggctgcacatctaaagctattaaatatttcactttgcaaagtttacctagcatttatttgaaattatgtgctattgtgcgcatttaaaattaatcataaatagcactttttttaaaaaaggtatccttctatgcataaataataacaacatgatgaatttctagatcgttcttggtataaatgttattgtcttctctgtatgattactatatcaaataacatgaaatttatttgccaatcttctaaccactcataccagaaaaagaatattgtaatgattgagtggattggtttactcatacaaataattatacattttataagaactacaaaacatctccattaaccactgcagtctttctgatcaaacagtgacagataggagctgagagtttaagggcatttgtttactatgtttgcttggattttccgaactgccttagttcctgattccacactgctattgtgtggatcaaataatcccttgtcacaaaaataccctggggaatgactcccctggcgtccaggttatgagtgtggtcagtcattccacatgccttagggatgagctatctgtgccatgacgagcgatttccttttcgagttttgtaatccccaaatactaaatactattatcaataaaagttaattaaggaaatgtatatcgaaatattgttcaagatagcactgaaattaggtttatctttcctcattgtcttaaaaaattattactgaattaaaacaggagaaattttacaatatactcttaaaattgtaaatatctactactgacctctttgatatgaaccataaccagacatttaaaaatatacttttgtcatgtagacacactagatatgccacttttattctcctttgcatggttcaatgtataagaaaacaacttagtagggggagaaaaaaattaaaagccattctgtaaatctttccctctttcttttcttgcaatctctcattgtatcttggagagcaagaccacaggttttaagaaatatgactcattttatgttagtggccttccaatacttcagaatattcttgatttttcatgaacagaggtacagctcagggagtgtggctaaatcagtcccagtctccagctccgcgtgaacctgggatccagacatctcctggatatctggcgctctctgagatccagccctcggtttcctgcaagccaaaaggatccgctaggttgggaaatgccgcctggtgcgattccagaaagggccatctctttaaggataacggacttggagggcctcttcaccctctcaccctgctccggaccctttcttcccatcctttgctcctaggattttacatgttgcctgcaaagggagtcaaacttagggggcaggcaaacaaacgagttctttccagcctctgtaaccggatcgctagagcgaaataaactcgcacaagtgtccagagatcgtagccagacagccagcctgcgcttgaagcaacttttaagtgaggc

SEQ ID NO: 40731 - DNA, 2300 bp, Homo sapien
aataaatcaactaagatgcagatagtaaatttgccgatgaggtttttgaaaaatgtatttgcagaaaaatttagataaagtttctgaaaaacttactatggcctaaaattacatgacttaatataaattgtcttgaaattccaatttctattaacttcttatgggaaagtataatgcaatacaaatcgtaattttaaaggctgcacatctaaagctattaaatatttcactttgcaaagtttacctagcatttatttgaaattatgtgctattgtgcgcatttaaaattaatcataaatagcactttttttaaaaaaggtatccttctatgcataaataataacaacatgatgaatttctagatcgttcttggtataaatgttattgtcttctctgtatgattactatatcaaataacatgaaatttatttgccaatcttctaaccactcataccagaaaaagaatattgtaatgattgagtggattggtttactcatacaaataattatacattttataagaactacaaaacatctccattaaccactgcagtctttctgatcaaacagtgacagataggagctgagagtttaagggcatttgtttactatgtttgcttggattttccgaactgccttagttcctgattccacactgctattgtgtggatcaaataatcccttgtcacaaaaataccctggggaatgactcccctggcgtccaggttatgagtgtggtcagtcattccacatgccttagggatgagctatctgtgccatgacgagcgatttccttttcgagttttgtaatccccaaatactaaatactattatcaataaaagttaattaaggaaatgtatatcgaaatattgttcaagatagcactgaaattaggtttatctttcctcattgtcttaaaaaattattactgaattaaaacaggagaaattttacaatatactcttaaaattgtaaatatctactactgacctctttgatatgaaccataaccagacatttaaaaatatacttttgtcatgtagacacactagatatgccacttttattctcctttgcatggttcaatgtataagaaaacaacttagtagggggagaaaaaaattaaaagccattctgtaaatctttccctctttcttttcttgcaatctctcattgtatcttggagagcaagaccacaggttttaagaaatatgactcattttatgttagtggccttccaatacttcagaatattcttgatttttcatgaacagaggtacagctcagggagtgtggctaaatcagtcccagtctccagctccgcgtgaacctgggatccagacatctcctggatatctggcgctctctgagatccagccctcggtttcctgcaagccaaaaggatccgctaggttgggaaatgccgcctggtgcgattccagaaagggccatctctttaaggataacggacttggagggcctcttcaccctctcaccctgctccggaccctttcttcccatcctttgctcctaggattttacatgttgcctgcaaagggagtcaaacttagggggcaggcaaacaaacgagttctttccagcctctgtaaccggatcgctagagcgaaataaactcgcacaagtgtccagagatcgtagccagacagccagcctgcgcttgaagcaacttttaagtgaggctgcaagagccgccgggatgtagattttagttcgtggccaagcacaactacgacaccctgtccctgcccccaccccatccccaagaatgcatggaggaaggagagaggacgaggtgagggccgcctgcatttctgcacgtcggcgccggttagaaaccctgcagttttgagagagaagaagaggagatggaggggccaggagccacgactcccgggagagcgcagggaggggcgtgggtgccccttcgcccacctccgcccccgtcacctcgacagctgtcccgctcttggaattcattggcttcctctacccggcctcccaaacaccaccccaatctagtttagccccccgccccaccctcgctgacctaataaggccatgcagtgtgcgggggagctacataaaagcgcgggctcgcggcgactctgcaccacgcaggggaagagaaagcaggagccgtccagcacggaggaaggcgaccatggccaaggagtggggctacgccagtcacaacggtgagtgcaggcagccgcgacccggccaggaagggatgccagtccaggagagccctgccattgcacagaaatgggcaacttta

SEQ ID NO: 40732 - DNA, 2300 bp, Homo sapien
ctgagaattaattcactttccagaagtgagagataaggaaaaattcccatgacaataatccatttggtgaactgcagtttggtggtgtttgaagttttacgcatatttaagaatcaaacatgctcttacttcatccctgttaggaaagccacaatccagtttcacggaaaatgaaagacaaggattcctgctgatcaaatcgcctggctccctccacagaatcccgggaagccactctacattcacaaactttgcactcaattcttggcacctatcaacgccatatctccagggccaagtgaagagtctcatagcaactaagttaatatttgaaaattatgtaaagaaacaaaattacatcaatgggccccaacagatacaatgcacctacagaggcacaaataaaagcttcttctttgctacaaactccattttgtaatggtcctaaaaatttaaaaactttattgctgctttcttgcctaagaattccctgtgacatcaacccaaaacccacataagcagaagtacacaattttctagaatcttagaacaagtaagtctaaacatgaatcatatttgtttggatgaaattgactgaaataaatagtaaagagtgattttgagatacatattgcaaaaatgtccactaataacttatccttgtatttatctgtatattttcaaaggtaagtaatgtgatgtcaaggccgacacaatcacattaaactgtgtcctgcttccccaactgtaactctaatactattgccctcagagattgcagagaccacagaaccgaactccttcccacaaacccccggatttttctgtggcaaaatcccttgtaggaaatgaattctctctatatctcaaaacagcctcacttacccagtaggccctgtaagcacagtgtctcaggtccacaatacttttagatgcccaggaaaatgtttccttttaaaataagaacaaaaaagaaaaaaattaggtgttggttaaagaaaatgtttaaatatataatattaagatatttatctttatgtcagtgttggtataaatgcgtgtttatgaaaaagggacccaccaaggtgaaatgccgtaggacccacaaatgtcataatgctggctggcctcaaaatgtccttcctattaaactattttgaatgattcctaggtatgccagatgccaatttttcttggccagccagggaacgtctcatgtctttggaagaaattatctttctcttactggattcttctgagaaaagtgatttgttaaaagttttggttatttcaaatcaatatgtactcaactaggacgtctcctcacccacgttaattttttaaagaggaggaaagtaggagaagatgagcgcttcatgtaaggctctgccagcctacgaggaaatgcaatcctccaggctcgcccgagcgtgggctgcgggcaggggactgtggggccgttgtctcgttttattccacggccgtgcagcagagggcgcgtgcctctcagcactcatgctgcgcgctcccctgcgcctctaggatcgtatccctatttgccccaaggtcatagctcctaacccagcttgccagccccaggccggggacaccagagactgagcccttcgcgctggagaccccggcgcgggtggggcgggagggctccggggccaagagacaggtcacaatggggacaggggacgaaaggcgccgggggtccgggtcccgagcagtccccgccgccgccagactccgcagccgggagggggatggggtgcgcgtagaggctccgcggcccgggttggacggaggagcccaggagccaccgcagccgccgcacgcccagagctccgagcttcgctgccagcccaggacaccggggccctgccgtgggccgaggggagccgggcggcgggagaggagccccggagccccggagccccggagccccgccgggcgccagccgagagggcgttttccccgcccccggagactcgcccgcccggcccgccccgccccgagcgcggggagttcacctccgcccgtcaccacctccccttgtcgcctaggtccacccgagccccctcccccgggccgcccccgagcacgaagttggcgggagcctataaaagctggtgccggcgcgacccgcggacacacagtgcaggcgcccaagccgccgccgccagatcggtgccgattcctgccctgccccgaccgccagcgcgaccatgtcccatcactgggggtacggcaaacacaacggtgagtgccggcgacggccagcgcgggggcgcccc

SEQ ID NO: 40733 - DNA, 2300 bp, Homo sapien
tcctcacccacgttaattttttaaagaggaggaaagtaggagaagatgagcgcttcatgtaaggctctgccagcctacgaggaaatgcaatcctccaggctcgcccgagcgtgggctgcgggcaggggactgtggggccgttgtctcgttttattccacggccgtgcagcagagggcgcgtgcctctcagcactcatgctgcgcgctcccctgcgcctctaggatcgtatccctatttgccccaaggtcatagctcctaacccagcttgccagccccaggccggggacaccagagactgagcccttcgcgctggagaccccggcgcgggtggggcgggagggctccggggccaagagacaggtcacaatggggacaggggacgaaaggcgccgggggtccgggtcccgagcagtccccgccgccgccagactccgcagccgggagggggatggggtgcgcgtagaggctccgcggcccgggttggacggaggagcccaggagccaccgcagccgccgcacgcccagagctccgagcttcgctgccagcccaggacaccggggccctgccgtgggccgaggggagccgggcggcgggagaggagccccggagccccggagccccggagccccgccgggcgccagccgagagggcgttttccccgcccccggagactcgcccgcccggcccgccccgccccgagcgcggggagttcacctccgcccgtcaccacctccccttgtcgcctaggtccacccgagccccctcccccgggccgcccccgagcacgaagttggcgggagcctataaaagctggtgccggcgcgacccgcggacacacagtgcaggcgcccaagccgccgccgccagatcggtgccgattcctgccctgccccgaccgccagcgcgaccatgtcccatcactgggggtacggcaaacacaacggtgagtgccggcgacggccagcgcgggggcgccccgatccccgatccccgatccccgatccccgagcccggatgccggcccggggcccgcagcgcccgcacatgctgtttaccgcggccgcggggagtgctggaggctcaggtgcgccccgggcgctcgctccgctcgcggctccgcggcgccggggatgtcccccttgccccagctgcgaggccactgtggaggaatccccgcgtccgccggaggcgcgtagggcccgagggaggggaggcgcagccctggccgcgggacccgaggacagtccctcccgggtcccgacctggggatcattttaaccggacctaggaggaggcgggaaagggttgtaacggaaaattctagttgttgatcgcagagaaattaagagactcccctcccccctcccccaccttccacccccaccccacccctccagcttcagcaccacctgtggctaaggcgctcagcacgaactgtcccggggcattttccagtgctggtttgaatccatggctctgatttccgagttttcccttcatctctcgacttctaatgttagggggtcggacatcaggaatcgggttttatcttggcctcagatctggttcttcggagccagcggagcagaggagcatgcgtctggcgcacctagcgcatctttggagggtgtggggcttcccaggtagtggggaaccctgacggttaaaggtggggtgggcccgggcctgggcagtgaggaaaggatccagacctccttgaatgtcttaagtgagcttgcatatcccaaaatcgcaaccacaagccctgacattagtgtctgcccgatttcagttgctgaatttcagtaaaacgaccttaaaatagctaatatttatatagcactcagtgatctaagagctttacatatatcgattctaattcttacagcgacatctatgaggtagatttctaattatcccatattacaaatgtggaaactgaggcacagattacgtgttttcccaaaatttagcccattgttaagtgatgcttctaaaattggaactgagcagattggctccggaatgattgctcttctctaggggtctgggtgtacctttccccacaatgggggattcacatgtcttctttcccccaggacctgagcactggcataaggacttccccattgccaagggagagcgccagtcccctgttgacatcgacactcatacagccaagtatgacccttccctgaagcccctgtctgtttcctatgatcaagcaacttccctgaggatcctcaacaatggtcatgctttcaacgtggagtttgatgactctcaggacaaagcagg

SEQ ID NO: 40734 - DNA, 2300 bp, Homo sapien
ggaggattgcctgtgaggaacttaaacgagtctaccagtgtctagacacgggggcaggtctgtccggcacagcagctccctcaaggaggagaagagtgaggagaaaggaaactcaagtctcaccattctgtcctgggagagaagaggaggatctcatctctcatctgtccaaacaaggcaaggagactttctctcatctttccaagcaaggcaaggagactttttatcattaggaaacaaaaagaatttagaaggaatgaaagcagcccgtaaggtgaattcctaaggactgcccattgaaactgacaaaattgcccttgtttgatgagaggaatgagcagagcattgatgtggtgaacaaggatctagtgagactctcccagcatgtttctaccaaagctttatctaagcttctcagaacactctcctaataagcagatgtttggcctttcagaaagtcaacaagcaaaatgccttgagtgtcccaaaacactgatgccatgatgtgggctcctgactggcctccttttcctttgactggaccactgccacctcttggtagccatcgctttcatgatgctttgccttggagatcatattggtgaagccatgctccaactgccgcttacaatttgtcagagggatgcgtcaggatcgtgatccctcctgtttaaaatttccactgatagctctcgtcgtaactgcagctgatctgggcacagtggttttcacagccactgcaggattcatcttccacatcttctcacctcttcttgaaacaagctatacattcgtaaagagttcatttctttggggtagtgtccttacaagcttttcttaaaacgtcaatgatttcttcaatcttccacccaagcttcaccataaatttgatgtttcctcttgctgcaattttcgtggaattcatgttgctctgatgagagtccttttcagtggatgtctaaaccttcttagtgcctcaaactagatctagttcagaaaggttatcagaagttaggacaagtttattttagtgcaaaccattggaaatccatgcatagtttcttcaccatgtgcattttctatgaacctttggaagaccacctgtgttgaacattgcccaagtcctgggagagaagtgggtgcggtccgcttcctgtcctcaatttgcccgcagcggcggagtgcacagagcagggaaaggcagccccagagggatcccgccctccagcatgcagcagactgctggcccagtcctggctccaaggggtgctgtgtgggcccaagcaagttgaccaacctccctgaaccttaatttaatcctaggtagcccaattccagtagccattataggactgccctgcagggacagttacttaactcaggaaaagcaacctagctccaagtttagcaaccgggagttccagttgattccattagcgcaccccctgaggcattcccaagctggagtctggtggaagatgaggctcagtgtgattggactgaagcaccaacctatcaaggagaagtcccacccagtctgccctgtgcctatataaaggcgacaagtggcggccgcagcactcattgaagccgccagttgggagaggagcagagccaggccggtgctcccgaaggcagcaagatgttgcgagccacagctccctgctggttcccccctggatacccagaagctaagaaggtggccgaggaggcggccctggaggcaagccgccatttgggaggggagcagagccaggccggtgctcccgaaggcagcaagatgttgcgagccacagctccctgctggttccgccctggatacccagaagctaagaaggtggccaaggaggcggccccggaggcaagccgccatttgggagcggagcagagcccggccggtgctcccgaaggcagcaagatgttgcgagccacagctccctgctggttcccacctggatacccagaagctaagaaggtggccgaggaggcggccctcgaggctccagaattcccactgccctctcatcagcctgcccagagcttcgggctctgggtgccccagatgcacaagcaggcctcagcatttgtggacatccaggcggagccccagaacaggggtccggcggtgcccccagcgtggcccaagatggtgacggagtcgtgctacttccctgcgcagaggggatcggcctgccgcttgccagccgccccaaggctgacagagaggccctcgggagtccgcatctcagcccccaggaagaggaagacgatcgcccactcttccagcccttgcttggtca

SEQ ID NO: 40735 - DNA, 2300 bp, Homo sapien
gaaagggcttcaggctggtgactagcagaggtccacctgacctccgtaagctgctgaacaagtagggctgccagaaatgtcccactagggaatttggtagagacgaagacatgctcaccggacaagggttcctcccaggatacgcccgagcggaagaagccggctctgagccacgccctttcaccctcctctaccccgccctgggctggtgaaggtgtgcgccaggatgtggactactgagccctgaagaaataagtccttccactttgaccccatggaggattgcctgtgaggaacttaaacgagtctaccagtgtctagacacgggggcaggtctgtccggcacagcagctccctcaaggaggagaagagtgaggagaaaggaaactcaagtctcaccattctgtcctgggagagaagaggaggatctcatctctcatctgtccaaacaaggcaaggagactttctctcatctttccaagcaaggcaaggagactttttatcattaggaaacaaaaagaatttagaaggaatgaaagcagcccgtaaggtgaattcctaaggactgcccattgaaactgacaaaattgcccttgtttgatgagaggaatgagcagagcattgatgtggtgaacaaggatctagtgagactttcccagcatgtttctaccaaagctttatctaagcttctcagaacactctcctaataagcagatgtttggcctttcagaaagtcaacaagcaaaatgccttgagtgtcccaaaacactgatgccatgatgtgggctcctgactggcctccttttcctttgactggaccactgccacctcttggtagccatcgctttcatgatgctttgccttggcgatcatattggtgaagctatgctccaactgccgcttacaatttgtcagagggatgcgtcaggatcgtgatccctcctgtttaaaatttccactgatagctctcgtcgtaactgcagctgatctgggcacagtggttttcacagccactgcaggattcatcttccacatcttctcacctcttcttgaaacaagctatacattcgtaaagagttcatttctttggggtagtgtccttacaagcttttcttaaaacgtcaatgatttcttcaatcttccacccaagcttcaccataaatttgatgtttcctcttgctgcaattttcgtggaattcatgttgctctgacgggagtccttttcagtggatgtctcatccttcttagtgcctcaaactagatctagttcagaaaggttatcagaagttaggacaagtttattttagtgcaaaccagtggaaatccatgcatagtttcttcaccatgtgcattttctatgaacctttggaagaccacctgtgttgaacattgcccaagtcctgggagagaagtgggtgcggtccgcttcctgtcctcaatttgcccgcagcggcggagtgcacagagcagggaaaggcagccccagagggatcccgccctccagcatgcagcagactgctggcccagtcctggctccaaggggtgctgtgtgggcccaagcaagttgaccaacctccctgaaccttaatttcatcctaggtagcccaattccagtaaccattataggactgccctgcagggacagttatttaactcaggaaaagcaacctagctccaagtttagcaaccgggagttccagttgattccattagcgcaccccctgaggcattcccaagctggagtctggtggaagatgaggctcagtgtgattggactgaagcaccaacctatcaaggagaagtcccacccagtctgccctgtgcctatataaaggcgacaagtggcggccgcagcactcattgaagccgccatttgggagcggagcagagcccggccggtgctcccgaaggcagcaagatgttgcgagccacagctccctgctggttcccacctggatacccagaagctaagaaggtggccgaggaggcggccctcgaggctccagaattcccactgccctctcatcagcctgcccagagcttcgggctctgggtgccccagatgcacaagcaggcctcagcatttgtggacatccaggcggagccccagaacaggggtccggcggtgcccccagcgtggcccaagatggtgacggagtcgtgctacttccctgcgcagaggggatcggcctgccgcttgccagccgccccaaggctgacagagaggccctcgggagtccgcatctcagcccccaggaagaggaagacgatcgcccactcttccagcccttgcttggtca

SEQ ID NO: 40736 - DNA, 2300 bp, Homo sapien
ggaggattgcctgtgaggaacttaaacgagtctaccagtgtctagacacgggggcaggtctgtccggcacagcagctccctcaaggaggagaagagtgaggagaaaggaaactcaagtctcaccattctgtcctgggagagaagaggaggatctcatctctcatctgtccaaacaaggcaaggagactttctctcatctttccaagcaaggcaaggagactttttatcattaggaaacaaaaagaatttagaaggaatgaaagcagcccgtaaggtgaattcctaaggactgcccattgaaactgacaaaattgcccttgtttgatgagaggaatgagcagagcattgatgtggtgaacaaggatctagtgagactttcccagcatgtttctaccaaagctttatctaagcttctcagaacactctcctaataagcagatgtttggcctttcagaaagtcaacaagcaaaatgccttgagtgtcccaaaacactgatgccatgatgtgggctcctgactggcctccttttcctttgactggaccactgccacctcttggtagccatcgctttcatgatgctttgccttggcgatcatattggtgaagccatgttccaactgccgcttacaatttgtcagagggatgcgtcaggatcgtgatccctcctgtttaaaatttccactgatagctctcgtcgtaactgcagctgatctgggcacagtggttttcgcagccactgcaggattcatcttccacatcttctcacctcttcttgaaacaagctatacattcgtaaagagttcatttctttggggtagtgtccttacaagcttttcttaaaacgtcaatgatttcttcaatcttccacccaagcttcaccataaatttgatgtttcctcttgctgcaattttcgtggaattcatgttgctctgatgggagtccttttcagtggatgtctcatccttcttagtgcctcaaactagatctagttcagaaaggttatcagaagttaggacaagtttattttagtgcaaaccagtggaaatccatgcatcgtttcttcaccatgtgcattttctatgaacctttggaagaccacctgtgttgaacattgcccaagtcctgggagagaagtgggtgcggtccgcttcctgtcctcaatttgcccgcagcggcggagtgcacagagcagggaaaggcagccccagagggatcccgccctccagcatgcagcagactgctggcccagtcctggctccaaggggtgctgtgtgggcccaagcaagttgaccaacctccctgaaccttaatttcatcctaggtagcccaattccagtagccattataggactgccctgcagggacagttacttaactcaggaaaagcaacctagctccaagtttagcaaccgggagttccagttgattccattagcgcaccccctgaggcattcccaagctggagtctggtggaagatgaggctcagtgtgattggactgaagcaccaacctatcaaggagaagtcccacccagtctgccctgtgcctatataaaggcgacaagtggcggccgcagcactcattgaagccgccagttgggagaggagcagagccaggccggtgctcccgaaggcagcaagatgttgcgagccacagctccctgctggttcccccctggatacccagaagctaagaaggtggccgaggaggcggccctggaggcaagccgccatttgggaggggagcagagccaggccggtgctcccgaaggcagcaagatgttgcgagccacagctccctgctggttccgccctggatacccagaagctaagaaggtggccaaggaggcggccccggaggcaagccgccatttgggagcggagcagagcccggccggtgctcccgaaggcagcaagatgttgcgagccacagctccctgctggttcccacctggatacccagaagctaagaaggtggccgaggaggcggccctcgaggctccagaattcccactgccctctcatcagcctgcccagagcttcgggctctgggtgccccagatgcacaagcaggcctcagcatttgtggacatccaggcggagccccagaacaggggtccggcggtgcccccagcgtggcccaagatggtgacggagtcgtgctacttccctgcgcagaggggatcggcctgccgcttgccagccgccccaaggctgacagagaggccctcgggagtccgcatctcagcccccaggaagaggaagacgatcgcccactcttccagcccttgcttggtca

SEQ ID NO: 40737 - DNA, 2300 bp, Homo sapien
tttcaaggaacatggtttagacttagtgggaggcttgtgacaaagctttctctgctgtgcggccagctgcagacaggacagaagaggtttctgcagcctactatgaaggccctcactgctgggagaaggtggacaggcagagggactgcctgcctcgtggaagtgtctggcgccttcactgctgcccaggtttaggttttatagcagatgcttcctatttgctgtgcgatccttatgcaaacaatccttacaacaggctctctgaggaaaaaattttgtgtttttttgagtagtaccttaacatctgacttcagtttgttccctttatttctctcttccattctgtttatactgttaggttggtgcaaaagtaattgcagcttttgccttttgagatgaactcttgctctgtcacccaggctggagtgcagtggtggcgcgatctcagctcactgcaaccttcacctcccaggttcaaacaattctcctgcttcagcctcctgagtagctgagactacaggcacgcacccccaggcccatctaatgtttgtatttttagtagagatggggtttcaccatgttggccacagtggtctggaactcctgacctcaggtgatccacatgccttggcctcccaaagtgctgggattacaggtgtgagccactatgcccggccttgcctttacttttaatggcaaagacacaattacttttgctctaacctaatagatagcctattctgcaaattagttcaaaagctcgagacatataagaacgagttgtttacctgcttaaaataaaccttctttccttgtttcttagtagttggagaattctgagggttctttaggaagaaaagtccattatttggtagttatgctctctttgcaggatgaactaattttccctcagctatatgcaagccgtattttaaattttccatcaaaatatagctctgggaaagttcatgactaatttattcatcacagacattccctgttaagccaaactacaaattaaatgaaattagaaaggaaattacacaaattgaagtagcattggcctggaaatcgggaagcagcctccagttccggttctacaacttgggaggcatgtgatcttgacttgcttggtcgtgactggatttcatttcccacacatcatttgtgtgtgtgtgtgtgtgtgtgtgtgtgtgtgtgaatgaatataattgacaaatatcaatgaaatctaatcaatatagtgatataatcaatatacatttatcaaaatgataaatatttataagtattataatactgtgtgtgtataatatatatacacacattcacatacatgtataatatgtataaataatacaagaatgaaatatatagaaaatgtaaagttaccatacataatatttatatttatttatatatatttatatctatatacaggttttctcactatatttgtatatacgggttttgtatatacactgtatatgtatatacaggttttctcactgtatttgcttagggtgttcgtctgggttctagacatctatcgtggccctcagtttttctctcttagatggattacccggaagatgaaggtcatgagtgccagacacaggcctttgtcatccgtttaatgcaatagaaggcagtgaagttatactttaaatattataagctcttagaattttaaatatatatatatatgtatgtttaatgttcatgtcatccgaatatgagctcagcgaaaagttctttagagggacgatatcctttatacaatcgtataattttatatgttcactttgtcaggttagagatgcagaaagtgaagcccagacaattaggcgcaggttctgcctgttggttgactttgctttcatcacgtcagattacacacacagacggtgaccagcgatgatccaggcgtctcggtcgttagcgggtatcctgggggctgtctccctgaccacgaccccccagtggggtttctttccgagggtcccgcccctcgcagctgctctttgataaagggcggaggaacggggctggctgcttcccgagtccccaggtcccgcgagcggcgggcgtgttgcgggtatggggtgcggcgccagcaggaaggtggtcccggggccaccagcgctggcttgggccaagcacgaaggtcaaaaccaagccggcgtcggaggcgcggggcctgggcccgaggcggcggcccaggcggcgcagaggatacaggtggctcgcttccgagccaagttcgacccccgggtccttgccaggtaaagcgccacgtg

SEQ ID NO: 40738 - DNA, 2300 bp, Homo sapien
atgttggctaatatttctatttacattaatgaacaatatgaaagtgaaacaacgaagacatatgtaaaacttctcttgatcttcataaagggagtggcttccttgctgaatcagataacagtttttaaatactgaaagaacatttcttcaaatttttttgcaatttacaatataatggctataaacattacatacttttactttgctttattaacattttctccatctttttctcaagtccagacaattaaccaaacagtgaatcaagccctgatttgtagcatttgcccattttcatggtataaatacttcattcctgccatggtctgctgcaagctaccgtcattatgtcattaaacccggagttgagaagagatgcatgagagcatgtcattatatagaatatctaccttacaaatacaatagacataataacctcaagtgcataaataacagtaaaacatagtaaaataatttaaaaaagataagtgtggtatttataatttatttaagttgtattagtttgaactctataaaactgtggatatgtaaccatctttagaccacagaagtgataaataagtgactgattcaacataaaacacactcaggatgtttaaggatggtggaattgtggtgggtggatagagaatgataacaataatggcagcctctactatttattgaatactttcaaagtctgggcactgtgaaaagctaggtttgattctctgtgattttcaacaatcaaagcagaatttacattgattcctttttatctagcttctcccaaacagttcggaaaaaccctgatagagactggagaatttctgggactttagttccaattaaagatttgacacaatatatatgaaacactttatatgcaaatagcattcatgatattttacataattttttaactaaatacaatatatagcagaacaagcactccttttggagtatgaaactcaacacaagtcccagcttcattaaatacttactgtattgccagctgtgcattttgagctgcctcacagcttctgagggctggttccttatttgtgattttagtaataatactgtctgtgcagattcacattgcagaataaacaggagattcaagtaggaaaaagaaaatagagtgccttctaaacagtccaattttgcagaggtagtggcttattattatagaatcatagccttctgtatctgtttccaggattgtttcctgggctatgcccttcgactggctgggaagcaactaccagcctttggcaattttagggcatttctgaccatttgtcttacaaatgaactgtgtggtagaattaggttctcatgactcttcaaattgcctagtcacatttgatttacttatattataataataatgataataataattatcattattattttgagacagagtctcactctgtcctccaggctggagtgcagtggcacaatcttagcttactgcaacttccgcctcccacgttcaatcgattgtcgtgcctcagcctcccgagtagctgggattacaggcatgcaccacaaagcctggctaatttttgtatttttggtagagacgaggtttcaccgtgctggccaagctggtctccacctcaggtgatctgccccgctaagcctccgcaagtgctgggattacaggtaagccatcatgccagcctaaattaaattatttttattaaaaaccctctctttgttcatattgatagtcctcaaagaattttggattagtgtaaattacagttgaaagctcagctggtggtaggaatgtttacaaaacattcaggagtttgaagcctcccaatagtaaagctgggaagggtcccatctgtgggagagtaagaattgagcctggatcctcccctgactctcatatctctttttcccaatcgtggtttgttgcctgggtttacttgggtcatctggctgattcattgttgctgtataaacagggctgagtgtgctgtgttgaaagccactgaaaccagaggaaactagtcacaaaaaccctgactatcacctgatagattgcttgtgctgcctgataattactcgcacttttcccaggctagtgcaaatcttcaggggccgtccaggactacagagctgtttcaccctaccttggcttcaatctcttcccccatgctcgaaggtgcggagctgtacttcaacgtggaccatggctacctggagggcctggttcgaggatgcaaggccagcctcctgacccagcaagactatatcaacctggtccagtgtgagaccct

SEQ ID NO: 40739 - DNA, 2300 bp, Homo sapien
cccatctttaggagggcagatttgagacctgaactcccatctcttcacttggcttaaaaagaaaggaataaatcctttctttttcggaaaactcatcatcttggtcattggcatactgtgctgtgaacaaaataggcctggttcagtaacactatcttatggagaactttctggtattcttttcacactcccaggtccttgctctccgagagaagaaacaaggcatggttttatttgggacatggatctagttgtgtttaccgaaatccatgtagttttctgtttgtttgtttgtttgagacagagtctggttctgtctcccaggctggagtgcagtggcccactctcagctcactgcaacctccacctcccaggttcaagcagttctcctgcctcagcctccctagtagctgtgattacaggtgggcaccaccatgcccggctaatttttgtatttttagtagagatggggttttgccatgttggccaggctggtctcaaactcctgacctcaggtgatccgcccaccttggcctcctaaagtgctggaattacaggcatgagccacccactgcactcagccctatatcactatgtagtattatcagtgaattttcttggatgcaatctgccagaaaatagccagttttcccaaaccaaagcaaaaccaagcaatttcactttcacttactctgaggggacaattgagaaatactttactaggccgggcgcagtggctcatgcctgtaatcccagcactttgggaagcagaggcaggtggatcacctgaggtcagaagtttgagaccagcctggccaacatggggaagccctatctctactgaaaaaaaaaaacccacaaaagttagctgggtgtcatggcacacccctctagtcccagcttaaaaaagagacagacagacagagagagagagagacagagagacagaaatacttatttcctaggcttatatgtgctccaggtttatgagactttggaaattctcaggacagggctttgcattataaagtcgacaaatgtgggagctactaaagccctagacttgtaggttaggacaagatggttaggaccctccttccctctgcccctggggccaggtcttctttctcttgtactttctgttcacaattttctgtatgtgactaaggctaccagaatgataggtgactggttaaaagacaggcttatgtttcagagcatttccctcccttgccttgctaattagcttctggtaatataagcctgataaaattgtttcctgaaagcttagtgatttaaaaaaatgtgaagaagagagagtcaaggcagtaaaaggacagtgaactaattcctcagtgttcatgggaagaggtcagtatttgctttctaaagttgagatatttagaaataaaagtctttttatattatttagagctatgaagacaagcaccaaaaagatctaaaaccatacatactttaaaatggttggcttctaatcccaggactttgggagacaaggtgggaggatcacttgagcacaggagttcaaaaccagcctgggcaacaaagtgagaccccccatctctaccaaaaacaaaacaacagccaccaagaacaaaccaataaccaccaaaaaccttagccatgtgtgatggctcatgcccgtagtcccagctacttgggaggctaaggtggaagaattacttgagcccaggaggtcaaggctgcactccagcccaggtgacagagtgagactctgtctcaaaaaataaaataaagtaaaataaaatgattgtttccagagcagggaactgggaaggcatttgggaagcagtgaagtagagtaggaagccccaactttgcactgtaatccatgtcttcttggaaattccttttttttaaaaaaaaaaaaaatctgaatgcattcttttgatgataattgaaagacaagtcagaccaaacccttctacatcttggtctattttattgaatgtgtcacatatattttgttacttattattttttgtccccaccttccacctctattttgttaattattaaaaccaggctatacttaacgaaaatggaacaggaaggacagaattattttatttcaggaatccatcaacatcctttgcagctacataggcaggaaaatctagaaattgtaatttatatagaattttaaaactcttcaattacaatggatagaggggagaaaatacagctcaagagagtgtttggatattggtggggcacaagttttttgcttattaatatcattggtgcaggaatttttg

SEQ ID NO: 40740 - DNA, 2300 bp, Homo sapien
tgttaatatctttttcttcataccaatgcagtaataaaatatattttgtagtattattttatggaagatgaggcccacacaggtataagcacctagggcctgtgaaagtcagaatgtggcactgggtggcagagctgtgttttgatgctgggcgatgtgatacctgagcctatgctctttctggaaggtagttgccaatatgtttcaaaagggctaaacttgttcatacttttttattacttttaataatttatctaagacagttaataaggacatgaacaatggttatggaatactatttataatattgttcatttgaaaccaaacagtcaataacaaaaggctggttcaatattgggtgtcagcttgaggactaggtgagtactaagagcttctgaacggggaggaaattgagcaatgaggggagctgaaagtgagacacagagcaggaagaggaggcctgcatgcattctggagaaggagtccagatccctgctggggaatacctacggaatttctgaggacgtgtttgtaagcacattattgcatctatttaaagggaccagacagcaaaagcaaaaagatgaagaaaatcttagtacatgtttaaagcagagatgagtgggcacatatggggcactgtgaagagtttttcataacaggagagatagagcatgtgagcatcaaaggaaccttgaatatcacgttaatctttgtcaggagagctccgaaaagccaaagaatgattttaagcagtggaatgacacagatgtatattttcgaatgatctttgtggatataatgtgcaccaatttcaactatgaagccagaggacaagaactaatgcatggaggtaggcgggaatgtgcattgttcagtcaagagatacttgttgaattctgtacacactcatgaagtgttggggttgtttttggtacacagttctttcaaaaagctcagttaaaatggaaggggagagagaaccagaggttttaaaatcaagggaaaatttaggacctaatcttaaaacgtgattatgctgaggagttgtaggcagtggagagggtgaagttaaagatgtgccaaggaccgcccacagtggggagcaggcagtggagaggagcagggacatctagcctccgagatagaaggaaaactagtaagtctgggtgtggacgtagatataatctatgggggttggtcaggtggttgggcaaaagctgtagaaatccatgcctgaaggcttctgcttctctgaagtagaaaccgggtcacctggtaagcaatgtggtcccactgacttctatttgcacattggcctttcttctaaaagcaatacacataaccaacagtacttttctaaactagttgacttttctgtaaaatgcagacagtagacactactttgtcagattgttgtgtgcgttaattgtgcggacacgtatactcggtcaataagtatctgctttatcaccgggctgatgtgagtgaggactaggtggtggggcttccacagatgaacgttttgattaataaaaaatggactgaaagtcttcgggtatgaccaatggctaaatgcaattatttactcttgcaatgtgttcgaggtcacccagctaggtcaaggagtatttatggacagcctacttttgcccccggaccttaagaagtcctgctccgggatcagccgccgaccggaaagtcaaattagcagtgcccagcgcgagcttagagcagcctcttcccaaatctcagcggcggccccgccccttccacacgttcaggccccgcccctccctactattggctgtccgtccccctccgctagactgctcggaagacccggaggagcggagttttcctaaggcagcatccgagcgccctcgctgcgcatgctcgggggaggcggattccgggtccggagttggaggctttgggcggccgcggcgtagcgcgcggtgccggggccggcggggaggcgcgcgcttagggcgcggcgccggcgacgcggccacgcggcgcgctcccgaggaagggaggtgtggggtcggctgggggtggcgcgtggacggggtgggggtggggggagggtcgggtgtcggcgagctccgcgtgcgggttccgagtggctgctggcggcctgggctgccggggccgacgcctgggtggctgctgccgccgcgcctgctgcgagatggcgatcttgggcgcggaagggtgagggcgcccgccgcaggaggaggtgccgctgccgtggccgcccggctgccgggagccgacagcttcgcgccgggtaagga

SEQ ID NO: 40741 - DNA, 2300 bp, Homo sapien
aaaaagctccaagaaattctgagatgagtgtcatggatgactttcaggtgttccatggactcccctaaaattatatccacaaagcataggcgcatatggaaattttccaggccagcattttaccaagaattagtaatctccaaaaagttgtaaagtagcacacatatgctgagggtaaagcttcatgatcttgctcaaaatggtaccactgttctcccaaccaacctggatcagaatcagttatttttactttcatttgccctctcatcaaattttggctattcgacttcctttcttcctttccattcgcgtgcaccacagctcagatcctcactatccatgactacaacaactgggaggtctttctacctccagggtctccctacctcagttcacactacagacctctatcccactaatccttctgaaacaaagtgttcaaattgtttcactcccaattcaaaatcatctgtggaagccccaccaccgggtaaatccaaggtcataagtctggcattaaaaacaacccataaactggtccaaatttttacttcaagttttatcaccctttatcctggtacaaataagtttatgttccacccaaacataattacctgcctttccccaaacaggaactctgtgctctcttagagatacctctctgctaggattacctttcctgcctatccaaagtcataatcgtccttcaaaaccacgatttcagaagccaggagctctacaaactaaccctcttatccctaccttgccaagtaagatctgagctctactctctttgaagttgacttctgagaggattttggtaccatttatgaaacttatatattaaaagacaaataaggcatttgtgtatagcactatctacctaattagtgtgaaggcagaaattgctaatcggttcatctttgtatttcccaaaatacctcccacaattatgcagtaaatgcttaacaactgtacaaggaagtaaaggaaatttcagccaccgtggggtaaacagcaaagattaccatctctttgaaggcagaaactttatctgcgacatcctgtattatgccggtagctcataattattgcttttcaaaaccctgatgtagatcttaccagcagtttcacattttaaggtaagaactatctgaaaatgttgataagctatgtcccaaagaactattccacatactttacaattctcaatctgagtagctcccaatacttggccactacactttccattttttaaaatactaaccatttatgaaaaatgatcatttctagttgcagctaatttactacttgatggctaaaaacaagtcacacaataaaagaacgactttcttctttaaaaggtgcattttgcttgtataatacacacagatttggtgaggcaggtaaagtggatttacacataaacatgaactcttgttaaaaaaaaaaaatgcaggtaactgtaaaccaactatttcaggtaaaaacaccaaacggggaaaacaaagataattttggacatgattttttttcccactactattaccagtaacattttaaagcagaaacacaaaatcttgttccacattaacctacacacacacagaaaaaaatttgttaaacttatcaaatagaaaaagaaggcaaaatcaagcccctggaaaatattttattctgaaagagtaaaaatgtcaaaattataacagacactactcttctttggtaatgaaggtttcatatatttaccacagcagagaaaactccaaatcggcagagcaaagaaaggactgtgaacaagactgatcatttaaaggtcgtaaaggtaaggagcaaactacaaaattaaatttttttaaaaaaagaacacgaagatgaaaggagagtctgtaagtcacagacaagataaggactggtaaaatctgcaaggtcactggaacctaccaggtcacaaaaggtggaggtgggggttgcgctgggggggcgggggatggggagctgcagagtcggtgaagaacggagagtgataaaaacatgtcagaaaaagacgttccaaagctggagtccttggtttgcaacgctgaaattggggtgaaagtcagggaacgggcaatgagtccatgtatttgtgttttcagggaggtgttagggaaaggtggaggaaggcgaagagaaggctaaggaagcctaagaactgcggctgcagagtcacggaaacacttcgctccgctccaggatcactggcacaggcctttgccagggcgaactccgggcaagacccgtgaccccaccccagaaaa

SEQ ID NO: 40742 - DNA, 2300 bp, Homo sapien
ttttcctctgggtgcccacacagtcctttttcctgaagttcaataatttcactgttgattgttttgtatctttttttaggaatatattaagatcttccttaatgtcagggaagttttcttctattatgtctttgaatattttttctgttccatttgttccatttttcttcaggaacatcagtcatgggtatgtggaatctcctttgtcagtcttacatgtctgtcatcttttctctgatcatttttatctttgcacttttccattttattttgatttttctcaagcctatcctcatgtcactgtttgcagtactgccctacgttttgctgcttctaatgtgatttttcttcattagtggttttactgttttcttcattttcttctttaggctctgctagctcatctgttgtctcataattttttcaacctcttgtgtctcttcagtttatttgagagtattgagaagaatatgttgaaagttaattcttctgcctcttgctagttaggaatttttcttccttttctgctagcatcagaggaaaagagtagatgccatgttttagccattcttcttttgaattgattgagttttctctgggctgttgtttgctaaaaattatctgaagcatctggagggtttattcctagttttatatatgtgtctaaacacactctcacaagacctgctccatcctcttacctggggtatgtcttacttcagcctcatcatagagggaagtcacttggttcaactactactatgttacaactggacttagttttaataattggtgtttactatttctagttgattttgttgaggacttccttctctacccttcaggcagtatcagtgattgtgttttataacctttagaaaaacgtttattaacaggctgccaggccagatgtagcctacatagaggtggccctcattgtgattttacagtttttaaattacttgatgacatttgaaaatcattagattatgcttaagaatgaagatttctgacttctctttaaaacactcgacctgcaatcctgccttctcatgtggcgtcagtgggctgaatcagagttgtttcccctgtagattagcatatactctgtttcactatggtgtccaccactgcccagttgtctgaggactacgataatatgcctagaaattcttcttccttaaaaccaataattcagcaggtatataaggaatggaggattgtggctaagcagagaatgtgagccccatctagagaatagagaaggaatccccttgtacttacagattactgtaagcatttgagtttggaacccttctttagaagaaattgctattgaaaagaaccttttagagattgggtttatcttgtaatacctttatctagttggatttcgcatattggactttaaaatgggtggtaaaaggttagagattgcttatcacatttaaagatttaaccttttaaattttagtttcatttttaatgcaatgacaataaagttaaaagtgttaaatagcagcagtgctgtgtatctcggtatcacctgcaaatgtatattaaaacctgttgtatatacatcctagagtgcttgtaagagttaagaatacaaaaaaatacatggcttttgcctttgagaaacttacagtctgatggatggggcaagtcatgtgcataaaaatgaattaatattgtgaggttgttacaacagagtattcagtgactgatattaatacaaatacactggaaattgcctcaaaaaattgttgaaatgggatttaagctgaattgaagttgaggagacatacccaagcaaaagtgtggcatacaaataagcatgttatatctatatgaggatcagtgaatttgtagtttggccacatcgaaactagcaggtaacttaaatggagagccagatcatagaagaacttggatagagggccaaagaattgggcagtggagttcttaaagactgttgagcagaggtatgatgtatatatgaatatatttaagatctgtttttaaattcacatattaatgctaaaaaataaccttgacttattttcttatagagaatggtttttcttgctttcacatgaagttttgaacccaatgtattgcttatttgagtatgcgggcaagaacaactattgtctgcagataaatccagcatcaaccattaatccagaccatctttcatacttctgtttcattggtcgttttattgccatggtgagttcctgactttattattatttatttaagtttgttacaaatgtattagagaaggcttttaaaaa

SEQ ID NO: 40743 - DNA, 2300 bp, Homo sapien
tcaatatatttaatattaattttctttcactgctgtgacaagctcagtgacttaaacaacacaaatttattatcttagggttctttagttctgtatcttgccgttcagaagccaaaaatgggtctgactggctaaaatcagcattgggagagctgcattccagagaccctagggaatattccctttctttgcttttttcagtgtctgtaggctttctgcattctttggctgaaggtgtcttcctccatgttcagaaccaccatcaaatcatcattctgatcttgtttccattgacactccttctctgacttttgccttcctctttcacttttcaggactcttgtaattatattgggcctacctgggtaatccaggataatttcctgttttaatattagctgattagcagccttaattctatctacagttcaccgttgacatgtaaccaaacattcagattccagggattaagattggggcatctttgggggccattattctacctaccataaatatcaactaaagaataaagactactccttatcctttgggttgttaaaacacaaactttgtgattcagccacgtatccgataaaaatatagaatagagtggaagcaaaatttgaaaaattaaccagccatatgaatattattaaactttataacacctaatcagaatgaagtgggattactgagaaaaataatctttatttaattttaggggttttttttgccattgtcatttaatttcttaactagtataattattacattatgatgttaacttaaaaacacgattgcatcacaaatttcattgtatttttctttttgctaattttttaaaaactagaactacccccatcccccccctttttttttttgagacagagtcttgctgtatcgcccaggctggagtgcagtggagcgatcatggctcactgcaacctctgcttcccgggttcaagcgattcttctgcctcagcctcccaagtagctgggattacaggcgcacgccatcacgcccagctaatttttgtatttttagtagagatggggtttcaccatgttggctaggctggtctcaatctcctgacgtggtggtcctcccacctcagcctcccaaagtgctaggattacagatgtgagccaccgcacccagccaagaaacccttttaacctcaagtatactgtgattaattaaagtataccaagtgtatacacattggaatcttggcttaggactaagtagtacagtacccttatagaagacaaaattaaatgtacatgtttctgaataataattggaatttcccgaaattcagactgtttttttcattaagtagacagttttcttagggcactacactgtcaataatgtttatgtattttgtagtcatatataaattagttttaagagtcagtcagagcatagtgtcagtaagttccagatttagtgtgtagttagcttcatctaaatttctgatgacagctctgaccctttgaacaacatctctgtataaagagaatttattaaaacagtgtggtttggttcatgcaaattactaacattcagtgctgtttaagtagatgacttttattttctacaatggttggtagttaacagcagcaacaacaaagactgtgtagagcaagcttgtccaacctgcggcccctaggccacatggagcccaggacagctttgaatctggcccaacacagataagtaaactttcttaaaatattatgagagtttttggaatttttttagctcatcagctatcgttagtgttatatttattgttagtgtttcatatttagtcactaccagagtaagttttctaattttttatttcccatgatttcaataaatcattttttatgatagcattatgcttatttctactttgtttccatctaggttcttcctaatttctgctgtttcattgtaggtcatttctgtatctaatttcatttgcttatatataaaagtgtttaagtttctttgaattattgtcatctgacttgggaagacctattttattgtgtcttttttcctttataatctttgaagttgaagaaatacttgaacaagcagactacctgtatgaaagcggagaaacagaaaaactttatcagttgctaacccaatacaaggaaaggtaagcaatgtaggataggcctaggcttgtggtttcctcaaaatttttgttatttaacaattaaaatgacccttagtgcttgaggttttaaaaattgattattgtagtttttacttcaaaatatttcttagagtttaattt

SEQ ID NO: 40744 - DNA, 2300 bp, Homo sapien
attcttaaggttatcaaacttccacacctttcctctgaaactccacactccaactctctatgctttacttggctgttatattagttatcagttgctgtgtaacagattacatcaaatttagtggcttaaaacaggaacaatcatttattatctgtcatagcttctgtggtttaggaatttagaagtggcttagctgggtgcttctggctcatcatctctcttgatgttgcagtcagatattggccaaggctgcaatcatctgatggcctgacgggctgaaggagttcttcagcccaaaagttcaattgtgccaaggctgagaaaccctgctttaaaccgatgggactatacatttaaaaaatactaatgtcgtgaaagaccaaggctgacgatttaaagatttaaagaaagtagaaacataacaaatgcaagacattatcaagatttgatcttgaatttagaaaaaaaaatcattagtataaaggacagtattgggaattaaacaaaatttgtatattaaataatagtattctgtcaatttcagtttcctgaatttgataattaaactgggactaagtaagggaatgtcttgtttctaagactgaagagtcatgatatctgtaatctactctcaaaaggccttacaacagaaaatactaggaatataatatgtgtattataggtaagatatgtaaagaaagataaagcaaatgtgagaaaaaggtaacaatggctgaatctagctgaagaatatatgggagttcctgcaacttttcttaggatctaatttttttttcaaagctaaaaacttaattacaaattcactctagcagagatatcagaaacttaatttcactgttatcatggtatccagtggcataaacatttagcaatgttgagggggtagctgccagtagaaatgcataaaataaaagtgattctgtctttgggaaaaaacagctaggtttcagaagttgggaaggagatctatatatttttaaagatagactttaaagacataatcctaaagaaatacagctgatttaatgggactagtggaggtagcaatcatatagtagaaggagcactggactcagagtagaaagacatggattcctgtcttctaacatatccttggttaggttaatacatctctttgagttacagttttttcatttgtaaacctgggataccacttacttcacaaggtagttcggaagatcaatacgactatgtattaattccctatacagtattaaaagtaccatagaaatgcaacctaattttttaaaaccatgactcgcctcccttattacccataagatttttcgttaaacccatatagtaggtactccctttgcagtctgtgtttccacccaccctgatcaggcctcaagtaggatccaaaatttcttcattttcccacaaaagaattccactcgagcaagaaattttattttactcgagtaaaataaaatactttgctcgagtaagtaaaacatcttattgaagaattttaggggagaccagggtttgtttttgtttctgttttttactacacatgccctagcattcaagggcatcagtatcctttccagaggcctcctcccgctagttcctcttcccaaaacgctttgcattttttgtttctttgctctggactctctcttgaatctacccccttgagtcgctcagtcgaagagactgagactttcccttcttcatgttgggcaacataattcttccaattatttacttccaaaaaagacccactagtaccaagattcaatctacttttgaaggcagcagataattaaaatgacaattttttttctggcatacttgtattctcgggtctatttccgagctttcagttctattctggcgacgaatccttgtgcccaaaccatgaaagaccccctagagagatggagcagaaacaagtcagagcgcctgaagagagcgctctcacggcctcagtcctggacgcaggcgcggaaagtccattaagtcccacccaatcggggtatttcccaccccctaagcccgtgcaccggaaaccatgggggcggaagaggtgctgggcaggaggcggaagaggtgctgtgcaggaggcgggcgggcgcggttctttccggaaggattgaatctcctttagccccgcccgcctccgtagctgcctgaagtagtgcagggtcagcccgcaagttgcaggtcatggcgctggctgctcgactgtggcgccttctgcctttccgacgtggagccgccccggggtctcgtctccctgcggggacttc

SEQ ID NO: 40745 - DNA, 2300 bp, Homo sapien
aacctttagtaaaaactaaaacacttgtagtacctccccagtacacttcagcaacaaaggccttgtttctgcactggcagtttgttcttatctttgcccctgctaccattcctgtgccccagatatttgcataactggctgctgcttatttttcaaatctcagatcaaataccatcttagagagctcttttcagatccccagtctaaataagctcacactatcctcaagtccctctatcacatcaccctgccttaacttttctcatggcacttctggctggctgaaatctcatttgtctttaacaactaacttaagattcaaccgtcctctaggatagaagttcctgtctgtcttgctcacaagtctagagcaatgcacatagtgtttgttgaataaatgaatgaatcctcactggcactgatacgattttaaaaatgtttaatttgcaggccaggcacggtggctcacacctgtaatcccagcactctgggaggccaaggctggcagatcacttgaacccaggagttcaacaccagcctgagcaacatagtgagaccccatttcttaaaaataaataaaataaaaatgtttagtttgcatttcttggattaagagtaaagtttttacttaagaatgtctgtgtttcttcatttgataccctttccatttcttctgtaattaaaaaaaaccttcacccatttttctattgggtgtttttttttttcttatcaatttaaatgaacttaagaggccaggcacggtggctcacacctgtaatctcagcactttgggaagccaaggtgggtggatcatctgaggtcgggagttcaagactagcctgaccaacatggagaagccctggctctactaaaaatacaaaattagctgggcatggtggcacatgcctgtaatcccaagctactcaggaggctgaggcaggagaatcgcttgaacccgggaggcggaggttgtggtgagctgagatcgcgccattgcactccagcttgggcaacaagagcgaaactgcgtctcaaaaaaataaaaataaaaaataaatgaacttaagatactaactctgtcaggtttgggaccaatatttttcccaatgtgttttattgattttgtccctgtttccttgggaagaagttctaaattatcgagcagtcatgtatcaatattttccatagtgttttgtttagctgcaggcagcatggagtagcaagcagtccagcctgcactttgaggttagtttacttacaatttgtgtgacttcagaaaagtaggccaattatttagcttccaaatctcatgttactcaattgcagttttcatttgtaaaatgggtatactggcaccaaatacatcacagaatcatgaggattaaaggtaatgaaggatataaaatgtccttggtagtgtgcacattaagaatgccctaaataagcatataagcatggttaacagctaagatgtatttcgctattttcatgttgataatttgtcttggtaacttttttttttttttttaagacagggtctgtttgtcacccaggctggagtgcagaggcacgaacatggcgcactgcagcctgagcccgtgatccttctgcctcagcctcctgtgtagctaggaccacagtcgcgtgccaccacgcccagctatttttttttttactttttgtagcggtggagggggtctcatttttttgccccaggctggggctggtctccaactcctgggcacaagccatcctcccacctctgcctcccaaaatgtttggattacaggtgtgagccactgcgcccagtcttctcagttcagatatggcataaattttctcaaatatttaaattatttaatccttaaggaatttattttggtgcaccaaaccacttaccttaaagtcagttttgccttttcagtaagcgactggcctccagaatggcctcgaagcgccagcctactggcaaggagctgacatgcagcccggagtcagctccctgcggatgggctgatcctcgcgcaggctgtgcggggcgggcgcgcactggacccgccccatccccgccccctccccgcccccttgctctgccagtccagccctaggttctcctgaatcctgcggtcccagcgtcgctccggacgctgccaacctgttctccaccgtcgctcgacttccacctctaagactcccacgtgagtgcgggcgtctcccagttcctgggccggtgaggcagcagcccagcaaccgtaccgcccgggggaaaaggaaagtcctggcctggaggatccgagccc

SEQ ID NO: 40746 - DNA, 2300 bp, Homo sapien
cacagagctactaaagtgaaaaagaatgatccaaaattcatgtccttcattccagaattctttctagttgtccattttccaaactttgagacctctgatctagacaaaataaaagtagtcatttataattttaatgcccatgttaatgccactctattgtcaaaaatcaggttgttggaggtattttaaatcattttaaaggtgcttgaattatttaataatatctccatcccatttattctgacctgtgacaaatctaaagggttaaattgtcaaaacagactagccagaatcacagatcttacatagcaccaaactttattaatgattcgttggctacaagccgccatcaggaataaacaaaacattcattttgggaaaaaccccaaactgtcagacacagcatccaaacaaaacagaccatttttctcctgcagttggcatattttggttttgcatttacaagtaatttttgagcattgtctgcaaaaacatttctcacaaaaagaaggcagtttggtttggggacatcttcgttccacattctcttacagagcttacatagcacctctctctccattctccagccagcctgctaaattccaggcttatttacaataagcaatctagacagaccagaaatgtcctgctaaaaaagtttcataaatagggactccctggtatctttccactgataaatactatgagatttatacgaaagtctggtgaggtcattttttcctctgcaggtcttaggaagggaaaaaattagtcacaggctggctgttaacaccttcccttcctttggcttagcttctatgcttatacccaaagttcaaaatgtaatcaattacaggattacaggattatctgaaaagttcctaaaatggccctatacatatttgataatctattcagaattatttctgaagcaataatggaaccaaaacaccccccaccattttttaacaaaaataaatagctttgtgtttccaggccatataagtcaaatcatgtattcaattacgttatttattaggtaagtttatttttgataaaatggttgaatctaaaattaaaacttctaatttattttaaaaatccataagggaactgcgattttggtaatatgaaatctaaattaaaatgctttcttcataaatacttaaaggcttttttctgtattaactgtaataaacgtatcttaaaatacataactagtatctcaaggaaatttccagattgcaaaaatacagagggcaagaagtatttgatgggttgacttaggctgccctgggtgtgggtgtgtaccttgttgcataaaggctttggttttaatttgaaactgcagaagataagtgctctcattaaaaacaaaaacaaaaacagaacccctttaaaaaaaatcatgcgtctttggtgcactaaaaaatctcatccaacagcatagaacatcaactttgtctgggctccgggcaaaggggaaaaaaaagttctctttaacaaatcttagtcttgtatctttgcctcacacaggtttggggtcaaaagtgacacacacacacacagaggcagagtagaataagcagatttttttttgtttagccatgtggaaatcaaccaccagaagaacagaaaaagaaagcttaaaaatagtggcctaacattgcaggaccagagaaggggattttgaggagtgaatgagttgcttcatatcataagccctcatggattttttttaatcatttccatattactttgcataaagttagacagataaagataagtaggtgggtaattagaaggaaaaaaaaagaaagaaaacaatgtgttgtgtgatcacatttaaaccattcaaatcaactatgaagctgtgtttaatcctctacttctaaattattcacaagatcattttgactccctaaagttcataaacagagtgcaaatcacccaagcagaagtattttgctgcttttaagccaaagccctgactagctaaggagttgcctgtaggaattaaccagaacaaaatcctgattaaacagctaattggcttgtctactaaagaaaaggaaaacaaagtacatttctctaccttaaggcacagtcataaatacagagggttttcagaaccacctcagagaagatgtttaaatcgctgacaaaagtcaacaaggtgaagcctataggagagaacaatgagaatgaacaaagttctcgtcggaatgaagaaggctctcacccaagtaatcagtctcagcaaaccacagcacaggtatgtcctctacattcctatgcaa

SEQ ID NO: 40747 - DNA, 2300 bp, Homo sapien
agagaatggatctagaaaacctgtggaatgatggcagtagggattaccaacaaggggacagttggaatggcaaggaaccattctgaagtgggagctaggcaggtggctagtgtggaaggaatgcaagatgaagaatagtgatgtggccgggtgtggtggttcatgcctgtaatcctagcactttgggagaccaaggcaggcagatcaccagaggtcgggagttcaagatcagcctggctaacatggtgaaaccgtgtctctactaaatatacaaaatcagctgggcgtggtggcacctgcctgtaatcccagctacccgggaggctgaggcaggagaatcacttgaacccgggaggtggaggttggaatgagtcagaattgagccactgcactccagcctgggtgacagagtgagacttggtctccagaaaaaaaaaaaacaatagtgatgagactcaacaacaaaattgagtctatggtgagtttggagtttgtaaaactggaaataggaaaatacattcaattgaaaagttataacctgagtaaatttattgtgcagatataatttaatagaaactgttgcaaaataaatttgttacttttgtaacataattaatgttttctattctagttattaatgttatctagatgaagttgctccagaaatggttggtttacactctgctagtccagttcaggtatcagacagccacagtccttttgtatattacctgatgaaatgggggagttccctgattcccctcacagaatgtgtgacagggctgtggtttgcctgcttggttggtcatcgctgctgctcaaaccctgtggggagggggagcacacagacggacaggtgcaggagcccaagtgggcattgtgttgcagtgtgcccttgtagccctaccctccatggatggcttgatgttaacaagctcaatggaccctctgccttttcacaagggtagagggccagtgtgatagctttctgtatcctgaattcttgcccagcatcccagaagtactgggtcacacatgggcttgaaggaagaactcagggttttattgagtggtggaggtggctctcagcaggatggatggggagctggaagggggatggagtgggaaaatgatcttcccctggagtttggccgtacagtggctgaactcctctcagtgttcagatgttcctccttttctcactttctctgcctgtcattctgccattcatctatttgtctcatctcttcgtctgcttctggagcctgggattcagggtttatatgggtacaggatagggtgtgttgcaggccaaaaggcaactttttaggtgcaaaaacaggaatgcctgtcccaatctagggccgcaggtctccaggcttgagggtggggcctttactggggaactgccctcttctacccagtgtttccctgtctcctgtccgtatcactctaacagttatgataccaggaccctatttctaaaggccttggaagataatacacagcatcaaaagatacattagttaggattgtaaaccctagccattgtaactatccttaattattgtgaagcagcagaaaataacaaaaaaacatgttccacactctagcagaatatagttaaatgtaagctggggtgggtttattggtgtatgataattagaagggatggtttaccctataaatgtggccatgaagaacagtataaatatgctatctctgttactgctggtacagaaagggcctgtgatacccagtgtaaacatttggtaggcaggaaaagggctctggactatggaagaccaaggaagtgaatactttcatttcacctagactcatgagtgctgttgattctgctgtatcagccttgtgggctacagtttccttcttcattattgctactctctatagctcataaagtcctccttatgatttccactggactaaaatgtagcatagttcttcctggtctagatgacactcttggaaatgcacaaacaatggataagaactatgaacaagaagattccgtaggattcaacctatcagagaggaccttgaagttctgctttatgagcctgcaggcaaagagtgatcatttgcctctcaagcagcctctggtcatctatctgcctttgagccatcaagatgccgatgtcttctcttccagcagctattttgtctcacatgacagctattaacaatgtgcctcctcctccacttcacagtataccaagtgagtgggaaatactttgatgctcttattcacctaccattgttttcagcggttcttaccc

SEQ ID NO: 40748 - DNA, 2300 bp, Homo sapien
gttaatatgggaaaaacatcagacaactctctattgagagacatctataagatatgtgaccaatatgcctcaatgctgtcatgtatataaaaagtaaggaaaatctaagaaaaggtcatggccaagagaagcacaagggaacataattaatattatatcatggatgggatccttgaacaggaacaggccactggataaaaactaaggaaatatgaataaaatatggacttcagttaataaagtatcaatattggtttattagtgcaatgtatttatcattctagcgtaaaatgttaataatatggaaactgggtgcagagtatgtgggaaggctctatactatctttgtaatttccctgtaaatctaagactgttcaagaatttttaaaggggttagttaaaacattaaattgcctagacactcacattcaaaggtaaaaattattatactggataaaaacttaccagcaatgtattgtttatatgaacccatttacataatagaacaaatttaagttgaaagtaaaaggtgagaaaaggtacagcaaacactatcaaccagaaatcttggttgcatatataaatattagacaagaagggtttaaggataaggatactttaatatcagagaacacagatttaaaaaaattaaagttgggccaggcgcggtggctcaagcctgtaatcccagcactttgggaggctgaggcgggtgtatcaccagatcaggagatcgagaccattctggctaagatggtgaaaccccatctctaccaaaaatacaaaaaaattagccgggcatggtggcggagcctgtagtcccagctacttgggaggctgaggcaggagaatggcctgaacccgggaggtggagcttgcagcgagctgagatagagccattgcactccagcctgggtgacgagcgagactccgtctcaaaaaataaaataaagtaaaataaaataaaataaaataaaataaaataaataaaagttggtcgggcgcagtggctcatgcctgtaatcccagcactttgggaggccaaggcaggtggatcacaaggtcaggatatcaagaccatcctggctaacatggtgaaactccatccctactaaaaatacaaaaaattagccaggcatggtggcaggcgcctgtagtctcagctactcaggaggctgaggcaggagaatggcgtgaacccgggaggcggagcttgcagtgaatcgagatcacgccactgcagtccagcctgggcgacagagcgcgactccatctcacaaaaataaaataaagtcaatcaataaataaaagttaaaaaggaatattttataataataatggcaatctttcaacaggaagacaaaaacaattataaattatttatatctaaaatgtaaactgaccaacaagaattggcaaggatatatatacacttttgacaagagtgtaattggtttgtcaatatctacttaagccatattttgacaagagtgtaattggtttgtcaatatctacttaagctatatatgtctacctaataaccctccactttcaaattttttttttttgagacggtgtctccctttgtcgcccaggctgaagtgcagtggggctatctcggctcactgcaaccttcgcctcctgcgttcaagcgattcttctgctttagcctcccgagtagctgggactacaggcgcgcgccaccatgcccggctcatttttgtatttttagtagagacagggtttcaccatattggccaggctggtctcgaactcctgacctcgtaatacgcccacctcggcctcccaaagtgctgggccaatttcacttcttagtaaataagagaaatgtatgcatacagctattatgacgtgtgtaagaggggtcggaaaagaatctctaaacaggaatagaaatgaataaaagcagctgtctgagtaggggaaaactcgagagaagcagcggaactcttgtttcagatcacgcgattctaacgagagttatgtcagggcacctcagagcattcgggatttgggccaaggcgacgaagaatctcgtccgggtcgacctcatacgcacaggcgcaggcgcagcgggaagttcttccgtgccaagtcgtgcttgtaaagaagcggtacttcctcttactcccgggacagaacttcccctcaggagggagaacatccgccgaacgaaatggagagcaaaagaccgcgactgctcgaggaagcagacaagcagaaaaagacagtcagagtgggactcaatgcaccttccatgctacgaaagaaccagctag

SEQ ID NO: 40749 - DNA, 2300 bp, Homo sapien
cttctagctgtttcttttataaaaaatcatctcaacctatggattataaaattgctaagagcaggaatgaatttccatttggaaagtcactggagtatagcaggaaaatcactgaactgggagtcaggaaacaaaagtctgaactctgccacttgtatggtttgctggaacgttatattttattgctatcatttacttcatctgtaaaataaaaacaaaatcctcagagatggtgtgagaattaaatgagatactatgtctggaaacattctgaatattctaatgtactatacaatataagacattgctttttattacatcttcaaaattattttgtgggcagcacatgctgggcacaaggcagactgtcaggaaggtctccctgagaacttcttgggtcttgggtcaagttgggtgggcatttcttacatttttacagcaacagctgcaaagtcccattcctcagcctttttttcttttattggataaaagttattgcagtctaatacaatttttggcaaaccattctcagaattttccatctgcttaccacataggacctcttgtagtcctgcttcttgcctttccaactcacccatgaaatttgccttgtcaattctctcttccacctcaccgaggtagctgtcatacctggaacactctttattcttaacctcgcctgcttttctttcccgtgggctcctcttcccctctgctggctgccaaggagaagcacatttactggcattagcccccaaacagatgcttgcctcgctcccttcccccttcctctttcagccaaaccatcacttgccaagggctggtggttgctgccccccctgtccactgcctcgcactgctacagctccagtcctttctggcagcctcctctgaagttccctgcccgcgttcgcccgtgcttcttgccagccgcctccccctcttgcctgcagctctcctagctcccgccagcctctcccccgctcggtctgcgagcagcctcttcctcccgcccttgccagctgctttactcgcctttcctcaggctgcttcttctccttctttccccaacccttcccctggctcccgcagccggtttctttccagcgcccccatccctctcatcggatgttttgttaacacccaggaccatctctcccgggtcccactgtgcgcgtgtgtccaccgttcacttggaaagtgagcgttttcatcccgcttctgtatttgtctagtccgccaccaaaaccctgtgcctactcctcaagcctggaaggcggaatgtagctatggtagaggggattcaggaagacaccaggccacaggctcgggaccccaacaaagttttggacgttcgggatttgctatctcagtcttcccaaacttggtcagccccggccaccgacccgagccacccaggggcgctcagtgaccaggcgctcctctgattcccagcgcccctattcttccagggccgcttcctcaggaatgccgaccgctctccaggaccagggttgggccgctccccaggccccactagggtccgcagcctgagccccacccagctcatggctggagaggggcgcactcgtttttagatgcgaggcggcagggtgggcgggaagaaagaatggagccgcccaagttcctgggtgcctgcctcggggatgcgggatgggagatactgtcgaagagctgtgctcaaaccagggcccttgtcgcgggctggatacctccggtgcgccctaccgtagtggggaatcctttatgagccgtctcctttaagaagcgcgcgtgcgtgtgtgtcgggctgtgtgtatgcgcgcgtgtgtgtgtgtgtgtcgcggtgtgtctctgtgtgtgtgtgtgtgtgtgtgtgtgtgcgcgcgcgcgcgcgcgccaagggccccgagagccaggcagaccccgggaaggaggagttatgtagattacggatgaacattctggaggggagcgaggagaggagggaaggagaagcagaggcgagagagtgaggagcggcggaggcccttcccgcaggagctgggggcggcggcggcggcggaggaggaggaggagtaggcagtgcaggaggaggacgcacgggctggaggcggcggcggcggcggcggctgctgctgctgcggctgcgactaggctctttgagccggaaccgccggtgaacttaggcgccacgttcccggtgactgaccccggaggatggtgaacaggaactactgctgaccctgtcttcgccgctgcctctcgggggctgccgagcgcggggcccctgtctcctc

SEQ ID NO: 40750 - DNA, 2300 bp, Homo sapien
atatgaagactcctgccctagcaaaaatttttaaattattattttgatcatttcttccctgtttattttttgttctctttttctaggactcaggtttttaattaattgactggataaacatgtcaggcctctgagcccaagctaagccatcatataccctgtgacctgcacgtatacatccagatggcctgaagccactgaagaaccacaaaagtgaaaatagccagttcctaccttaactgatgacattccacgattgcgatttgttcctgcccttccctaactgatcaatggaccttgtgacactccttctcctggacaatgagtctcaggagctccccactgagcaccttgtgacccccacccctgcccgcaagagaaaaaccccctttaactgtaattttccactacctacccaaatcctataaagactgcctcacccctatctccctttgctgactcctttttcgaactaagtcggcctacacccacatgattaaaagctttattgctcacccaaagcctgtttggtggtctcttcacactgacgcgcgttaacagaatgaatggatagaaaagtcttctgagtactttttaagaaaaaagcttattggccgggcgcggtggctcacgcctgtaatcccagcactttgggaggacaaggtgggcggatcacgaggtcaggagttcgagaccagcttggccaacacggtgaaaccccgtctctactaaaaatacaaaaattagctgggtgtggtggcgggcgcctgtaatccaagctacttgggaggctgaggcagaagaattgcttgaaccagggaggcagaggttgcaatgagcagagcagagatcgcgccactacactccagcctgggtgacagagcacgactccctctcgaaaagaaaaaaaaaagcttattaagcaataaagcacagagtatcagaccatatgtttagtgctgaacattttattataaatgatcaaaaatgtttaacatactattgtttacaacctcccactactgtaaaatctaacattgctactttcatttcaggtaatgcaaaaatacaagaagcattagctgtctgtaggcagaaatctgttcgagtcattccttattactgaatccctagaattaattaaacatctagtatggagttggtattgtatataacatttgcactcacgtcttacaaaatagtcatctaagtagaaaggtattcaaggcagaaggatggaaaaacgtttgcagtcttttttggttggcatgaaacactgactgcattcctcccagatttataagaaagaaatatttgcagtcttacctggagttagatggatggactctctcaaggttatttttcaatctctgcacatacatacttatggaagtaagaaagaagagggagaaaaggcagatcccccataacagcggttaaacacctgaacttgctccactatgacagggtttatcatccacctctcagtcctcaagtggctggaaatatggaaattggagtccaggtagacaggtgagtgtacaacctcttaagtgtggagccctcggaattcacaacactccccaaatcgcttcctgcgcaggcgcggagtcggaagggagtcggaaagcagaccccggtgccccctaataaagcccccagccggacgctgccgctaccggggtttggcaacttccggaagacctgtggcccaaaggagaatcctgttgggggaggcgggggccggtggtcgctaaccaatccgacacccgccagcaggctgaagagaggggctttcccaaaaggaaaactttcccaaacctgggggatgggaagagaagacaaaaggagcgcctctggctccctttcccacttcccagccgcccgtcccagccctcggcctccgctgcgcgacccgggcggaggatcccggccgcaggccgaggcgagagccaggcgggagggccgcgagcgggctgcccctctccccgccttgccgtccgccgctgacgtaacctgcgaagtttggggagggaggagctcgggcggccggagctggtcgctgcgcgcgccggggggagggccggggctgcgagagaggaagctctttcgcggcgctaccgcgttggcaccagtctctagaaaagaagtcagctctggttcggagaagcagcggctggcgtgggccatccggggaatgggcgccctcgtgacctagtgttgcggggcaaaaagggtcttgccggcctcgctcgtgcaggggcgtatctgggcgcctgagcgcggcgtgggagccttgg

SEQ ID NO: 40751 - DNA, 2300 bp, Homo sapien
atgggtccatcagtgctacatttccatatagtgtttgcataactggttctaacatatatccaccctctctaaccaaccaccacccttaaaagttgactacagacacatatacacacttgtccagcacttgctccacagaatataaggcctggagtaaacagacaccacaccttgtatatcactgaatctggattatgatagacaagaagtggaaacaagctctagaagtgtcccaaatctcctgtgccatttaggccatcgaagcctgacagtgagagacaatgaagaaaagccacaggcaggtgaaaatccagtaactttggcagggcggaagctgaggaatttatctgatgctggatactcacagcttctggccaatcaggcatcggggatgacgtattttcacattagatataggaggaggagaagagaatgttgtaatcatggatgttaactcactaagaactgaatgctgggcctagttaaatccctgtaggaagtaaaatacacaagactagtgacccattgactaatacacagtcacaggtctatggcacgcggttgtaatgttcttctgaaaacagaaactaatgctaaccttcccttaaaacctgtacaaaccaataagtgaaagccatttacaatttctggccatttaacagtcttttggttcaatttattgtggcaaaaatagcacacatttcctctacttaatcttccctgtgagagaaactgagactgggagaaactgaactgctagtattgagtttgatataaaacgttcctgacaacacataataaaccaaaaccaaaataaaaacaataagaagcaaaacatccttgattctaaagcagtgcggtccaataaacatataatgtgaacaccaccacatacaatttaaaattttctcgtggccacataaagtaaaaagaaacacataaaatgaattttaatcttatatttaacccaagatatcaaaaatgttatttcagcatataatcaataaacaaataataaaatattataagttctttttttaataaatactaagcattcgaactctggtattttacacttaggtcacacttcaattcggacgggcacatttcaagtgctcaatagccacctgtggctaagagctacctactggacagtgcagccctacagcccaatttcaaaaataaggaaaaaacaaagcaaacaaaacccacacccactatatataaacacacatcaatttcagtaaacccagcgtttagagttaggcagtgattgctgatttttggagtacggagccagaacgcctaggagtaagagggaaggagagaaagggtaatggagagatgtgtggaggaatgcaactgctgcatctccagagaagcctgtgctccctacggtgccagagcttgaagggtgggtgctccctatctcccaagcttgaagggctccctagaggtgacgaggtgaggccggccccaagcggtcactgccatttgggctctagagcccgcttgtcagggggcttgaggggatgcaggagttgagggctcttccagggaaccccagtgactgcctacctgtcgagcagcggagtgtggatgtgcaggtgcttcacggccacctggacgcgccagtctgcgtggcgggcggacgacacagtgccagaggcgccgcggctcaggtagcgcaggtcggcgagtttgtggtagggaatggtgggcagggcgctgcagatggcctccccgttcatggtcccgggcgctcaggccggttccgggtgtgccccctgctgcggcggctcccaaggctcccacgccgcgctcaggcgcccagatacgcccctgcacgagcgaggccggcaagaccctttttgccccgcaacactaggtcacgagggcgcccattccccggatggcccacgccagccgctgcttctccgaaccagagctgacttcttttctagagactggtgccaacgcggtagcgccgcgaaagagcttcctctctcgcagccccggccctccccccggcgcgcgcagcgaccagctccggccgcccgagctcctccctccccaaacttcgcaggttacgtcagcggcggacggcaaggcggggagaggggcagcccgctcgcggccctcccgcctggctctcgcctcggcctgcggccgggatcctccgcccgggtcgcgcagcggaggccgagggctgggacgggcggctgggaagtgggaaagggagccagaggcgctccttttgtcttctcttcccatcccccaggtttgggaaagttttcctt

SEQ ID NO: 40752 - DNA, 2300 bp, Homo sapien
agtgttcctattactccacatgctctccagcacctgttgtttcctgacattttaatgatcgccattctaactggtgagagatggtatctcactgtggttttgatttgcatttctctgatggccagtgatgatgagcatcttttcatttgttggctgcataaatgtcttcttttgagaaatgtctgttcatatccttcatacacttgttgatggggttgtttttttcttgtaaattcgtttgagttctttgtagattctggatattagccctttgtcagatgagtagattgcataaatcttctcccattctgtaggttgcctgttcactctgatggtagtttcttttgctgtgcagaagctgtttagtttaattagatcccatttgtctattttggcttttgttgccattgcttttggtgttttagacatgaagtccttgcccatgcctatgtcctgaatggtattgcctaggttgtcttcaagggtttttatggttttaggtctaacatttaagtctttaatccatcttgaattaatttttgtatgaggtgtaaggaagggatccagtttcagctttctacatatggctagccagttttcccagcaccatttattaaatagggaatcctttccccatttcttctctttgtcaggtttgtcaaagataagatggttgtagatgtgtggcattatttctgagggctctgttctgttccattggtctatatctctgttttggtaccagtaccgtgctgttttggttactgtagccttgtagtatagtttgaagtcaggtagcatgatgcctccagctttgttctttcggcttagtattgccttggcaatgtgggctcttttttggttccatatgaactttaaagtagttttttccaattctgtgaagaaagtcattggtagcttgatggtgatggcattgaatctataaattaccttgggcagtatgactattttcatgatattcattcttcctatccatgagcatggaattttcttccatttgtttgtgtcctcttttattttgttgagcagtggtttgtagttctctttgaagaggtccttcacatcccttgtaagttggattcctaggtattttattctctttgaagcaattatgaatgggcgttcactcatgatttggctgtttgtctgttattggtgtacaagaatgcttgtgatttttgcacattgattttgtatcctgagactttgctgaagttgcttatcagcttaaggagattttgggctgagacaatggggttttctaagtatacaatcatgtcatctgcaaacagggacaatttgacttcctcttttcctaattggataccctttatttctttctcctgcctgactgccctagccagagcttccaacattatgttgaataggagtggtgagagagggcatccctgtcttgtgccagttttcaaagggaatgcttccagtttttgcccattcagtatgatattggctgtgggtttgtcataaagatctcttattatttggagatacgtcccatcaatacctaatttattgagagtttttagcatgaagcgttgttgaattttgtcaaaggccttttctgcatctattgagataatcatgtggtttttgtctttggttctgtttatatgctggattacgtttattgattttcatatgtcgaaccagccttgcattccagggttgaagcccacttgaacatggtggataagctttttgatgtgctgctggatttggtttgccagtattttattgaggatttttgcattgatgttcatcagggatattggtctaaaattctctttttttgttgtgtctctgtcaggctttggtatcaggatgatgttggcctcataaaatgagttagggaggattccctctttttctattgattggaatcgtttcagaaggaatggtaccagctcctccttgtacctctggtagaattcgactgtgaatctgtctggtcctggactttttttggttggtagtctattaatgattgcctcaatttcggagcctgttattggtctattcagggattcaacttcttcctggtttagtcttgggaagggggtatgtgtccaggaacttatccatttcttctagattgaaacactattttttcaccaaacgtgtattgaactcttggaggagaaaaaaatagagaagaagtattcttgccctcaaggagatcagattagggataaaagaagaaaacaaaaacaaaaacaaccaaatataatgtacctgtctactaggaacaatcaggcctt

SEQ ID NO: 40753 - DNA, 2300 bp, Homo sapien
aaatcaaaactacaatgagatatcatttcatcataattaaaatggcctatatccaaaagacaggcaataacaaatgctgatgaggatgtggagaaaagagaacccttgtacactgttggtgggaatgtaaattagtacagccactacggagaatagtttggatattcctcaaaaagctaaaaatagagctaccacatgatccagcaatgccactgataggtatataccccaaagaaaggaaatcagtatatcctaagatatacttgcactcccatgtttattgcagcactgttcacaacagccaagatttggaaacaacctaagtgtccatcaatagacaaataaagaaaatgtggtttatgtacacaacgtagtagcattcagccataaaaatgaatgagatcctgttattttcaacaaaatggatgcaactgatgtcactactttaagtgaaataggccaggtacagaatgacaaactctgcatgttctcacttatttgtgggagctaaaaattaaaacaacggaactaacagagaatagaatgatggttacaaggctgggcagggtagtggggaattaaggggcagagtggggatggttaataggtacaaaagtatagacagaattagatctagtatttgacagcacgagagtgactagtcaacgataattcattgaacattttaaaataactaagtataattagattgtttgtagcacaaagaaaggataaatatttgaggtgatggatactccatgtaccctgatgtgattattacttattgtatgcctgtatcaaaatctcatgtaccccataaatatatataccatgtactcacaaaaaataaaaattaaaaattaaaagaattatctggattggactggcatagctttcaggaatttatatgtttatttttaatttttttggttacatagtaagtgtatatatttaaaaatacggaacgcttcacgaatttgcgtgttatccttgggaaggggccatgctaatctttatattattctaattttagtatatgtgctgcagaattaagcactgcttttaggaatgtaggtactttatttatttatttttgagacggagtctcgctctgtcgcccaggctggagtgcagtggcgcgatcttagctcactgcaagctccgcctcccgggttcacgccattcaccatggtctcgatctcctgacctcgtgatctgcccgtctcggcctcccaaagtgctgggataacaagcgtgagccaccgcgcccggccaggtactttattattattttttgatacggagtctcactctttggcccaggctgagtgcagtggcgcgatctcagctcactgcaacctccgcctcccggtttcaagcgattctcctgcatcaggctcttgagtagctgggattacaggcgcgtgccaccacgcccggggctaggttttgtatttttagtagaaacgggtttcaccatgttggtcaggctggtctggaacttctgacctcaggtgatccgtccgcctcggccttccaaaaggaatttaggtactttaaaatgctgttatgtatgttaacggaaaagtaactacatgcttcattttcagaaccaacattcaaatgaaatgaacgtgtcaaatcgacaaaagctcaaaaaagagaaaaacatataatacttaaaagtggttaatatactcttagattgcataactctggggcagtctgagtcctatgattttcttttaagaccccaagactctaaaatacctgctcatcacaagtttgttcagtgacaacattcagtaaaacttaacatttgttttacaaaattatgttgaaagatataaacataaacgtatatttgaagcacaaaaataattacggctttttttggaagcggagttagacatttccgtagaaaagtagatgcaatcaatctctcctgatttttgtcctccccacctttaatttttgacaaaccgaataacgacactcactattgagtacttttctaactccctattgcatcacaaacgcccgcaggggcttaaaaagcagcaggggttcctgcccttccccacactggccggtgtggtctggggcgggcctgatgagcacctggattttcacccggcgtgctggtaattcctacacttgtgggtgtttgagagacatgaagaggggaggatgacctcttcccggaagcgggacttccataaaagaagcgtggtgggcgggtcccgggcacctgtggtttggtgagtcctccaggtaactgtgatgcgggggtcagcggg

SEQ ID NO: 40754 - DNA, 2300 bp, Homo sapien
cgataattcattgaacattttaaaataactaagtataattagattgtttgtagcacaaagaaaggataaatatttgaggtgatggatactccatgtaccctgatgtgattattacttattgtatgcctgtatcaaaatctcatgtaccccataaatatatataccatgtactcacaaaaaataaaaattaaaaattaaaagaattatctggattggactggcatagctttcaggaatttatatgtttatttttaatttttttggttacatagtaagtgtatatatttaaaaatacggaacgcttcacgaatttgcgtgttatccttgggaaggggccatgctaatctttatattattctaattttagtatatgtgctgcagaattaagcactgcttttaggaatgtaggtactttatttatttatttttgagacggagtctcgctctgtcgcccaggctggagtgcagtggcgcgatcttagctcactgcaagctccgcctcccgggttcacgccattcaccatggtctcgatctcctgacctcgtgatctgcccgtctcggcctcccaaagtgctgggataacaagcgtgagccaccgcgcccggccaggtactttattattattttttgatacggagtctcactctttggcccaggctgagtgcagtggcgcgatctcagctcactgcaacctccgcctcccggtttcaagcgattctcctgcatcaggctcttgagtagctgggattacaggcgcgtgccaccacgcccggggctaggttttgtatttttagtagaaacgggtttcaccatgttggtcaggctggtctggaacttctgacctcaggtgatccgtccgcctcggccttccaaaaggaatttaggtactttaaaatgctgttatgtatgttaacggaaaagtaactacatgcttcattttcagaaccaacattcaaatgaaatgaacgtgtcaaatcgacaaaagctcaaaaaagagaaaaacatataatacttaaaagtggttaatatactcttagattgcataactctggggcagtctgagtcctatgattttcttttaagaccccaagactctaaaatacctgctcatcacaagtttgttcagtgacaacattcagtaaaacttaacatttgttttacaaaattatgttgaaagatataaacataaacgtatatttgaagcacaaaaataattacggctttttttggaagcggagttagacatttccgtagaaaagtagatgcaatcaatctctcctgatttttgtcctccccacctttaatttttgacaaaccgaataacgacactcactattgagtacttttctaactccctattgcatcacaaacgcccgcaggggcttaaaaagcagcaggggttcctgcccttccccacactggccggtgtggtctggggcgggcctgatgagcacctggattttcacccggcgtgctggtaattcctacacttgtgggtgtttgagagacatgaagaggggaggatgacctcttcccggaagcgggacttccataaaagaagcgtggtgggcgggtcccgggcacctgtggtttggtgagtcctccaggtaactgtgatgcgggggtcagcgggagaggcacccggaagctcccggcgtctgcaccccggcagcgcgaggaaatgcccaaaggtgggttctcaggcgtgggaagctcgacccttcccggggtcctcggcgaagtggccgaggccgcgccttacgcagggaactccgccgggccatctgggtggcccgagttcgcagcagcttctcttccgctcgtccctcggccctctcgacgcgcacccaccggcctcaccaagtcgcacgcagaggggcggcggggcgctgaccgaggtctaggtctcgattgccgccggtcgagccgcgcagtttgcctgcagacctcggtcccctgcccgcgcagcctcggctccatcaggcccggcccctcgcccgggccgtggctccaccaatcgcagacttcgcccgccgcagccgcacctgcgaggaggggcccgcgcgccgctgcagccgccgtcgcagcgtccccgccccgctccgcccctatcgcggcgccccgagatcacccgcctccggcgcctggctccctgcaggcgaggagcggaagccgctatctggaggcggactccggcgccacagagccggggcagccgcggcaacggcgaggcgcgaggcaggggcgcccggcagaccccgagaccccgagccagcgggcgccccgagcgggcagcctc

SEQ ID NO: 40755 - DNA, 2300 bp, Homo sapien
aaaaatcaaattaccttatgtgtccactttttttaggtccctctattctgactcatttgcctgttttctatccttgtaccaagcaaacactgacttaataactgtaactttataatagatcttagtatttcataatttaaatattccagctttgttcttcaaaattgccttggctattctaggcatttgcatttccatataaatgttagaatctgctcatccatttctactcaaaaaaagcatttgagattgctgaagttacattgaatctatagaacaattttgggggaaatgacatcttaacaatctgtgaacatgatccattatccttgcatttatttaggactttttaaactttctgtcaataatgttatgtagtcaatcatgttttgtattacatagtttgatcgatgtattaccaagcactcgattattttggtgccattataattaaacatgtaattttctatttattttctggaataaaggtatacaattaaattttgtatctagatattgtatctataaccttattaaattcatttattaattaaaatagtttgccaacagtttttttgattttcaatataggcaatcgtgtaatttgtgaataatgactgttatttcttcctttccaatctgaatgtcttttgttactctttctcctttattgcattggctagagcatctaaagccatgctgaaaataagtggtaagagcgtgtacatccttgtttcattactgatgtcatggggaaatgttcaataatttaccttaagtataacgtaaactgtagttttttttgtaaatgtcctttatcagatcatggatgttttctctattcctactttgcagagaggtttttatcctaaatgggtgcttaattttatcaatttctttgctactatcaagataatcatgatttttctcctatttaaaattattatgatgaattacatttattttttcccccaatgttaacccacccttttgtttctggataaatctcacttagttatgattattctttttatactactacttgattcaatttgctaatattgtgcttaggagtttgcatctatgatgataagagattggtaaaccagcctttttttttttttttttttgagacagggtcttgctctatcgcccaggctagagtgcagtggcatgatcatggctcactgcagcatcgaactcctgggctcaagtgatccttctgcctcagcctcctgagtagctgggaatacaggagcatggcaccaagccctgctaactttaaaattttttataaagacagggtcttgccatgttgcccatgctgatcttgaactcctggcctcaagtgatcctcccatcttggcctcccagactgctgggattaaaggagcgagccatggtgctgggcctaaacaagcctttttaaagtgacttttcccccctattacagaatgcttttgaaagccaaaatgtatgtgatcaggagtgtgctctcagatgtttatttagtagtgcgcaggatgtagactacattatgtgggacgtgggtggtgatgggttgggaagctactggaattaggaggagagcttgaaccagcttgagacaggtggaagtggaaaggaagggtattaaatacaggagactgcccagtatttagcatgtgattagctgaaagtgtggcattatgaaataaagacgttaagacaagttgatttgaacttagaaaagagtaaaaataatgagtttacttcgaggtgaaatccttatcttcatcattattatcaccattactagattccaaaggaatacctgcaatttaagaaactgcaaacgcacgaaactacataactggtaagtattttaatgcatttaattaaaaattttccttatgttgctttggagttagtttttaaaattcttttcgttcataatcaggaaaggtagtaaccttacattcagcgacaccttagaaacatacccttttaacgcagcacatttcaatacagattgtgctgttccttttccaaccaccaggtggcgggcaagcgcccaagtcgcactcccgcctcatccaaggcagcctgcgtggctcccgggagcgcgcacgtcccggagcccatgccgaccgcaggcgccgtatccgcgctcgtctagcagccccggttacgcggttgcacgtcggccccagccctgaggagccggaccgatgtggaaactgctgcccgccgcgggcccggcaggaggtaagggcagaagggaagcctcggggcctattttcccggtagcgactgcctcg

SEQ ID NO: 40756 - DNA, 2300 bp, Homo sapien
aactccagccaacatccagcaaaaatgtggggctgtcagttatatggttatgaggaaaataattctgcaaacaatctggatgagcttgggatcagatcttctccagctgagcctccagataaaaacagcctagttgacaccttgattgcagtcttctgagacccagagccaaggatccagctaagctgtgcctagactcctaactcctgggaactgtgagataataaatgattaattgttttaagttacttattgtgttactccattctcacaatgctataaagaaatacctcatactgagtaatttataaagaaacgaagtttaattgactcacagttctgcaggctatataggaagcatgacttgagaggcctcaggaaacttacaatcatggtggaagatgaaggggaagcaggctgtcttacacagctggagcaggaggaagagagagggtgggaggtgccacacacttttaaacaaccagatctcctgagaactctatcaggagaatagcaccaaaggaagaaatctgtccccgtgatccaatcacctcctaccaggccccaattccaacactggagattacaattcaacatgagatttgggtagggacacaaatccaaaccgtatcactaatgttgcaacttctttttagaaacaagatgaatcccacttacaatttggtttggaagtcaagaataacagtgccatacatatatcaagagcttaggaaaagttttattattgatatattctcaaggtttttttgggaggacagaaaatgcctcctaagctggtctaaaagttatttaagagggcaagtgttctgggctgaattgtgtacttccctcttctcccagccaaatatatacattgaactcttaacccccagtatgtcagaatgtggctatatttggagatagagtctttagggaggtaattccagttaaattaggtcattgagggtgggccttaatccaacacgactggtgtcctcataagaagaggcaatttagatatggaaaggtacacaggaggatcatgtaaagacacagggagaagatggtcccacagtggctccacaagaaaccaactctgctgacttgtggcctccagaattgtgagaaaacaaatttccatttaagccacccaatctgtggtagttttgttcctggaccaaactgagggtcaggctgctatttcttgctgccaataatgagatgtcgatgaactggggatgaagaaagtttttatttctgtaaccagttacaggcagaaggcctggaaattatcaccagaccaactcaaaattacaaagtttttcagagtttatataccttataagctatatgtctacatgtaagtgtacattcctctgaagatataaatgtttctttatcagcatttggaacatgccaggcaaatagtaaacactcaatatcatctaccatcagcctcagcctggggcctcacacccatcttcttttatctaaaattctgaattagctatgaatattctcattttacgaatgaggaaagaaatgtgatctgagctaatgccttgtgtcaacaggtatattacactaagatggagaatgatatactgaatctgtgtttgcctttaacgtgtgtttaacttcgagaaaaaagccaaggctgggcggtcgcagtcacgctgcatccggcgacagggggcggtgtgtcctgcgaaaagtcaaaacgccggaagctgcccttagtgtttttcagcctcttggtcttagggaaagtgaggccgtgttttacatccaacatattattattctgataatatgtgacttggcgccacgcgcactctgcacttaaacacgcacttaagggataaacacatacgactgaaaaagagtttcgcccttgataggcagtgtatggggtgcgcagctgcaatctgcaaacccttgcagggcgcggggtttcgtacacccgctcaaggacgcaaagaacctccattctctgccatacaaagcactcctggcccagagagcaggaaagagcatcagctaggcccagctaggcggcgccctcggccggactctgaaggtcagggccgctgggcgtccacgccgcctgggtcccagtccccgtcccatcccccggcggcctaggcagcgtttccagccccgagaactttgttctttttgtcccgccccctgcgcccaaccgcctgcgccgccttccggcccgagttctggagactcaacatgaagctaccggccagggttttctttactctggggtcccggctgccctgtggcctcgc

SEQ ID NO: 40757 - DNA, 2300 bp, Homo sapien
tgtggtctctttttaggaagaaaattaattttaattactttttaaaatagtagaaatgttgctcttttttcatcagtttgttcagtccatattcctacatactttttctagcatttttctttgtctcagaactgtatccaaagtctagacattgttagctctgtcaagactagcaagggtcagagtgattcttcaagtcattccttagtcactgcattctcactctctcttcaaagtttattctctagcgctggtctccaagttcacacactatatttttcacacagcgaccctggccactaacataggaccaataggaccatcagtgagaatcagatgaggtatcataagtaaaaataatgtatgaactggaaagtactatggaagtgaggattccattaagaagattattgaaataggctagcttcaaattgatgggtctctgaaaaggatacttacaaaaaaactccacaaatataataatggatagagccctaatctcaaaaacataaatttgaggggtcccaaactcaattacacaaggttaagaatatagagcttggtaaattctctctctctctttttttttttggagacagagtcttgctctgtcaccaggctggagtgcagtggcgtgatcttggctcactgcaacctccgcctcccaggttcaagccattctcctgcctcagcctcccaagtagttcagattacaggtgcccacccccatgcccagctaatttttgtatttttagtagagacgggatttcaccatgttggccaggatggtctcgatctcgtgaccttgtgatctgcctgcctcggccttccaaagtgctgggattacaggcgtgagccaccgcgcccggccggtaaattcattttaattcactttaagcttatattggctatgtgtagattttctcttgttccttcattttgttttagtacaattgtaattagacttttgggatacatttttagtggacttcaaggtccaaaagactcaaagccaaatactccagaagtacttatgtaaataagaaataatccaagtatataattaattatattaaaatacataacacatatacatatgtatatatagtacagaacatatatacatatgtgtgtatacatacatatatattacatatatatatatatatatatatatatacataacatagcatacatttagttagatagcttttccaactctgatggtgacttccaatttctgaaaaattctccagtaggggttgcttgaaacagaaagaaggagacgtgtgtgttaaggcgactgaatggggctgtggtggtagcactaacgtacctacttatgaacctggtcagatccttcctttctctttgttttagtttactcactccttctaaactgaaaggcagtaaactctagtatctgtaagatgacttccttatctaagattttaaggttttataatttaactgtattactttccaattataattctacttcatgctgaaaagaaatccataatctagcttttttcgtgttggcaaggttagttcatagaaaccatcttaagaaacattgacatgatggcacaaaatagagtgattattgatagcaatcaactcattgtatacattaatcaaattattctaatgcgtgccaaggtttcacatgctttttttttttcaaacaaatactgaaaagtcttggagaaatcacacaagaatataataatcttttatgtgattttacccgtcatcagctttccccttctatctgaacatttaaacctctctagataacaagagttttactataatattcaggaataagattcttcctggactaggaggatgtagggggaaatgagcctctgttttcagcatccaatctctgagcaaaggatctcccaccacctgctgcttccaacaagcccaaactctcgctccagctagctttcctgggaacagagcagaaaactggaagggaggggaagaaggctggtgagagcaagaggcggggagtgaggaatgggaggctggaggaggcgtggcccggcttggggccgtcgggataaatactgagaactgggtgcggggtgtagggagagaactctggaggaacgctgagctgagcagcaccgaggacagcgcccggcagcgcccgcgcccaggtctccctccgcagccctgactcgcgcacacgctgagcttttgctcactccccctcgcgcggacacagacacacgcatattcacacacccagacacacaccccgctgtacaatggcagaatcccacctg

SEQ ID NO: 40758 - DNA, 2300 bp, Homo sapien
gacactaagtaaaactcttcttcttcactcttcacttgtctgcacacctcattcttcctgggtgcaggacaagaacttgggcaaaggcgcagtggccacagaggtttctggccagaaaaatcgacaccccagagatcccggaacattttcttcctaagaacaagaacaaggcagagatgtccccacccacgtcttctattcaaattgttccggaggagtctgaggaaaactaggggcaggaaatggaggataaggaaaagaagaggaaggggaataagaagaaggaggaggaggaggaggcagtaaagggtgggaggaggaagaggaggaaaagaagaaaagaaattctggtttaaaatgaagaagtcaaaatgcctattgcaggtaaaatgatccaatatgtagaaaatcctaaggaagccacacacacacacaaaattactaagaacttgaatgagttttacaatgtcacagaacataagatcaacataaaaaatcagttgtacttctaccatactaccagtgaacaatctgaatatgaaatttaaaaatgattttatttaaaatagtatcaaatgaattcaatattcagaaataaatttaatgaaagaatgcaagatttatagactaaaaactgcaaaatatttctgagagaaattaaagatctaagtaaatgaaaagataattcataatgacatatagattaaatattgttaacatggaaattctctaacaaattgatctacagattcaacacagtccctgtcaaattatagcaggcttttgtgtagaattgccaacgtgacccaaaattttaaggaaatgcaaaggacctaacaatgtcaaagcaatttttgaaaaagaagaaaaataatggaaaatgtacactactcaaggtcaaaacatacaataaagttaatcaggacagtgtagtatcattataaggataggcattaacatcaataggacaggaatgagtgtccagaaataaatccttttatttataatcaattaattttcaacaaatatatcaagatgaataaatataaagagaacaatcttttcaacaaatgatggtaggaaattttgagatccatatgcaaatgagtaatcttagacccttacctcacatcatacacaaaaatgaactccaaattgattgtagacgtaaatgtaagaactagaatgtaaaaactaaatgataatttagaaaaaaaatttgtggcatgggattaaaatctcttagatgctacactaaaacataagccataaaaagaaaaaaaaaagataaattttattaaaacaaaacttttgcactttaaaagacaccactgttaacaaaataaaaagactagtaacagactggggtgaaatatttgcacatcacatatttgatggaatacttatatacattataaataaagagcacttaatagtcacaggaagaaaaacaacccaatttacaaaagaaccaaggcttgaatagacatttcaccaaagtaggcatctgattgactaataagaacatgaaaagtgctcaaaatcattaatcataagagaaatgttcattagagccatgatgagataccactacacatcgactacaatggctatactcaaaaacacagacaataacaaccgctggtgagaatgtggagaaactaaaattttcaagaattgttaatgggatttgtcaggcctctgagcccaagccaagccatcacatcccctgtgacttgcacgtatacacccagatggcctgaagtaactggagaatcacaaaagaagtgaaaaggccctgccccgccttaactgatgacattccaccattgtgatttgttcctgccccaccttaactgagtgattaaccctgtgaatttccttgtcctggctcagaggctcccccactgagcaccttgtgaccactgcccctgcccaccagagaacaaccccctttggctgtaattttccattacctttccaaatcctataaaacggccccacccctatctcccttcgctgactctctttttggactcagcccacctgcacccaggtgaaataaacagccatgttgctcacacaaagcctgtttggtggtctcttcacatggacgcacatgaaatttggtgccgtgactcagatcaggggacctcccttgggagataaatcccctgtcctcctgctctttgctctgtgagaaagatccacctacgacctcaggtcctcagaccgaccagcccaagaaacatctcaccaatttcaaatctggtaagtggcctctttttactctcttctcc

SEQ ID NO: 40759 - DNA, 2300 bp, Homo sapien
ctagcagtgtttctatcctaaatcagttgcatggagatgcacactagctatagaaacctgagtaagcaaaacatatgaatacaaggacagaaaagagtctataatggtgcagatacagaagaaaaatatatgctaactgagcaaaagattatctgttctgttttattcaccaccccgtgatttcgaaatgaagttcctccaaagaaagaaagataaacagtaggattttcttctttacatcacattaaagcacaattacttgaagaagaaaaagcccatttcaaatttagcaaactccaaaatctggagtctgcaactagctcctccactgtttactgaaacacttcctttggtccatgtcgctaaaaacttgaatcaaaaccctggatgtatttatgtaagcaagagagaaagctttcctccctaaatgttgccaaagctgctacaaaagatgacaagtattaaagatgggcatttccattcatgtccctgcatgcctattgttaagagggcttttcatttttaattacattcccatccctaaaagaaacattagttttttatctaacaaactctctttcgaggctccgcgttaggtatgttttatgtgtaggacagacttcccaggctgcgatggaaagtaatcgtaactcctgccgtcaatgtcacttctctgctggtatttatctgatagagcgccctcctagggccgccacaagaccgctcaaaaacagacttggagagggataggccagcgggaccccacttaccgaaaacactgcattctgaagcccaaaaggtatgggtgtcagtctggccagcgccaccactttcaggccgcttcctccctccactacgcgaataaccgcgctcagcttctcgctgctctggatcctggcggccacccaggcggtgaggagccgcttgcagaccacatgggcgatgaaggtgccgatgaggacgcccaccatcatcagacccatgcccagcacgaagccgtacaggtagccagcggccacgttgagcacgatgtagccccagccgcaggggaaagagaccacgatgaagcccacgacgaagagcaggacccccagcagcgagtcaaggctctccacccacagcaggaggtggtgaaggtagcggcggaccagggccagggaagcgaagcacagggcggccaacacgcagaccagcacgaggctccggcaccaacaggtgctgccgaggcagcagcagcgccagtttctcacctcagccacgccgaccaccacgccgccgccgccactcccggggccgcccgccaaggccccgcccggctccggcagctccgaagcctcgggcggaccgtggcgctccagataggcgccgagcagggcgcccgaggccgccgctgctgccgccgccgcgctcgccccgcccccgcggggaaggcggtccgccgggccgtccccgcccgcaccccgcggcagggcccagcgggccggcagctcggcgaggcccgggagggcggcgtgctgcagcagccggggcagcgcctggagcaggatcccgcccgggctccgcatgcctcggcccagcgcgggccctcagccggccagcccctccgccgcggcgcccgttaggcagctgcccttcatggcgcccggttcgcccggcatcgactccctgcgtccgctcagagggtgggagacggcccgtagaagggcgcggagtcagcggaggagcgacggccaggcggggagtgaggaaactcctgccccagcacccacggagcccactccggtggtgcccgccccttgtcggccagagggggcggggccgcgggcgatggggcggagcgggctgtgttctggtccgctcccgtgacgcgctgcccgccaggctgcgggggtcgcggggcgtccgcgtgggccagcggaggcccacagctgcggagggaaaccactgggaggggagaaggagctctagggagagcgaggctgcaacgaggggagagccgggcgacgggcaggggcccaggcgcgctccccgacttcccacaggcgcgcgcatgcctgcgtgtcagggcgcgcgctccccctctcggaccgaggcgaccccagtccgtgagcggcttggatcctcgcccgttccctcctggtcgtttccgcagtaacctcttatcagagcgggcagctgtgagtggcgctcacatccgccgctgccctgtcgaatgggggaaagagttcttgtgttctgaggagggtttggctatggtccttgaccctattcttgtctcagacttgcctcccaggtatcga

SEQ ID NO: 40760 - DNA, 2300 bp, Homo sapien
gaagggaaggtagtgcaggactgatatggtttggatttgtgtccctgcccaaatctcatgtcaaactgtatgtaatccccattgttggaggagaggcctggtgggaggtgattggatcatggaaatggagttctcatgaatggtttagcactatccctccttggtactgttttacggaagtaaaactttaggtaaatgctgtggcagcagtaagagctgctcctccgtgtgagtcacaaggcttggaaaagagagttgaaggatgtagcacttgcctggcacctagtagggactctacctgactcagcccaaccagggtggataggagggaatggcatggaggagcctgatcagccagcaagcaggagcctgatcagcaacgacctaaggtgtcctggtccgttatctggcaggcaactgggtggaaggtcatccactgagatatgaaacccagaaggaagagtcggtctatgggggatcacacttttaatgagggataccatcacatagttaacatttactgacgactgatttcaggcatagtgctaatcaccttactttactattttgtttaatcctcacaacactcttacgaagctaagttgtaccattatctccattttgcaatttaaaaagaaacaatgagattcagggactgattgtttgaccagttactaaacgtgatttgcaccagagcccaagttgatcatctatctaccaagctctgctgagtttgagctgcctgcagaattccacctggatgtgtccacaggccggaccacaagctgggaagtgtgggcagagacattcacttaggggtcacttcttatggggggcacggcaggatcaaagctgttgggcctggatgagatggctcaggaaactctgaaaaggaagacggcaagaggacctggggaacactaaccttaaacaggcggaaagaggaaaagaaaccagcgaatgagtttgagaagctgccctctgagaaagcgaactcttaaaaatgtccttcagtgaatctttttcaaatgcccctagaccaatgcctggcactcgataaaggacctctggagtcagaaggggcgttctgtcaagggggtggggggactttatgcctaatttttccagctcctaaaggaccaagccatatgaaacccacagggagacctcgatacctgggaggcaagtctgagacaagaatagggtcaaggaccatagccaaaccctcctcagaacacaagaactctttcccccattcgacagggcagcggcggatgtgagcgccactcacagctgcccgctctgataagaggttactgcggaaacgaccaggagggaacgggcgaggatccaagccgctcacggactggggtcgcctcggtccgagagggggagcgcgcgccctgacacgcaggcatgcgcgcgcctgtgggaagtcggggagcgcgcctgggcccctgcccgtcgcccggctctcccctcgttgcagcctcgctctccctagagctccttctcccctcccagtggtttccctccgcagctgtgggcctccgctggcccacgcggacgccccgcgacccccgcagcctggcgggcagcgcgtcacgggagcggaccagaacacagcccgctccgccccatcgcccgcggccccgccccctctggccgacaaggggcgggcaccaccggagtgggctccgtgggtgctggggcaggagtttcctcactccccgcctggccgtcgctcctccgctgactccgcgcccttctacgggccgtctcccaccctctgagcggacgcagggagtcgatgccgggcgaaccgggcgccatgaagggcagctgcctaacgggcgccgcggcggaggggctggccggctgagggcccgcgctgggccgaggcatgcggagcccgggcgggatcctgctccaggcgctgccccggctgctgcagcacgccgccctcccgggcctcgccgagctgccggcccgctgggccctgccgcggggtgcgggcggggacggcccggcggaccgccttccccgcgggggcggggcgagcgcggcggcggcagcagcggcggcctcgggcgccctgctcggcgcctatctggagcgccacggtccgcccgaggcttcggagctgccggagccgggcggggccttggcgggcggccccgggagtggcggcggcggcgtggtggtcggcgtggctgaggtgagaaactggcgctgctgctgcctcggcagcacctgttggtgccggagcctcgtgctggtctgcgtgttggccgccctgt

SEQ ID NO: 40761 - DNA, 2300 bp, Homo sapien
ggtaagaatttcttatcagtcagtctctggcctctttctgtgcaaactggttaaatataaagtaaaagtcactgtttattacctctgtaaagttttaaactaattggtttaataataagaaaaacaaaaatcaaatattttgtcagaaaagtgaaaaacataatgacttttatttagttcatgtgacttgagtaatctttgggaaatgaagacagttttaaagattactggtaaaatacaaatgtcttcaaaatgtaaacatgtggtctaaattatgttcaaatattaggtttgctaaatgctttaaggacataagctgcttctttggcttttgaaaattgtttaacttgcctgctttccatctaggtaaggcctggggacacgtggagctggcaacacccccagctatgctggaaatagtcaaacctctcagaacataacttaccaggttttatgttagaatttaccattataacatgcaatttagactactagaaacagttttacatgcaaggtgtgtaagaagagtagaacgtagagtttttttgtaaaacgttataaaaggttttcacttctttaaaatttcttagtcattattttggcaaaataaataatttatggtaatctggaattccaaaatcaaacttcagttttaaaattgtctttcctggccagacatggtggctcacacccgtaatcccagcactttgggaggctgagacaggtgggtcacctgaaaatcacctgaagtcagcagttcacgaccagcctggccaacatggtgaaaccccatctctactaaaaattcaaaaaattagccgggagtagtggcaggcgcctgcaatcccagctacttgggaagctgaggcaggagaattgtttgaacccgggaggtggaggttgcagtaagctgagatcgtgccattgcactccagcctgggcgacaagagcaaaactctgtcttaaaataaaaaaaaattgtctttcctaatgcctggctttgtggatggatcagagggcccctgaaaacatacaaaaaggaagtaaacaaggttatttgacatttttaggtacatgggattgccaaaatgatgttcagtcttctttaggttatgttttttttttgtgaataatactaatatatgttccaaaattacatgggatttctaaaattctaatgtctaagtatatgctatgtattataattatggttattatgttaagttattgtaaaccacagcaataaccaaatttccttgtcagtgctatgcacctaatttggaaaaacaaattaggtgtatccaagaggatataagtctaatgttaattaagcatggactcatggagaaccaggatggcctccttgtccttcctgagtccttagagctttaattcttaaaagttctgcatcccatgactcatcatggaaaagataaaataatccaaattgaatacattggtgtggtgacttacaaattactaacatagtttataaccaatgtttgatcccatattcctggaaaaaaccattaaagcttcaggtacatttggtcacctggttggccaattaaacattttataaagggatttcattcaattgttattttcaatgcatgttttctggttgtatatgtggggaaaagcaagagagatcagattgttactgtgtctgtgtagaaagaagtagacataggagactccattttgttatgtactaagaaaaattcttctgccttgagattctgtgacctgtggggaaaagcaagagagatcagattgttactgtgtctgtgtagaaagaggtagacataggagactccattttgttatgtactaagaaaaattcttctgccttgagattctgttaatctataaccttacccccaaccccgtgctctctgaaacatgtgctgtgtcaactcagagttaaatggattaagggcagtgcaagatgtgctttgttaaacagatgcttgaaggcagcatgctcgttaagagtcatcaccactccctaatctcaagtacccagggacacaaaaactgtggaaggccgcagggacctctgcctaggaaagccaggtattgtccaaggtttctccccatgtgatagtctgaaatatggcctcgtgggaagggaaagacctgaccgtcccccagcccgacacccgtaaagggtctgtgctgaggaggattagtaaaagaggaaggaatgcctcttgcagttgagacaagaggaaggcatctgtctcctgcctgtccctgggcaatggaatgtctcggtataaaacccgattgtatgc

SEQ ID NO: 40762 - DNA, 2300 bp, Homo sapien
cagctacttgggaagctgaggcaggagaattgtttgaacccgggaggtggaggttgcagtaagctgagatcgtgccattgcactccagcctgggcgacaagagcaaaactctgtcttaaaataaaaaaaaattgtctttcctaatgcctggctttgtggatggatcagagggcccctgaaaacatacaaaaaggaagtaaacaaggttatttgacatttttaggtacatgggattgccaaaatgatgttcagtcttctttaggttatgttttttttttgtgaataatactaatatatgttccaaaattacatgggatttctaaaattctaatgtctaagtatatgctatgtattataattatggttattatgttaagttattgtaaaccacagcaataaccaaatttccttgtcagtgctatgcacctaatttggaaaaacaaattaggtgtatccaagaggatataagtctaatgttaattaagcatggactcatggagaaccaggatggcctccttgtccttcctgagtccttagagctttaattcttaaaagttctgcatcccatgactcatcatggaaaagataaaataatccaaattgaatacattggtgtggtgacttacaaattactaacatagtttataaccaatgtttgatcccatattcctggaaaaaaccattaaagcttcaggtacatttggtcacctggttggccaattaaacattttataaagggatttcattcaattgttattttcaatgcatgttttctggttgtatatgtggggaaaagcaagagagatcagattgttactgtgtctgtgtagaaagaagtagacataggagactccattttgttatgtactaagaaaaattcttctgccttgagattctgtgacctgtggggaaaagcaagagagatcagattgttactgtgtctgtgtagaaagaggtagacataggagactccattttgttatgtactaagaaaaattcttctgccttgagattctgttaatctataaccttacccccaaccccgtgctctctgaaacatgtgctgtgtcaactcagagttaaatggattaagggcagtgcaagatgtgctttgttaaacagatgcttgaaggcagcatgctcgttaagagtcatcaccactccctaatctcaagtacccagggacacaaaaactgtggaaggccgcagggacctctgcctaggaaagccaggtattgtccaaggtttctccccatgtgatagtctgaaatatggcctcgtgggaagggaaagacctgaccgtcccccagcccgacacccgtaaagggtctgtgctgaggaggattagtaaaagaggaaggaatgcctcttgcagttgagacaagaggaaggcatctgtctcctgcctgtccctgggcaatggaatgtctcggtataaaacccgattgtatgctccatccactgagatagggaaaaaccgccttagggctggaggtgggacctgcgggcagcaatactgctttgtaaagcattgagatgtttatgtgtatgcatatctaaaagcacagcacttaatcctttacattgtctatgatgcaaagacctttgttcacgtgtttgtctgctgaccctctccccacaattgtcttgtgaccctgacacatccccctcttcgagaaacacccacaaatgatgaataaatactaagggaactcagaggctggcgggatcctccatatgctgaacgctggttccccgggtccccttatttctttctctatactttgtctctgtgtctttttcttctccaaatctctcgtcccaccttacgagaaacacccacaggtgtgtaggggcaacccacccctacagtgaccttacccccaaccccgtgctctctgaaacatgtgctgtgtcaactcagagttgaatggattaagggcggtgcaagatgtgctttgttaaacagatgcttgaaggcagcatgctcgttaagagtcatcaccactccctaatctcaagtacccagggacacaaaaactgcggaaggccgcagggacctctgcctaggaaagccaggtattgtccaaggtttctccccatgtgatagtctgaaatatggcctcgtgggaagggaaagacctgaccgtcccccagcccgacacccgtaaagggtctgtgctgaggaggattagtaaaagaggaaggaatgcctcttgcagttgagacaagaggaaggcatctgtctcctgcctgtccctgggcaatggaatgtctcggtataaaacccgattgtatgc

SEQ ID NO: 40763 - DNA, 2300 bp, Homo sapien
agcacaggcatcagtttggtttgtgtgtgtgtgtgtttgtgcagggagggttagctccttattttggttatctattgttacaaatccaaccacctcaacacttatttgtatgaaacggtatacattttattatgttcccaattctgtggtccaactgttctgacacagcacagcactggtagtgtgcctttactccatgatgcctggggttttggctgggacaactcacatggctagggatgtctgcaagagctgggagctggagtcatttgcaggcttcctcattgacatttctgctgctgaggctgggataatgcaaaggctctgcttagctatacctgtaagccaggtgtctacacttgcctttccatataccttgggcttcctcaaagcatggtggcttaaggtagaaaaacttcctatacggaagttcaagaatccaggagcaaatccactgtaaaaagtggaattgcaaaggcttttatgcccctaccctcggaaagcacatagcaacacttctgttccatttcattcattgtagcagtcacaatctttcagatttaaggggaggggacccacttctctataggaagaatgtcaatgaatttgtgggcacattttaaagttaccacacaccccaggtgattccaatgtacaggcagcgttgagaacaactggattcattttttttttttgtaagcacccatctacaaaggagcagtgggacttgggtgaagtgaacaagacacctagggtgcaaaatttaagaaaatcattctcaggatcatgcaagcacaggatagagattgagagcaagtgcctccttacattctgtgctcaagtggccccacttgccacaccctagtcctgagcctactacatagcaactgtgtatgaatcattagggtgagggggacttggatttctggactagacagtactttagtattgggatttggaaagcccaggtaggatctgggattctgtatgtttataggaatccccagtggactacttccagcttccacgtgctttcctggtgccatgctttgcttacgctgttccttctgcctggaagtgttttccttctatttctatcaagcatggagtatccactgatttttaaggtccatttcatataccgcttctttcatcaagcttttattggtccccccagccagagtgtaacctgtctctcctgagaaacccctagcatgttttacatgcctttaagacactcacatgttgatcagcattttggttgtgtgtgggcctgtcttataggaagaatatgtttacttttctccaaaggccacaaaatggagatctggatcctcctcacccgttctcactggtagaggcagagtcttgtttagacaaggttccctcttttttgccttatctcgctcccagatagctcaagtttgtaaccaacacatacacattttagatgcccaataaactggatctctctcctgatgaaaggtgtggtcagtttcctatttttacagccttcgcagaagccgtcaaatattgaataattaccctggtttaaatgcttaaacacagataaggacttcgtcttgtgactttgggaaacttcatatttgaacattacctaacaatccttgccccatagcaaacgtttcgaagcctactctaggcagagttcatagcaccgcctttgtcagcagcactgccataggtaagcctcagaaccctctggggtgagaccggtgtaaccattttactgatgaggaaaagtgaggcttacaggttaagtccttcgagcgcaagataacaccgaatggcttaatccctacaccaaaccagctgctcctcgattgctggtattcgtgaaccctgcccccgcctttggggaaggtcgggcagacaggccactgggaccaaaagcagagtaggtagaacctctctgagttcctccctatttatggcatccactcaggtgaggctgggggcgtccttaccttgcgctttggctgctcaggacaaacgccctgccattcgtcccttctctctgtccggacgccctcctccatccctgcacttggggccgtcgtggggctggtaggggtccccaggctatctccagccgtggccgatggccgtgccgggggcagagcccgctcccctccgcgcgttgctacgtgcggggatgacatggatccagacgccgtcaactacgggaaggaggaggcgagagttggagcgcgtgggagcgcagaggccggaggagggagggggggacaccgagcgcggagagcgcggagagcgcggag

SEQ ID NO: 40764 - DNA, 2300 bp, Homo sapien
tttaaatggatttctttgtgtaactatcttaggaaaggagggggaaaagatacatctggtttgggttgcaaagttggaaattgcaacccaatctaggaagccgagagctcaatttttccaactcatacatcaatgtacataagtgaatgatcagttaggtattggtaacataataatgcatccccaaattcagtggcttaacacaataaccacaattttgcaggtaggcaatttaggctgggatcaactggctggttcttatggtctcacatgggctccttgtatctctagtaagctgtatgttagctttgctgatcttggctgagctttctcgtatgtctaggagctcaagtgtgctctatgtggtttttaatcctctaatataggggttggcaaactacagcatacctcttgtttttgttcataaagttttattgtaacacagccacactcatttgtttatgtgtgggctgtggctgcttttacacaatagcagagttgactagctgcaaaaggagccatgtggcacagaaagcctaaataaaatacttactacccatccatttacagaaaatgtttgctggcccctgctgtagcaggtcttgttcatatggtaatctcagagatccaagagaaagagtggaaatccaccggcctcttagggcctgaatttgaaactggtgcactgtcagttctgctacgttgattggccagagcaggttagaaagccaaaccagatccaaggggagggaaaatagaatccatgtcttgaggagaggagctaaaaagtcaaattagtcaaagggcatgagttcaggagggtagtgaagagttctggttatttttacaatccatcccacttgatcacgtaagaattgcctttagacgaaaagaattatgatggaataggtggatgtatttatatatctcattaggaaagcccatgagctttcctaattatctgagttagtaatcacaaatgtccaaccaagaggtccctgcagatttttgtgaaaaggatatatccatcattattttggtagaaattaaccctacttagttattaatactaaacccatgtgctttggttagtccaacaaaagtaggaatatttgttgaatatactgaatacctaacctctaaaatatcattggtattcaacaaatagtagctattgacatgaaatgagaaacccattggaatagaaaacagtagaccaggggtttaattctctcatgctacatagctggtattactgtggaagttatttttctcatattctagatcatccttaccttgtgttttgtttttgtttatgcacttttatgattcatgccaatccttactttgatttgcacttttatactttcactaccaattcttgaaaagaactaatgttgatatctaaaattccatgagaagcccacaggcggatcttgagggaagccttgaaactacaattgctataatgctaataggatttgttacaggaaacagttggcatccaatccagtgtgatccattaaaaacaagcaccatctgatgccattaccatttgaacagggcctgttgtaagtagttaatgtgtttgacaaccctgtaatatttgatatacctttggaaatgcatgagttactaatttttttgaaatctagttgtttgtaatgattgtcacttatgtctaatatcacaaaatattcaagaaattggagctgtgcaatgaacaataggacttctctttaaaaattggtaagttgttatagggaagtgatcccagctctgcctgcacaatacagacacttagggaggttttaaaaatagcagtgcctgggccccactcccagagattttgatataaagataattttaaaacttctcgagtcattgagaatcactgcttttaaagggaaacacgtcattgtaaagaacacgttgtttagcttctgggactagaggcaaggaaaatatcttgcctagattacagcctttatacagttttatacttggaatagtcatggccttccttggtcatatttttggatgacaatcatctgtttttgtgaggaggaatgggatgggcagtaggagtcagcttaaatcgggctccgtgacagccaacgcagtgaccctcgccccttccttggcagcacatcatgcttgtgcagcggcagatgtctgtgatagaagaggacctggaagaattccagctcgctctgaaacactacgtggagagtgcttcctcccaaagtggatgcttgcggtaagtgctccgactcctgcaccttaggcctttggcagcc

SEQ ID NO: 40765 - DNA, 2300 bp, Homo sapien
tggaagaaagaatgtatctttagaaagcagagtgaggatccttcctaatgtaatttgaaacatagtttcgtatgtctaacttctgctttgcctcatgctcactgaaatctacagctagcctcattttccacttgtttttgactctctcaggcatcttgaggattgagatcatgtcgtagttatcttttagacttagtaaatgagtaataaatgtttcttttgagtgactcaaaaattattgcagaaaaattatcatcctagatcattactatttttctattgcatttttatttagacatgttcaaaactttatttatttttttttttttgagacggagtttcactcttgttgcccaggctggagtgcaacggcacgatctcagctcacctctacctctgcctcccggattcaagtgattctcctgcctcggcctcccgagtagctgggattacaggcatgcgccagcacgcctcgctaattttgtatttttagtagagatggggtttctccatgttggttaggctgatctcgaactcctgacctcaggtgatctgcctgccttggactcccaaagtgctgggattacaggcgtgagccaccacgcctggcctcaaaactttaatttgttttcatattcatgtaaactacttttggataatatgacaaaccaccaaataaaaaagaaaagaaaaacatataaaacatggcaagaactgtgtttttaaagaaaaaagttattcagtgattcttgtcaaagcatggtaaggaagactgtatttagggctatagtgataggtatagggaccatggcagcagggtcttgccatgttgaagaagagattaggctcaattctgaatgcagcatggacaagtgggaatttatagcctaggagcatgcaggacaggggcagtagatggaaaattaccaaggaaatatcagggataagggggattctgactaaaccaagcaaacgggattcttgctgaagacagaacaggagttcaggcctcacatgggggatgctggaggatgaggaacctgatcaaatatcaatattgagaatggggcttcttgctaaattaagttagtagggttctttgctaaaactggattttataaggaagtgcagatgggcccagcataagattcagaaaccttacttgtttgaccaagcaaagaatctttgtcagtgcttagggttttttgtgttttaactctgttttacaagtaaacgattattttaaaacttttgtctcaagaaacttgtttttcgttgtttgacgttattcataaacctacttactgtatatgtgtcagggacaataggctacaaaaccaaaactaagatgacaacctattttgtaaaatgaaacttgtaaaaggcaacacactgcatagttccaaaaaggtactgttaccagagttccaaaccggtcaggccaacattcctgttgttaaaaaaaatcaatcaggaaaagtagggaatgctgacacttccgcaaagatctactttctcttagataacagatgttgaaaactgatttcccacaaaaaaaccctagaggaattgataaccccaggaagatgttttctttatataactgctgcaaagtttgacagcaaagagtcagtccctcctcctccttaggggagataaacttgataatctgcttttgctccagttttcttgtaatcaagtcacaggcctttcctcttcgctagcccctttcaggctgctttttatccgtctttcctagagcaaaggacttgtccccctccatcccatttactctcgaccccctttcagttacttggcatcttcttttcctcgcgtttcccagttggtcctaatttgttccccttttctctggctggctgggctcccgctcctccactgctgctcctcccactctgcgggttctttctttctccctcccctcccctcccccagccatgcctcccagcgcgcttcccttcccccgcctcctggtcctgcaccctcccctcccctccccccgcttcctgccttgtgacacatcccgggccctcccggaggcggcagcagcagcagctgcagcggcagcagcggcagcagaggcagcagcagtagccaccactccgccgaggccgcaaccccggctcggcctccccaggccccgccgctgccgcagtcatggctgctgatggggtggacgaacgctcgcctctgctgtcagcatcccactccggaaatgtcactcccaccgccccaccgtacttgcaagaaagcagccccagaggtaaggccagcgtagatcc

SEQ ID NO: 40766 - DNA, 2300 bp, Homo sapien
ctttgatcatttgttttatacaaatgtatctcaggttagagattgatttttgacccaatttcaattgtaatagggctatttaaccagtttataggtcatctgtactgtcaatctactttttgctaattttagtgtctttttgctatttttctttttaccacttcttttccaaacattggaatgtatatattctatttttgtagttaacacttatttccatgtcaaatttacttggaactatatgatttacttggaactatatgatgcagtaactactgtttttccccatgcatcatgtacagaaaatgaggatgtatccaccccctcccaaaccagtgatttggaagtttctttacagtatcagtagtaacatggacaaacttgttatttttttcctgctatacttaaaaataagggaaataaaactgtactgttttccaattgtcagatttgacatttagaatgttatttgtcaaatctacagtgacaaagcccttttacttaggtttagcttaagaacatgcgtatttgtatctacaatactacatgctaaaaataaaacagtatttgtccaatatattgaacatgtggtatgcccttccagtttaaacgtaaactgaaattttacacccagcttatgtttctatttttgtatttagttttaatgccctatacataacaatttaaacttaatgctccttaactagttttaatgcataccatcagttctttcatacaattgcctccctattcttattttaattcaggttctctgttagctgcagtaaatccttcagcaaaattttcagggaaagttcttggttgatatactttcctaacccctgtatatctaagaatgtcttccagtttcctttgtaaagaaatgataacttggcagagtatataattcttggctcaaaattattttcccttaacactctagatattgttccactgtcttctggcatttagaattgcaggagaaaaatctgaggtcagcctgacttttgcccctttgtaagtaacctgctttctctgactggatgcttgtaaaatgtttcgtctttgaaattcaaaaacgtcacccggatatgtctagatgctgctttcttttcattaaactttaaaggtatcctatgagccttttccatttgtagatctagttcgttcttcaattctggaaaattttttcaagtagatcctttattgtttcagctccacttgctctgtcctcagtttcaggtattcctattatgcatagattgtatctcctggaccggccctctagatctctctttttctcctcttaatttcttttccccttttctctgtattctgtgacaatttgtcgttttgcacttacttcagtaattcgattttgtggccaatccagcgtgcgcccttctgttaactctctcaacttcctggtattttccaagcgctctaatagtaccctctttatcatcgcgcataggtgtttaagctcctgtattatatgattctcaatccttcttatatcttgtttccatctctatatccgtttcaagaggaggcattttctcgattatttagcgctgctccttttttctcaggggcggtattacgaccttggagacaataaacataatttaattccacacagccccaaacagcccaaagattcccattgataattatcgacggctttattaaaatgcgttatttttctttcttaccttttcagttgcttttcttagaaacagggaccaaaatcaaagattaaagaggtcctctgaagcagggaatgaaatagacgttgaaaactattcccgttacgccatctctgcgcgcctcacgtcagggccaagagcctagcgcgtagctttatggctgactcggctctggcgctctagccaattccgaggctgcaaactccgcttctccgctcgcagtctggttcctcccctgccgccccgcccatcacggcagggtcacggtagcgcgcacgcgcagcaccccatttaagtttctcgtctttgcagtggctttgcttagatccggtgccgccttgaaggcggggctgggtcccagccgtagccaatggagccccgggtgagggttgaggggtggaaggtgcctactagccggtgcaggtttcttctagcgcgtgtgctggggtacctggtcgtcatggaggcggtattgaccgaagagcttgatgaggaagagcagctgctgagaaggcatcgcaaagagaagaaggagttgcaaggtgaggcggaaggaagtgggaatctggaagccgccgcgactgggggaag

SEQ ID NO: 40767 - DNA, 2300 bp, Homo sapien
gacaaagttcttaatctctctaaccctgtttcccacttgaaaaatgggattatgtatacttacttcataggtaatacctcacagtgtgttactgaggttaaatgagataatacatataaaccaaagtatttgacacatatatattagatccaacgataaaataaatattagttaaaattatgaaagttaggatgctccaacttacccaagaaacatcagtaaaatttcattcattacaacttgttaataaagcacttttataacaaaaatgacttcacgttcactttcttgattcttacaaaaacctgtgcttagagtgtagaaatatttgtatcgtattatatatgtgggaaaatttgagctcagaaagattaagtaaccttgctcaggttacaatcccattcagtcgcaattctgggatcagatgcctggtcttccaactttgatttggtgaagcttcatcttttgggcaagtaaataggtaaagaagtatagcactttctttgccgatctcccttatagaaacacactgccctgtaaacttggtcacaaaaacattaatgagaagtgatgcatgagcataactaagtgatttcatttccctaccaattttatgattttagataataaacagtttaacagggccgggcacggtggctcacgcctgtaatcccagcactttgggaggccgaggcgggtggatcacaaggtcaggagatcgacaccgtcttggctaacatggtgaaaccctgtctctactaaaaatacaaaaaattagccgggcgtagtggcgggcgcccgtagtaccagctactcgggaggctgaggcaggagaatggcctgaacccgggaggcggagcttgcagtgagccaagattgagcgtgttttgcaaagcgagacaccgtctcaaaaaaaaaaaaaaaagcagtttaacatttaacagaagtggacagctgttttcaaatggtgtaggcaacgacaaacatttatttcacataccttattctccttagtagtcagcttcaattgctccagttcctctctatgtttctgttccatttctttttccaacttggccacatcttcggtgagttgcttcctcctcttcttgtcattcttgggaacagcattcttcatgccctgaattttggctgaaaagccattaaaatcattaagtcagacacgcaggagtaaaaggagatgagaaacaggaaccaataaggggatggtaacgggcgaagggtacagaaaaagtaattatggaagaaagagtcatcacgtaacaggcagctacagagagagaagatcccagataaagctgagaccaaaaaaaaaaaaaacttcattaacaaaatcttgaatatgtttcggttgtttggcgagataagagaaggaaaaaaacctgactgtagccagttttaaatctttccggtatcctttctgaacctcctaaactgaggcgggtccattcaaaatacacccattagggacaagtatcggtaactggggcaggtatagaaaagggaggcatcgtgggtttgggagcggaccaagacggcggcttctaggtattttcagacacctgcaccccggcggcggcgcggggtagggggcacgccgcaggcctcagaaggggaagcctctgaaggttggggaattaaagggccgccggggtaggtgaagagagaagaggccacttgctactaggggaagtctagggtgatccagataagtcacgccttgagattccccagaatcgacccgccacgcgcccttcccccagtcgcggcggcttccagattcccacttccttccgcctcaccttgcaactccttcttctctttgcgatgccttctcagcagctgctcttcctcatcaagctcttcggtcaataccgcctccatgacgaccaggtaccccagcacacgcgctagaagaaacctgcaccggctagtaggcaccttccacccctcaaccctcacccggggctccattggctacggctgggacccagccccgccttcaaggcggcaccggatctaagcaaagccactgcaaagacgagaaacttaaatggggtgctgcgcgtgcgcgctaccgtgaccctgccgtgatgggcggggcggcaggggaggaaccagactgcgagcggagaagcggagtttgcagcctcggaattggctagagcgccagagccgagtcagccataaagctacgcgctaggctcttggccctgacgtgaggcgcgcagagatggcgtaacgggaatagttttcaacgtctatttcattccctgctt

SEQ ID NO: 40768 - DNA, 2300 bp, Homo sapien
tttttatctttttcattcactcctgcaacagtgttgactatgtagtaggtggtcagtaaatatttgttgaataaataaataaagtgatttctgaatgccaaaggaaggattgatttctgttcagatcactttcagtgcagaatgtattttataatgttcaagtttttggaaacccacatctaagtgtgtcacatacatgtgtaatcctaatgcctctaagactcatcctatctgggtgctagtgggcttgtgataataatcaaatgttactggccacaactcccctccctctcctttttgtcaccgtttaaatcttttatttggaaatttttaaacatatgcaaaaataacaagactaatataatgaatgctgatatggtttggatttgtgttccctccaaaatctcatgttcaattataatccccagtgttggagactgggcctggtgggaggtgattagatcctgggggtggagttctcatgaatgcattagcatcctctcagtgctgttttcctgctagtgagtgagtgagttatcctgagatctagttgtttatgtgtgtagcacctccttcctatcttcctccagctctggccatgtgaagtgctggctctccctttgccttccaccattattgtaggcttccttagggctccccagaagctgagcagatgccagcaccatgcttcctgtatagcctgcagaactgtgagccaattaaccctcttttctttataaattacctagtctcaggtatttatagcagtgcgagaatggacaaatacaaacccctatgtgtctattactcagcattaataattatcaacattttgtcaatcttgtttgatcagtttcttccacccactttcccccctagattatttttaaaaaaactcaagatatcattttatttcacttgaaaatttcagtatgcatttctgaatgttaagcacatttaaaataaatactaccaccataccattttcacatgtaacagaattaatttctctcatctaatagccgatgaacaaatttccctgagatgtttgtattcaactgaggattcaaatacagtccagacattgcatttagctgttatttgccctaagtttcacttacatcgtaacagttttccctcctttttattaatgtctttcatttgttggtgaaaccttgtgacattggaccagggaccagtcctgtagaatcttccatgttatagatttgactgtttccctataatgaacttaacttattctctagttctgtttttttgtaaatggtagttagatcttgaagccatgattagattcagatttaatttttggacaggaacatttcataggtggtgctgctgtgtactttttaattcattacttcataaggcttataatgtgattgtctcaattttattgatgctaaaatgattagtgggttattaacctgatcacttgattataaagttcctcatcaacctttcatctaatactttcagtctccaattatgatttttgcatagctccattattttattagaatttgcaaaaattgtgattattctagttattttgtctttctcatttattagtttcaattcttgtgaataagaactttattaactattaagttatatttaagtgcagtttgtactggaaaagcagaataaatgcttatattttttcctttatcaattttcagactgagttggtgcgctagtaattcccagggtgagtaatgtttctttttaaaaaatgccattatgaactcagattttaatgtgttttgatatgtttcagtctattctagattatttctttctgatccttaatattttccatcttagactagtgggagctcctagaagttcacttctgtgtcctcattaatctctgatagctttaatatcgcaggcataagctattttaggcttacattatacatttcctgccccaaacctggaccatctactttcctttcgtatctttcacataggaaaataatctaatgcttccccccttcaacatggtggatctcagaatgttcttgtttctatgacacaccaattctgtaattagaggttctaaagctgtataataaagaactctaatggttaccttgttttctacttcttttccaagatcatgactgagagattgttaataaaagcattgagtggtggtaaaaatacgaagatcattactttgaatgggaagaagatgacaaagatgccctcagcattaggaaaactgcctggcctgaagactctagtccttcagaataacctaatccccaaagtgt

SEQ ID NO: 40769 - DNA, 2300 bp, Homo sapien
tgtgttttgtaaaccaaggctttcagacaagaaagagagaatgattgcattcttgtgataagcagatgtgaagctgcacaggatgctgtgagaagaaggcatctccagtaaatgggatagtccctggtttaaccctggtgcctaccacagtgattgtgtttggcgaatccataataaatgttaagttactttaagaggcatttcttagaaatgtgctttgaaggctagggaggcatttagaatagataaagaactagtggataagcatttcaggctaggcagttgcctgtgcagagttaatattgtgcaaatataaattgcacaatgtgtacagtgaagtcacggaaggtgaggtatgagagatgaagttggagaaaacagcagtgtgggttacagtgactcttttatgtgaagtttgagcttaatttcaaaagctagtgtataagttgctagggctgtataacaaagtatcacagactgggtggcttacacaacaggaattgatttattaacaattctggaggctagaagtctgagagcaaggtgccaggaggggttggcttctcctgcagcctctcttttcggcctctacatggctggctctttcctgtgtcttcacatggtcttcctttggtacatgtctgtgtccaaatttcctcttctcataaggatgtcagtcatattggattagagctcactttatttgacttcattttaacctaagtaacactttaaagaccctatctccaaatacagtgacattcggagatactggggtttaagacatatggatttttgggtgacacagtttagcccgtaacagctacttagagttgttgaagtagtggggtatgatgacatttttgcttgacaaagagaggctagacctggtgatgtggatttaaaaattgtttatataagtgagacactcgaagccctgggaatgaagattacctaaggagatctactcagtagggtgagaagaccagaaggacagaaccttggagggcaatattattaaaaggtggcaaaagcaggagtcagcaaatgagaatgaaaagaaacattcagggacagaagggcaaaacagggagagtggcacaaattcttcagctataaaacacagatgcacaataaacagggctttcttgctttttcttccactgaacttagcttttatttgggccccattctactggaaagtttacctagttaattcaaggcttatgtggtaattttaggatttcctaagtcatttcagattttatcttgatcacttagaatttccttcccttcctttctgcctatattatctaattcttggagtttttaagtagtgtcatggtattaggaggtaggagccatatgttctgccaatgtcctgtttcatgtgggcatcctctggtgtgtgatcttcctatctagatcgaagctccgtggtagtgtctacttcccattggtcatgcttcttcttccatgtaccctgtgtcttcttgttctgatgttgaagtcccttttgtttgctggttctctttcaaccacttctacactattctctgggcataagaaaattttggctgctctcttactctaatatgggctcaagaatgagctgactaaagacaccaagttgacagatccagggctgaggagaagaaacagcactgaaaaatcaaaagaggaaggtggtgtcctttgtgtcattaagtggcagggctggaagcaggttgcatcgataagaagcctgatggggccaggcgtggtggctcatgcctgtaatcccagcattctgcgaggccgaggcgggcggatcacctgaggtcaggaatttgagaccagcctgaccaacatggtgaaacctcgtctctactaaaaacacaaaaaaattagccagacatggtggtgggcacctgtaatcccagctactcgggagactgaggaggcaggagaagcacttgaagccagcaggcagaggttgtagtgagccgagatcacgccattgcacttgcactgcagcctggcaacaagagtgaaactatgtctcaataaataaataaataaataaataaataaataaaaaagcctggtaagaatacggaagtgaagccagcaagtcttgactaatctccaagcaatgtagctgtaaaaggtaggagtgctatagaatattctttggacgtgaggaaggcttgaagaaaaattttgaaaatgggaagatatgtgcatggttgtaggctgtggaaagagctagtaaggaggatgtaaaattagtctgtcttgtacaccaattcaggaagagt

SEQ ID NO: 40770 - DNA, 2300 bp, Homo sapien
tttctgttaatccatgtatgaagtagaagataacaatttcatctttttatttgtataggtattatcccagatgtttaggaagagatattccatatagatggtacatactgttgaactgtaagctacttttagtcattgaaacttttgaatgaatacacttagcattcttgaattttgcaggctgttcaagttactctgagaatcttatgtgtgtgaataaatttcctcataatgtttttctttctttctggcattgctgattataaataggcatgatccatgctctggtttgacatgttttaaataatatgtatgcacatggaaattgaaaaaaaacatctggaattggaattccagatttaagcttcaaaaaagatttttaggaaagattcattctaattttaagaaatttttaaattgagagatttcagaactattttgttaatttctaccctctcttggtcttgaaatgttttagaacaattgctggtgctatatgatttaggtacttctatttaccttcaattcataaaatcctgttcatgtgaattttttgttatggaatttaacacaaatttaaaaatgattgaaattacacaaatgatagatgttgattggtgatttcagttaagctttcaattatttttctcatattgttaacatacgttagaatttatgacctagataggatttgaaaaaaaatcttgtgtttatttttattataaaggtaatacataatcagtgtatgtatagcttctgaatttctttgcgtatataataaatggagtatataaaacaaaagtaaagattgctttttgtgaaggaaaaccaatgtaatgtttcaagcatgaatttacaattatttggtgagttcatctctcataccaagaggataggattaaaatgctacaacttggtctctaaatggggctctctctacaggccccaaacctgaactattgaatggtttagaaatttaatataatgtaaaaacagttggacaaacaaagcagtttctattttgtaagtataaataaattcccccccaccccgctgcgtctcttcgttggatttaaaaagaaaggtatttttgcacagacacaaagctagagatgtcatctttagaagatggagagcaactcttcactttaatttaaaaacaaagggaaaaagtgcagcaggagggatccaagtactttgttattataaaggcttccagaaatcagatttctattctccaaacaaatgggcattaaaaaggactcagcaaactatatacatggtattcttttccttggctacacaattttagttagtatgttgcctttttggtttaattccaatggcacagttcatagatttaagtttttctttttcttttggaggctaagcaaaatgatcataaaataaaaatctttgacagtctgttctattataaaatgtaacaccccttattaaaaagagaacacctacccccaaaagttatacaaaaagaaggcagcaccataaaaaaagctaaggatacttcaaacaatagtttgaaccatataacattcctcagtaaatttcagttacagtagaatgaattataggacttagagaaaccatcagagaaaactgaatgaacagtttcagagacagggaagatctcctgtcacaaatatgtgctcattgtgatacttattctcttagcccatgagatgaaatttcagtttgtttatgagaactagttactcctttcccagactgggcagtagctatctgaatgtttctgtatgaatgaaaacctcatctgccagggaataaaaatggtaaggacctttagcaatgccctgttatgtttctgaattttgtagaactggcagtcatctgataatgttgaaaatatatagctctcaaagaaatagggctggattctctgaatatattttgcacaatagatccctctggcagttttatgattttgcacagcttgtagagagagactggactagctggatatttcctggtttcattagcatagcccagcccacttccaacacacgcccagaactacctcattaaccattgggattgcagccaaaaacataagactacagtgaatataaggggaattactggcgagagagctgtagaccaacttaacactgaacccattacttttccaagaccagaaaaaaatattacatgaacaggaactacttctccttcagataagaattcaaggttttaatctatagtttttaaatctagaataattagctgtatcataaaaagacagctgcatatattgaagtgct

SEQ ID NO: 40771 - DNA, 2300 bp, Homo sapien
aagggatgtagattatactgatcatatttctgaaaatacttttgcatatgtcctgtttctttttttttttttatacttttaagttttagggtacatgtgcacattgtgcaggttagttacatatgtatacatgtgccatgctggtgcgctacacccactaactcgtcatctagcgttaggtatatctcccaatgctatccctccctcctccccccaccccacaacagtccccagagtgtgatattccgcttcctgtgtccatgtgatctcattgttcaattcccacctatgagtgagaatatgcggtgtttggttttttgttcttgcgatagtttactgagaatgatgatttccaatttcatccatgtccctacaaaggacatgaactcatcattttttatggctgcatagtattccatggtgtatatgtgccacattttcttgatccagtctatcacgattgcatatgtcctgtttcaagtcctgtcatggtcctacagagctgtgctggtctgcagagaagttgcagtgccgtggtttacgaatatcgaactacctgtgtgtaaatctcattctcacactatgtgaccttaatcttctctgtgcaccaattttctcatcttcacaaaagtagatttattcattccacagatatatgttgaaccctaatacatagcaggcactggtctaggtacaagtgataaaatggtgagcaatgcagaccatgtctttcttttactcgaaacttcccagttgcttctggtcacactcagagtaagagcctctctcatggcttataaggctctacataacctgctaatacccttttcctctttggtctcatacccttttatactctgtgctaacaccaccaccttgcttcttcttgaacccattagtcatgcttctggctatggatatttgcacttgctgttcccctttctgggaattctgttctctccaatacctgcttagctcctccatttatttgtttatttattttaatttttgttttctagagacaaacctcactctgttggccaggctggagtgagtggcatgatcatggctcactgcggcctcaacctcctgggctcaaatcatcctcccgccttagcctccccagtagctgagacttcaggcatgcaccaccatgcctggctacttttttttttcattttttaaacatgggggtcttgctgtgttgctcaggctggtctcaaactcccggcttcaagagatcccccgcctctgcctcccaaagtgctgggattgcaggcatgagccaccgtgctcagccagcttctttatcaaatgctcctttctcagggaggccttctttggtaatctaaaatcttaaactcaagatttgcccatgctttcctctgttttgctttctgtatttatcttgtttattgccagcatttgctttccaccaccacagctctatggggcagggatatttgttgtgcttactagaaacagcagatgcaaaaatactgttaaggggaatttgcaataatccaagtgatatttgatgacttggaccatgatgtagtgatggatgagatggaagtatatggattctggattggatatgggtgccattcgggaaaagaaggagcagaaaaatcaagaataaccctaaagctttcaatctaagcaattggaacttcaaatagggaagaacatgggagaaccaggttgggtggtagaaagctgtagcccaatttaggaagttggagatatctgttagccatccagagggagatactgagtagcagattgggtatacagtctgacattcagaagaatggtccaagttgtagataaaaattttagagttgtcaatgtgtatttgagtagcttatatgtagatagagaagagaagcagtcctccaatatttgcaattggttagatgggaaagaaccacaaaaggcattaaaatgtgatggccagggaggtaggaggaaatcagggacatcctagaagccaagtgaaggagactttagggaggaagaaatgagcaactatgccaaatgcctcttttaggcaagggaagccaaaaatgaatcattggtttagcattgtgaaggtcatttgtgcagtgatgagaagaaaaacctgactgatgtgacctaaagatggaggagaaattgatgacagagagcattaaaaaaaaatagtatttccctataaggttgttctgaggattaaatgagtaaagtgcttgagaacaatttcttgctcattgtaagcacccaataaatgttagctatttgtattgtaattgttaaat

SEQ ID NO: 40772 - DNA, 2300 bp, Homo sapien
gttgtttttaacactccttagagattctagaaacctcctgtaagaaggttgtgaccttctggttctttgtgactgtgtgcccagaaggaaattgactcatatacggagaggctatgcttctaaggaaaattctgacttggtaacttcaagttgctctgtgaaacaaataagacctcacacagtatccttccctttttttctgcttttgtttcttttgaaggaaaatgctaatattgcctctcactttttatgacatatacaaacttgatgacaactagaagtgatattgcttttaaaaagtgttaaataaagaatatgcctgcagttgcataggtgatggaggtgctggaatgacaagagcattgaggagactgtgaaaaatcagtggcagttgaagatgttggaaatactcaccattgagtctgctttctcagtaccatggagagaagcctacactaagcaaaggagtattggctatttggaaggttaaaataggttacctataagttttcaaacaataaattctccaaagtgttcaagagactttttttcttagtaataaaggagaaaaaaccttttctttcatataatgagataagattgatgcttacgtagtttgggctatggatctccttttgtttgaaaatttctaatgaatatctggcagttatgcttactacctatgtaaagaacaaacacttccttatgatgtggagacataattaaactggaaggtggcaaaactggtactgaaagaaggagcattcgctgggcagctgattctatatattagtgggattttcaatttcatcctggcttcacttctacttatttctgtactctgcagtggatagaaactgaaaatcaacccctcaatctatgttgaaagtaagaaaaaaaattagaataattttgactatttttaaaatctatcattcatggaacgttaactacataaaatcaagaaacataaaaatgcaagaagaaaccaccattattcactgttttgttttaaggtgtgactcattgttcaattttcttttatattacaaatattctccctctccatgtctttgtaccataagaaactttttaaaaataaaaaaaactataataaaaattataagacactgtaaatgaatggttttagtcatctgaattttctctgacccttagaattaaggaaaaaaaaaacacacaatagttatggccaataataattcctccttctttgaggaaattcaacagttttagaaccaactttaaactatacaacctggcatatacacatttttaaaaacacacacacaaaattgtttactaagcaagaaggagaattcattaaagagccacgccagctacaggaagtttagattttaaatgtaaagagaggaggcaatggtacctgacttttcacattttgatttatattggcttctttccagaaaacgctttcactggctttcaaaaaatttttattttatctccaacccttagacggaaaccatcttcaactggaaatcagaacacctaggttttactttttatttaggcaaaaatgtatttggagccaggcatggtggatcacaactgtaatcccagcactttgggaggccaaggtgggcagataatctgtggtcaggagttcgagatgagcctggccaacatggcaaaaccccatctctactaaaaatataaaaattagccaggtgtggtcttgcatgcctgtggtctcaggtacttggaaggctgaggcaggagaatcacttaagcccaggaaacggaggttgcagtgagccaagatcacaccattgcactgggcgacagagcgagactccatcaaaaataataataatgaaataaataaataaataaaaagcacatttggtctccacctactggaaaacaggcaggaattgctgtgtgtttcacagacatggaccacgaagaggataaagtgagttaacttgttaagtgctaagaaatattctccataaacccaagctattatagttacgtaatatgagtctcttctctggaggcggtcttcatggattgtttgccagcctagccttaaaaatgtcaggcatcgaagatggccgaatagcaacagctcccgtctacagctcccagcgtgagcgacgcagaagacgggtgatttctgcatttccatctgaggtaccgggttcatctcactagggagtgccagacagtgggcgcaggccagtgtgtgtgcgcaccgtgtgccagccgaagcagggcgaggcattgcctcacctgggaagcgcaaggggtcaggg

SEQ ID NO: 40773 - DNA, 2300 bp, Homo sapien
gataacaaagatatcttttctttagagaactgaaaagagagcagagaatataacatgaaatgatagatttgacctcctccctgttattttcaagtagctgggattttaaactagatgacctcattaaccgatgctttaccaaacagcaaaccaagagattgctaattgctgttgaaagcaaaaatgctaatattaaaagtcacaatgttctttatatacaataatggaaaaaaaaaaaagaggaaaaccctcaagggcatgagcattggatacagcagtagacattttaacaagaagatgaatggcgtccgtgggttgctaactgaactttgaagacccgctacaaaacgcgcagatgtgcagcagattggaaggagacacagatgttcggtttttttcctgtttctgaaaagaaataataatatccaggtcaacagaatgaaaaatgaaagatgatttgcaatgggatgtatgaatacagcagcaagaaaaaaaaatgccataatacaaaaggctccatatatatatatatatatatatatatacacacacacacacgcacatatacacacacacacacacacacacacacacacacacacacacacacacacacacacaagtaagagactcagcctgcagttaattagcattctggcagttttgacatcagccagctgccctaaataacccttcaacgtttcttcacttttgcaaggttccacagagtaagacattgggtctattccagctcattcattttatattgaaaaaaataattttaaaaatggtggcttcagctccagcccctttccaaaatttttcaaccccaccctgtttggatttttaattaaaaactagtagttctcttggtgttaaaacacttctgtcctgtgaggtttcccaatggtgtttttcttgtaaatgtgttggacaaatgtgaagatgcattgtagtttaaccatatgcccacatttagtctctttattcctagttggtgagaaacctgtatctttctatgctgcttttatatctgtatgtattagtgatatttctctagtagttaaaaaaaaaaaaaggaaaaaaagactctttttggttgtcctcaagaaaagaaaagaagaaaagctatctttcggagctgctatttcactctcttataggatttttttttttcctgaaaaccagcatgcttcacggaatgctaacatattggtgtttttgtaagagggatgtacataaatgtattttgcactgtcacaatgactccctaggcatgctttttgtttttttttttttttttttgagcaaattctttttaaatatgctagagccatttcatcaagtttagctgtagcatagagtagtcgtggaatttttcttttttttttttttaaatcattattagggacttttttaaaaaaataaaataacaagatatcctactttaaaaaaaaaggacagtgcatgcatattgctgtaaggtcgtttaagtatttctaattttacaaaagtaaaaatcattagagctccaaatgctgaggtgtagattgacagctttaacactgctgaatgccaggttatacagtattcttacaaaaagggaagtcagccaaagactgatctgatggaccaaaatcggaattttgaaaagcaccagtactactttccaaatgatcagcaggttaaacatgttcagcaaggtatagtatgaatccattaacccttcgttgtccagggtccagaccagaactacttgttagttttgaaaacagtagcccaggatgtggttgtgtgctttaggaaagtcagcagtgctgcaggctgtgtagacaaccaaagtttacaaggctgggaagacacttctccaaatacatatacaccaggcatttctttaaaatcaaaaacaatccattagctttggggcggggggtggggggagggttaaatgtaggccttggaaacagttttaagtggcttttaagtatctgcatagaggcaatcctaaggtttgctttaagtctcttaaatctaacatttttaaaagcatttcttccctgtattttcatatacaagttggttttaattttgtttgggtggtgttattttttttaaatgactttttagtttagaaagttctgatgagcaaataaatacatctatctacatgttggaagtccatctgccagcacacctgcttaaagtgaaatgaaagcacataaccaggctctgaatgggttatattttatcatggtgctcccagaatcctttgacctcactctgctttctagtctgcttgt

SEQ ID NO: 40774 - DNA, 2300 bp, Homo sapien
ttctaaaattgggaagaagataggaatacaaagattatcttaaatacaaacttaaaattgaggaggaaacttattgtcaaatttatagtttattttttttagggtggtctattttaggaaagaaaaatagccttcaaatatgtttaagtttagatattgctccttaactctataaacttgagtcaggtagggggctgtgcacattaaggtccagcttgtagacactgagggtaaaggaagctgttgagggtaacttactcccccatcaggctcttgtctctctattttgttctttttcctcctcttctttttcctcctattgctttatttatttttttgttactcccacttcccctccccctcctgctcttcctttctctgtctgtgcaaccacgtgcttcaaatctgtgtatctggactgccttctctaacagttccgtgtgagtgttagcagaatgaaaaccagatggaccagcagttcccactgttatctcccagccgactctggcaagcctccctttttccctccctccttggcatgacagaaatatttgcctttatttagggagacttgtatttgctgctgtacctcttccctcagctgcaacataagtgggaagctatttattcccttgttgctgaggttggttgaggtgagtagaatgtgcaaatgaatttaactgttgaagaagcggttttaagcctgcctaacttctgtatttttctagaataagtgacttactggttgtagcaatctgaagacaagtttttaacaatagataaaggtgaaaatgctcttcatgtgtgtctctaccatcctttcactcagaacacttttattcactatagggacatccgttgttattcagccagaagtatagattcagaaatggagaccctgatattgctgttaactcatcaataataataataacagcttattgtgcaaatactcttattagaatgatgattattttcattctcttattgcatcttccctaaagtgatatcaacattatttcaacttttaaatgttgtgttttattgcaacccaagtgttaagcaattgctttgaacaaaagtgaggtagatttggaattgttatagtagtaatttgggtttttctttttctttcaataattgacctttaagtgattttgagattttctcactgtggttattataacatttttaaaggcttgttctttcttaatagttacttcacttttctaaaagcccaagtgtgagatatttgtgtctataactgcaagaggtgcctcaaaatacgttgggtgtgtgtgtgttcatgtgcgtgcctacacatttgtgaaagaattagatctaaagaaccaaaaatagagactctgatactgctgttgactagctcatcgtgcaaatgctcttatttgaatgatgattatttttattcttttattgcagcttccttaaaatgataccaaaattatttcaacttttaaatgtttattataaccaaagtgttaagaaattgctttgaacagatcaaaaggtctgttgctttgataagtagattagattgagaaaaacagttcagaatgtcaagggaaaagtatacttacagcagttctgaagtatgaatgtccattattgggtaatcaggaaatttcttcatatctgccacatactcatgaaaaaaatattagcagtgtctagttctttttagttctctgtttgggacttttacattcttaactctgtttgagattattaattggagtattggtttcatgcttttaaaatggcaggtcataaatttacaccttttaagtaaataatagtttcacttcattgtataacacatttcacctatgtagcagtgatttttaaaacagggcaggaaaaattgaaatgcgaaatatgcctggaagacgataacctatttcatctaataggccagaaaactaaggacagcacagggatggcaggtgtaagagaaaatcattacaaagagctggctcctaccagtatctcacctgcataacagacttcaggtttttgttatttctgagctgtcatgaggggttcattatcatcccacttcctcatctattttctacctcttgctaacattggcttcagcttccagtgcagttgtgctgctgcatataacactaccaaggtagcatctgcctaagccagaaataacaataggatataatataacctagttacaaatgaggtcctgccatctgtgctataccttcttaagtggggtttggatgataaaatcctgatttaaacgtcagtagataagtgtattt

SEQ ID NO: 40775 - DNA, 2300 bp, Homo sapien
aaagaataagaggaggaaactggtttcttgagaaaatgctgaactagtctcagatgcacacacattcagctaggccccgctgcagtcagacttctaggtgagaatctccagggatccaggttttgttgatgtggatcaatttaaagtggcaattactgtagtcagataacagcttaaaaagcctttttacacatagaaaagatacataatcacacagcatatggaagttcaattgtctgagctgcggtttagggacttgcagtgtaccgatattaagaccccattttaaagccggatatcatccagttttctcaaaagtgtattgcattttgtcatatgattttctattttagaagtgattcaccatgcatattgatgaaaggttgggtttcccactgtgaaaatgttttctttctaacataagtatagtactaaaaaaaaaatcagtggcatgtagcattaagtggcttttcaaaaatactctctttaaaaatgaaagtctactaatttaggatgctggattccataaaggcccttatagcaggacttaattgattatcacactcatgcctgctataaagctttctatcataagaatgtttgagcttggtgcttaactgtactgaaatccattacagagaacctcattacaagtgacatctaactaagatgaacaaaaagattggcctcataaatagggtgcagtatactattagtgacagaacagagtaatcgttatgaattgtggtctttttacaagttgtctctgacaatgatggatttttgaggggttcgctggataaagcagcccttcttgggtacagtatttaggggctgtagaagttcttattgattgacactgtttatcaagagaatatatttttagtttgtgcggagagtgtgtgtgggtatgctttgaaacaggttgtgtgcactcttgggaagaggtgtaggaagattgagtaggtagaagtcagagttattgcctctgttttcagaaatttttggagatagcaagtagtgtggaaatccatctgacaagggctaaaagcatatggaaagtgtagagtaagtaaaggacatgttgaggactgaaggaatagcaagagttaacgggaatgctcctgtctatcatgttcattgagcttgcaggctgatcagaggaccctgagtggaattgtttctgtgttgatagtggattgtgcatacgatggaaaggtaaagcctgaggcagctacctcatcatgtgccctgttgttgaaacaaacacagacctaggaaagatttgcaagtgtaaaactgagaaagagttttaggagagaacagtattttccttctgcctggcattgttgtgtgtttagaagaggcatgcaaggcaggcaggcgtgtgtttctcctatgaggcagggatgttttacaaaggactaaagagggactgctgagaagaaaatagccagctttagataaagcactataacaaaggcttctagttttatatatcatggtgtccattaaagcttaatagggaagagtccattgaacctggctgggtatgtgttattcatgggaaggataaacatttaggggtgtgcaaagaaatcaggaatcaggaggacatgattgttcagcttttgaaaaggctttacaatgaagattttgtttttatctcccatggatctctatgcaaggtagaggaaagtaagctgaaaatgtttggagcatatcaacccggggatcccagggggttaaaagcactcgagtaaaataaaagtggtcggctcagcttctaaaaagtgttctattttacacatactactgagaagctgacaaaaggaatgattctgatactttgtgcaggatgataaactggcacaatatacaaagtcttataaaaatgtttgtaggctgtttgggatttccagttgaataaacaggctttgagttctgtacctttttttttttaatacagttcccaattatggctatgaaaatgagaagatgaagggaagccttttattgtgaggggtggtagggggccaggtctacatttctatcttttggcaaaataagggttaaccttgaacaggatgggggtggtggtgaataaattattcggcatttagcttatcattctgaatttcactttttgctttttggtgctctgaaacttgcagagagaggtggagtgctaaggggagggtaggggttgtgatactttgcacacacatccctgtcattgttctgcctaaagagacagggctgggttcaaggccacatgtgctcctgtcatcctccacatt

SEQ ID NO: 40776 - DNA, 2300 bp, Homo sapien
tgaaaaatccaaagattagctctttttttttttttagttacccttttgattgtgatatattgtttcatatataaaatagttaagtggtgaaaatcctcatgggtgactttagatttacattgtatattgtttgaaactgtatttgtacactatgttaacatttaagaatttataaatatgcacatttaaaatactttgttatcaccatgttcctgccaattttcttcattcacttcaaaaaactctgattaaaatagatacaagtgaagttaaaaagtaaagcagtatattccaaattgagagatcatttttaattgagaaatttgtcttaaagtttatcacatggtaattttatgtgcctcaaaaccaagattaagtaccccatttttgttaaacccagacattggtctgatatttagcagtcatgagaaggaagatatagacttagactctagaggatttgtatatgctttgcctggttcgtttgctcagtagagattattaactatggctcatataggggcatgatccacttttgtcaggctctctgatggcctttgttgatggttgctgaagcacaaaatatatattatgattgaatctaagaagagtatacattttcttttttcccaatatttgtttagcctatataaaatgttttttacctttgtacagaaacattggaaataacagaattgtgcagaaaagttactcacattgccatcttccagaaataatcatatttaacatctagatgtatttactttcagtcttccccgctgtgtgcaccctcccccactccactatttgagtacttacacaacctatacgtgtacatatatttatgtatcttggttatagcattgaaattttttgctttatcatttgttaataaaattgttagtatttatagtaagctaaatgtttccaagatccagctgattgtctttaatgatctttgcttactgcaaggcaattcccaactaagaaatatctagtaatgtattttaattaatcagtacttatttaatttttaaaccttaaagagcaagaaacaactgattgcatcacaaaagaatcataatgtggcacataaactacattgattttttaaaaaatagaacctgcttgttttatttacatcagaatatgttcaccgattttaatttctaggaagtaatttggtctcaaaaaataatagctacagccttagtaattccttttgagactgcttttagaaatctttcttcccttgcatttgttgagttcctaccttatatgtgtatgattgtgctggacccttatatttcctagtttgtaagaattacatagcaatactttttctattcatagtagtgatagtagtggtctcatttttaatcatagtaggtgaggaatagacaataaatattgtgaatgaacaaattctaagtttgtcaaatatagcaggaaaaatgagaaaatttatattattaaaaggaagaaaaggtgtagaagtttgttgatttggtaaaataattcaacaatatttgtttcattaatattttttaactattctattacataaggattattcttcactgttgttttaaactatgtgtgctaataatggcaatactgaaatttcagaacagcgaaacaaaatttgaataatgaaacaaaccactttgttttgaaacaggattaacttgtgtgtaaaattccataaataataatgtctaaattgttttctaaagaaaacataatatctgacagattatttatttttttgaaacaggtaaaatgtaacattctcttagggtattgatgtgcatatctttaaaaccaatttaagaaaagaagagctttcagggtgagaatgtatccagctttgagtcagatgattggaaaattaagagtcctttagaaaacatcatgataggaactgagacaatggggattgttttggattcttctaaaatttagaagagcttgtatctgttttttttttaaacaaaacataacaaaactggcctagtgttatcatgtaaacagatgggtatgatacttcagactggttgtgatatatgcattttttttccctttgttgttgtcaatagaaaagattgatctctgggctggtgaacataatctctgtcccagtcagaaaaggagagaggaaattagcagagcgattggtggagaatgatatctgtcaaaagaaacacttggagagcactgagtttagtaataggtgactgccggaaaaaagggaactttgaatattgtcaaggtaaggaacagacaaatattttgatttt

SEQ ID NO: 40777 - DNA, 2300 bp, Homo sapien
tttcacccatttaaagctcactggattttgtaatgtagccagccaagtgttttacttcctatccttgcacccttctctaactattgaacctggtcactttttgaagatttatggagaaatattaccttgttctcgtctcagtgataccatgaggttttccacgttattggattactggaggattgtggcagacccctttttatctgacattcattgcatgacaagattttcacacatgcccttcccccacctatgcccagcttttttcactttgtgttacctatcaaatttcttttaattctattcttggggttggaacattggtgtgtgtgtgtttgggtggggtgggggagagggggcggtgctcaactatacataaaaccgatttttggccaagtgatttggaggggagtgcctgattaaacaatgcttctcctcattttctaaagggcctcttaaaatatggttcccttaaaaggcaggggctagttctcttgctattgtttttttttctactcactagccttacccttcatccccattttattcctttctagggagaccccctgcataaaactattttataacctgaagtttcacagcagctagggctacagtgcacaccatgaacaattgtgtaatttattggctccttcattctgaactcactcttgatgctgtagtgagagcttcttaaccaagcttcagtgccttgaaacacagcacaaccaaatacttcccctcccccaataaaataacctcctttgctgcattatctgcactccattaaggagctgatcagatgttcacattgtctgatgggtgtatttaaaagtgaaaagggactcccaagggactactcaggtgtgtctccttcctgaccctgctggggagggggatgaactctggactgacggacaagcattagcccttgcttgttctctgattgattctctggctctgggtgggtgaagagccatgaggcagctcaagccgagattgattgcctcaatttcagattcccacctccaaaatagactctcagatgcacacataaggagcctcctcccccaacacaatttctggaggtggagcaggtctctaagagtcacctgtggctaccaatcacaagtgttcctccttatcacaatgatgctggctgcaggagtcttcagctgggacacattaaagttcagggacagaagctattttatatctctgagtgtgtgaatgtgcaggggctggaatttaggagtattggggttagcaaagaaagggacaagaactccgacttgaggttggtctggaaggcagcttaactgctctatagactcagtaggtttgttttgcaaaatgtggctgtttggatggaggtgagatggcgactgtctccttaggctctgccaaaagagagctcttgatcctcctctgaccttgacagaatctcgaacatgttccagcctagccctggagcagggaaatacagtttgctggattcctcccttctttgggtggtaggggcagatttgggcatgcaggcgacttctagcctgcctctcattcccagatagccttagggtagctctcccccactttctggccccatcctggggtctgagcccccgccccctcctccatccctccttccctcctgcctgtgtctctccttccctcctgcctgtccctttctgtcttctctctctctctcccacttttcctccctctcccgctccgtctcacacgcaccctctgtttattttcctgcctccatctgggccctgctgatattgtaatcaccctgatgcacgttggcttctctcctctccctcctgcgctcacacactcactcacacacaatgtgccatcctgacaaggcttttacttctgataagctccaatgtgtgtttaatgaatacaaagccgcggtctgggtgccgcctcggccgcggccgctctcccgcgctcctttgccagaaggtaatctccgtgaacaggggagggaggcgagcagggaggaaggaggggtggccaggaggaaggggggcgtggggaggcggcttttctctctccctctctccctttccaaatgattcagaagtcgataagaccaggagaagtgaagatgtaacatgttatctgtcgctcctcttagctggcggagagaatttacatttaaagattagcagagtgagaaagagaaatctgccttttgttgtgtggggtgaggaggaggcatctacccctggccttgacgctatctcccatcacctctgctatccagacaggactcaccgaggtga

SEQ ID NO: 40778 - DNA, 2300 bp, Homo sapien
ttatgtatgtcatgcagatggaaagatagattaattaaatgtattggaacaatttagtatccttttagaaattaaaagatgcctatatcatgacttaaaacaagatgaattctggtggaatttatgatttctatataaaaaatgaaaccataaaaagtattagaagaaattataggtagacgtttttagaatcattttgtaaggaaaattatttctaggcgttgattcatgagttagaaatcataaagggaatactgttggattataacacattaaattaaaatctaacatgcagcctggtactcagtgttaattaaggatgtgaagaaacaatctctttcattcactgcttgagggaatgataatctcacacactttctggaacgcacttatgtttcaaaagctttacatttcatatatactttagaaattcgtctatatgtgacaatgacagtagtatgcaaaaatgtattaaccgcatcactgtttatgaccaaaaaagtgaaagtgatgtaaatatccaatttaggagtaggtgaaaaagcagttataaaatattaatgtgatgcaattctattttgtttaaagatactggtctctgtgtgtttaacttatgggaggactagaaggaaaatgttttgttgaactacaacttgagtccatatacctagtagatctgtctgctagtttccgttacattctatattcgtttattcagtattcactcattcattctatatttatttgtccgataactcttgcccttctagatgctaatatgtcatctgtcacaattccacagcaaaagtactatggaaaaagatgggtctgctttattcactgaaaaattaaagaacacttcaaaaaggaactgatacttgagtttattcattgttcattcaagaaatatacttattgagcacttgcgacatgctagtcactgtcctttgtgcttgcaacaaatcagtgaaccttaaaaacaaaaacacaacatactcctgttcttatgatgtaatcttgagagatggtgattgtttcatcaaacagaaaaaaaaaaaaaaaggatgagacggtattccaagtagagaaagccacacttgactttatttatttcacaatagttatcaatttatttgtgtgattctcccactggactctaagttccttaagaaaggaactctggcttgtactgctgtatctctgatgccaaacattgttccagacccataataggcacacagtaaatatttttgaataactaatactatacttcattccctagaacagagtttcttgatgttggcattattggcatttgaggccagataattatttgttgtgggtgtctaccctgtgcattgtagaatgtttagctgcatcactggatgctagcatgcagctagatgccagcagtacctctcctgcctgttatcaaaaccaaagatgtttccaggcattttcaaatgtctgtggggtccagaatcacccctatctgtagagaatcactgtcctagcactgtgaaattaagtgaaaactatggaacaattccagtgaatataatgtggaaatcgggaagagtagaatgagactttcttttcagttactttgagtcttttattagaggcattgtattttattttttgtccaagcactcttaattctatactgtttgttgattcaattcctatactgactaccgtgcttgtgagagatggggacatcacatgtaaagatgagcgatgtctgcatttaacccaccttgctggtcacatccctagtggtactgcaactttgttttgttttcaaaagaaaggaggaaagactttaagatgttgcttttatcaaataaataagctagtgttttttcaagaaattttagacacactctaagacaaaactcctaatgcagttttttaataccttttataatgtaggattttttaatacctaatatttcatcttgaattgcaatccccagatgttgagggagagacctggtgggaagtgactgcggttttccccctgctgctctcgtgaaggtcagtgaattctcgcgagatctgatggttttataaatggaagtttttcctgccgctgacacatgcatttccctgctgctatgtgaaatgtgcgtcttctccttccgccatgattgtaagtttcctgaggcctcctcagccatgcggaactgtgagtcagttaaacctcgtttctttataagttactcagtctcgagatgtctttatagcagtgtgagaatggactaatacaatagctaaataatgccttagaaatcaat

SEQ ID NO: 40779 - DNA, 2300 bp, Homo sapien
tacttactgtgttaactacctctacccttttatttagactcgtcattgatcctcacctgcttttcccctctctcttacttcttgcttgctttttttatcactaaccacatgtattacacaaaagtagagagaataatgtaataatctcaatctacccattacctagtttcaataattattaatgtatccccactcttttgcatattttcaccatttttttatactgaggtattttaaagcagacttcagatatgatgtcattttactgtaaatatttcagtatgcatctctaactgacaagaatgttgggatttttgttggttggttttttgttttgttttgtttttatattaccagaaagctattggtagaatatatatatatttcctaatataatctaatactgtcaatattcagatgtccctaattgtttccaagatggctatttacaagagattttaaaattaagtccatgctgaatttggttgcgtgtctcttaaatttcttttattctgtaaaaaaataatccaggccattgaattgctgaagaaaacagcaattttgtttgctgtttatttgtcctttcgaatgtcaagtaatctagatttagtacttttcattgtgttagtcattttattcctatatttttcttattttctataacccgataatgagatattaagctagattaggtccagttttttatgactgtggtttgttagttcttaagctgagagtatttcgtagtacttaatgagttacataatacttggtggtctcatttgtgatgttagacttatcagtgaattgatgtgctagtaatgtgatttcctgcaaaataaggttttttcatcaacatcacctttcctggatgcattatctcatcaggcattgcaaaatggtgattttctttcattccttcagcatatattaagtggaattattatgtttaaaaataatcttctttatcaactatttgatcatctgaaaatacagcttatacaggagaggaaggataaatacttgagtctttccctttcttaaatttcagattaatgaattagcactctctaatggtggccaatgaagatttgccattgttattgctgttgctgcttttattattataatctagttatatattttatatatatgatgtgtttcagcccattgccatcatcattcttttcagtactgagatgagaattcaattatcatgcttaatattagaagtattctcattaaaatcatgagtttaatgcttttacattgttatacatttttctgaaagtgatagccagtgtaattcagtttttaagacagcaggaataaataataaatatggcaaaaaatggaaaaaactaaaattttaagattatgtggttgactagaaaactaagaaaatattgtataagatttatataacatatttctttagataataagtatgtaataatcaatagttttattgttctctatattaacacaataattagaataattagttaaatatcataatagaaaaacgtgtttcaccattgcaattaaaattatggactatgtagaaaaaatgagcagaaatgtatgagtgttcattgaaaaaaaagctctacaagataacataatgaagttttaattgaaaagacaccaactgtctccatggataggaaggttcaacattgtacaaatgtaaattttcctctattttgtaaacagaaaagggaaacttgatctgcaatatattaaagtatattataaagttatagtaactaaaataatgtcatagtcaatgaaaagtagacagatcaacagaaaaaaatgcagtgtccagaaacagatctaaatataaatattcatttaatgcattatgtatgtcatgcagatggaaagatagattaattaaatgtattggaacaatttagtatccttttagaaattaaaagatgcctatatcatgacttaaaacaagatgaattctggtggaatttatgatttctatataaaaaatgaaaccataaaaagtattagaagaaattataggtagacgtttttagaatcattttgtaaggaaaattatttctaggcgttgattcatgagttagaaatcataaagggaatactgttggattataacacattaaattaaaatctaacatgcagcctggtactcagtgttaattaaggatgtgaagaaacaatctctttcattcactgcttgagggaatgataatctcacacactttctggaacgcacttatgtttcaaaagctttacatttcatatatactttagaaattcgt

SEQ ID NO: 40780 - DNA, 2300 bp, Homo sapien
cagcttcccaaagtgctgggattacaggcatgaaccaccacacctggccaaaccaaatatttttaaaagattaaagaaaatggggactctgagtcatacaaatcaagaaagttttatagagagttattcacatttagcaagctttcagaagaatttggatattcagcaggtcaagagtgtaaaattatttgtaattggaatgggtttcttttattccaacaattgcatcacagtacgatgaacattttaattgaatctcaaggcacttgtccagaggtactctttttttttttcttttttcttactacaaccgtatctatcagacaagataaacccttctgggttttggtttaatatggaaggaaaaagagtttcactattttaaagccacacacataagtaatctggttaagtgtattaatataatctcatttaactctacctttatttctgggagaggaactggagaccagaaaatgatttaggaggacggaaaataaaattacattttggattcaattcctggccataatattctgtgagatttcagaaagccttctggttagtctatttatacttgtctcagttttttttttttttttttttttgtatgctactttctttctcaagggcttttggaaaaagatatgatggggctggcctagaggaaggtgacttttatgtgagcaagagaaaaattaaattggaggttgcataattttttgaaggaattttagatttagttcaccacaatattaaaaaatgatggctgcaggcacttagatttgttgaatggttgaataaatctagcctttcctagcctgtgtttcattgtccataggctgtggataatactcttagtgggttttgtaaggattacatgagtataatttataaagcatttaatatttgaatacttttccaataagtaacatcttaatatttcattcccattttgtagatgtgaaaattgagtacccgaacataggctcctaaatcctaattgtcagtcacgtttttgcaatctttcctaaatttattaatctctggttaatgttaatataaaacgatttttttttcttttttgctgtttgaatgggcaattaattgattgtttacacagacagtgcgcccttccacttagggacgctccttagggatgatcctgtgaattggggagtgtgtgtgtgtgagatgggagggttcaataatcaaaataacatatttttccgttttatattaactaaacaagtcacagtctttatttttaatttctacagtcacctcgtgagacaggtattagaactccggagtggcatcaaaatgagggaaaggcctcagggccagcgcctttgcgtcctggaccggcgtacagacgggagaaaggccgaccaatccgagagcaggctgaggcctggtcccgcccctgggggcagagcctcgcctcttttccgcctcaccctttgggagtaggggtgtgcggctggcttgtcccgcccctgcccctgagtgacagaaccgtggacagcaacatttcccacaggacacgaagtttgtcggcccttgccttggcagagctgaggtgtgtgtccggcgagtgcgaggggattggggagaccctgcccgggaagctcggggtccgggaatgaaagcgggcgcacctctttagcgagccctaaagcgtttgggagacgatcgttccgtccctgggagcggcacttggtggggctgggcggagggaggctctgcaagagaaacccggagtccgggaaacccagtaggtacggtgatcactgaaggacccgttcccgttgagtagggcgctggctgcgggatgggggatggagggtgctgggttcggtgggcgtggccattgcggttgctaaggaacgcgcggttcccgccctgccagcgtgtctggcgccagccgctgggccctggacacgttagtcccgcccacctcccaaggtcttccacgcggctcgggattggctcctttgtgctgaccgattactcgcggtcgcttacttgtcagtgcagctctctgggttctgccgttcccttttggggccccctttcccatggtactcctcttcactctttttcctgcttcctcttattaatgaacgagtatttgcataccaaaacatttgcagagaagagattcagacaggattaggtggctttatcggtggtggtgaggttgtggggcgggggtatttttcttggagcttggtgtattcctgaatccatcagatgttggtgtccgcgtggatgactaggaaaaggggattggagat

SEQ ID NO: 40781 - DNA, 2300 bp, Homo sapien
gacttggaaccaacccaaatgcccatcaataatagactggataaagaaaatgtggcacatatacaccatagaatactatgcagccaattatatttcaatttgctagaaatgtaagtcaataatatatgtctttatatggtaaagaaataagcatataacatacatctggaagttttaattttacattaagctatttacttcttgttgtataatatcttacatatgtgagaatattcaatgcatttgctgtacaaatgcattgctgtacatctttatgtaatgaaaatggactcaagtacattcaccacttttatttaaatcttacagcatttatttatatatttattaatatataatcataactctttctttttagtctaaaactaatttttttttttttttttttttgagatggagtcccactcagttgcccaggctggagtgcaatgatgcaatctcggctcactgcaacctctgcctcccgggctcaagcaattctcctgcctcaggctcctgagtagctgggattacaggtgcctgccaccatgcctgcctaatttttgtatttttagtagagacggggtttcaccatgttggccaggctggtctggaactcctgacctcaggcaatccgtccacctcagcttcccaaagtgctgggattacaggcatgaaccaccacacctggccaaaccaaatatttttaaaagattaaagaaaatggggactctgagtcatacaaatcaagaaagttttatagagagttattcacatttagcaagctttcagaagaatttggatattcagcaggtcaagagtgtaaaattatttgtaattggaatgggtttcttttattccaacaattgcatcacagtacgatgaacattttaattgaatctcaaggcacttgtccagaggtactctttttttttttcttttttcttactacaaccgtatctatcagacaagataaacccttctgggttttggtttaatatggaaggaaaaagagtttcactattttaaagccacacacataagtaatctggttaagtgtattaatataatctcatttaactctacctttatttctgggagaggaactggagaccagaaaatgatttaggaggacggaaaataaaattacattttggattcaattcctggccataatattctgtgagatttcagaaagccttctggttagtctatttatacttgtctcagttttttttttttttttttttttgtatgctactttctttctcaagggcttttggaaaaagatatgatggggctggcctagaggaaggtgacttttatgtgagcaagagaaaaattaaattggaggttgcataattttttgaaggaattttagatttagttcaccacaatattaaaaaatgatggctgcaggcacttagatttgttgaatggttgaataaatctagcctttcctagcctgtgtttcattgtccataggctgtggataatactcttagtgggttttgtaaggattacatgagtataatttataaagcatttaatatttgaatacttttccaataagtaacatcttaatatttcattcccattttgtagatgtgaaaattgagtacccgaacataggctcctaaatcctaattgtcagtcacgtttttgcaatctttcctaaatttattaatctctggttaatgttaatataaaacgatttttttttcttttttgctgtttgaatgggcaattaattgattgtttacacagacagtgcgcccttccacttagggacgctccttagggatgatcctgtgaattggggagtgtgtgtgtgtgagatgggagggttcaataatcaaaataacatatttttccgttttatattaactaaacaagtcacagtctttatttttaatttctacagtcacctcgtgagacaggtattagaactccggagtggcatcaaaatgagggaaaggcctcagggccagcgcctttgcgtcctggaccggcgtacagacgggagaaaggccgaccaatccgagagcaggctgaggcctggtcccgcccctgggggcagagcctcgcctcttttccgcctcaccctttgggagtaggggtgtgcggctggcttgtcccgcccctgcccctgagtgacagaaccgtggacagcaacatttcccacaggacacgaagtttgtcggcccttgccttggcagagctgaggtgtgtgtccggcgagtgcgaggggattggggagaccctgcccgggaagctcggggtccgggaatgaaagcgggcgc

SEQ ID NO: 40782 - DNA, 2300 bp, Homo sapien
gttggggtcaggattttgttataggtaccctgagtccagagcctattctcctcatcactgtgtcatactgtctcctcgagagaactgttaaagaactagtttattccaactttgggggaaaattttgcttctctgtgtgatcttcctgagaaaataatttaaattttttttttctaaatatctagacaaccaaaagttcaagaagaagacatgctaacaaaaagcaggaaacagttatggaagaggatcctgaagatagatttttaggaaaattgggttggtctgccaatatcattactcttgttctcatcctctagacacttatccatgaattacaccatgcaaagtacttcccctccatttttcttactgtccaagagtccactagctttgtttttaaaacacaattttgtataaatgtcactgcttttgtctcctttggtcttagtactatagaatattgtgttccccaattttcctaaaagaatctggctctagctaaatttatgctagccctattctgagtcatagggatcagagaaagtaggcatgagcaaggctgtgcatgtatgtgtgtgtgtctgtgtgtgtttgtgtgtgtctatgcagtgttggggctccctggaaactagctatttaaatgcaataccagtgaggcttgattcaagcaaccttaaccttacttagaagtattttatgcaactcatttcactatgaaaacctcccttttttgtgtttgtgttaaaagaactctctttaatggccagattatttctcccatcactgctagaatattggctaatggaagacagtcttcagcaaaacgaaatgacacacagactggaccctgggtacttggacagtatttttgttccaacacctatctgaaacgatacgctctgaggggcgacatctttcttccactcatggtttccatgacgagggattttccgtaagcacatgccaagaaacagaattggaagggtgcaaaaatagcaccagagttggtgccaaatttttttcttcaccaatttttattttgccttcttctctttcctttcccaaatgatctttaacctaggaaattgacctcaggctcataaattcagtagtggtgtggcttcaaaatttttttgtcagctcttcttagaacctaacccgtctacaaggtattcacctgccttcaaaatctgtacctaacctacctttactgctgagatatgtccagcgttatatgctctttgtgtagaaatatttcaaacttagagaaaaatgcggcaaatattataatgcccatgtatctttcatcaaaaaataatgagggttaagattccttaacattttcttcaggtcatttaaaaaatattttcaattgacaataattttatgtatttgtggggtccaatatgatgttttaatgcatgtatacattgtggaatgactgaatcaactaattagcatagccatcacctcacattcttatcattttttttgtggtgagaacattaacaatctactcccagcagttttggaagatgcaatacattattactaactatagtctccatgctgtacaataggtctcaaaaacttactgttccagtcagactgaaactttgtaccttttgaccaacatcttcccattccccaccacttcacccccagccctggtaaccaccagtcttctctctatttctatgcgttcagcctgtttagattccacatatatgtgacatcatgcagtatttctgtgcttgacttatttcttttaacataacgtcctccaggttcatacatgttgccacacgtgatggaattttcttctttttaaaggctgaatagtattcctttgtgcacatatacaccacattttctttattcgtaaaagatatggtcttcatgcattcaacaaatatttttgagcacctactgtgagccagccaatcttgttggtgtttgagacatacgagtgagcaaatgagattccaatcgttgttcttggaagcttgcatgctttgtaagttatttttaaaccctttagaggagaaacagttactgcccactcctgctgtttcctcctatataaaggtgacttccgacactccggcaattctggcctctccagcctcttgcctttcttctgaggggagccttttatcctgctggtgagtttgggaaaaggaattggatcggggcatgcagcgtctccttatctgcaaacaggcctgccggtgggaatcatggtactgttccccagcaacacaacattaatttcagagggagatgctctgccactacag

SEQ ID NO: 40783 - DNA, 2300 bp, Homo sapien
ctcccaaagtgctgggattacaggcgtgagccatcacacccggccaacataaaatatttacaacatgcaattctatttatataaaatctaaaaatagcaaaactaattcacagttttaaaatcagattagtggttacaccttaggggcattcgtgattgggatgagagtgactgctggaggactagctaagttttgtttcttggtgtctctggtattacacgggaattgttacgcaggggtatgttcactttgtgaaaactcattgaactaaacatctaatcgttgcttttctgtatgcatgctatacttcgataagaagttggctaaatttttcttttgctccaaaactgtttattgtctagcccattctttctccactaatatgaatatttaacctgagagagagagggagagacaatcaacatgactgcaaaaacaacaaatgggacagttgcctggatcagccccctcctgaatactggctcctaattctgtagtatgccagtggcattaggaacacaggcttatatttgctctttccatgaagtaattgctggttctgtttatctccttctgcttcctgacacataatgattagaggtgcaagcactggtgcaagcattctgggttggaatccagatgtcatctactagctagtttggattagatactaacttttttaaacctcagctgtctcattagcaatttggggatcatcatagcacctaaatgaagggattatcctgaggatttaaatgaataatgtgtataactcatttagcactgtgtctgcatagtaaactctgacagattagatattattattattatcagtattaacctttcactttttaaaatttcttcttacattctctttctccctaatttatttagaatagagcatcatctattttgattctcatctatccactttccctattctcaccctcctttccatcatgctacagaccaaagtagatggtggcagagtgcctgggtacgtttatgatttccaagagtgctcttaaaagctaacatgcaaattgaagagaggtaatagcttgatctaaaatgagaaagacttgtgttctcacatattagacaaaagccttaaaacttctctagtatctagcaaaatagtctgtatttagatctggtattaaataaaatatttttgaccaggatggtgagaaaaagtctgttcacttcacatacaggtctagcatacaatgtaattacaaataacctcccacaggagtggctgcaaaggtggctctgtgcaattaatggtaatgctgtgtgtcatttattacctgtgttatttaatctttagtcttcaatttgtgaacttcctttagttatgaaatttcatgactaaataaaaagagctttggtgaggtgggcataccaatttaaaagttctttttgtattatcagtttattgagttatatacatagaattacaccgataaatgagtacactaacatattacagagtgataaagactaaaagaacacatttacataaagttcctagcacaaagtaggtcctcaaaaaatgatgaattcttctgagatcagatgagagtgttgacctggaggtataaactgagaaaggaaaggaagaaacatcaggaacctacttcttaactccttagaatatcctatttcctgacccagaggtggagaatggcctcaagctggagacaaaaaagaccctgatgttgggctgtggaccaaatatcccactttactcaagataccatttccaagtcacatactgtggtaattaacgctatgttagtgacacttctgtaatgggttacagattgttgctgtggtgtatacaaagcttattggataaatgtctttaggaaaggaaaagacattagtctcttagtgatcaataggataataaattgtgctttgtttctttacctggatttcatgtttatctttagaataaatgttagcttgctcactgcttctgtggtttcgaggcttgcagtgttgtgaaacacataatctttttcttcacagttagcaaatccttagcttctctgctggacaaatagtcatgtgagtagagagaacataaaatcaaagcaacaagaagctagggcagaggatttagagggcaagcaagcatgggccaggactttgacagcattcatccagcagcatgcgaactccaaagagaacccgatctccaaagacaagtaagtatccattttctacccaccaaaaacacccacattttcccctccaagatgctcaggactctgtgacttattttgga

SEQ ID NO: 40784 - DNA, 2300 bp, Homo sapien
gtttcccctaatagtagactggaaaagtagccaccaattcctctaccaaccacaccatccgtaacatttccactgccctctcactctgatccctctagtctaggccacatggcttgcatccgccaatagtgtatcagcaaacataacataggcagagacttgaaaggcacttgtgcagttgacttgtcctgctccactgttttggaactctgaaaccatggaaagaagcctggctgaggtgctagacaataagaaacacgtggcccctgctgacgacctgccaatgccgtgacacagaagtgaggcctcttagatcatccagccgccagctgaccagaaaggtgagtaagagcccagctgagcagaaccaaggtaaaagaaccacccagctcactcagaatcccaagctaaccaaacgattgtaaaacgtcactaagttttgtggtgatttgttacactgcaaaagtggatacagtagcacatacctcagtggcaattttacacatctttgattagcttctatcactgccacataactgtgagctctctaaaagcacagactattctgaccttaggttactgtgccaacctcaaagccaagcataatacctggaacacaccaggcatccaaccaataacatgctgagcgaatgcaaggagcaaagagagatacacattgtaacacaagcgaataggggaagttcaaaacaaaggactgaggacatctatttgtacaaaataaaaacttttaatcagcagcacacggcagcgaggaatacaagaccaaaatcacatttaatctgtctcaaagggttcaaagtctagggtacaggaggcagtacaaaatcaacgaagtgtactgtttgagcattccaacacttcgctccttcagacagtattaggaccccgtcccaaagcgttaggacaaggccctaacgctgcctgaaaaagtgaagtgacggaggatcccagagaggtttcttgaagcagataaagtctgaattgaggccgggcccggtggctcacgcctggaatcccagcactttgggaggctgaaggggggcggatcacttgaggccaagagttcaagaccagcctggccaacatggcgaaaccccgtctctactaaaaatacaaaaaatcaggccagcatagtggtgcacgcctgtaatcccagctatttgagagcctgaggcaggagaatcgcttgaacccaggaggcggaggttgcagtgagccgagattgtgccactacactccagcctgggcaacagagcgagactccatctaaaatacatatataaataaacaaagtctgaatagagtccttgcagtatttactgggaaaagcagcacacgcaaggccaggagggtcaaagggacagaggcgttcaaaggacaaaggagagcctcctgtttgtttggggttttattctttttgaatttttgttcccccaggccaactctaagagccagaactgttcgttatttatctcagcacaggttcggtgtaagcgttgcctccttacccgacgctcaggcccttcaggtccgggacccctgcttcttaattatgtttctattactcccagtgtctaacacaatctcttccacgaagtcggaacttgatacatatttgctgaataaacgaaaagttaaagatgaggcagaaagcacagctccttccaagggcagctctcaagagcccacgttttcagattcagcagtgaagcggacgcgtctggtacgagactacaagtcgcacaggcggagagggggcccccgggcctctggtttcacgtctccctcctggtccccggcggaccggcgtcttttctcccctgctcggagtagcctagcagcgctggaggctggctgtctggtaagcgcggctgttagagaggatggaggcgccgtagccccgcggtgcttctcacagccttcgccggcagggacgcgcgggacaaccgcgcaggcggctctgcaggggtgggcgcgccatcacccctctcggtccctgcctgcttggcgctttccgagccccagccgcgctcaggctgcctcgggcattgaccgcgggggcgcgcgccccgtttccatagaaacgcccggcctgccgcggcggcgcgaggggcgggctttcaggctcccggcggctgcttgcgccccagcgcgcgcccaggcgccttggaatccccgtccttgggcccccgcaaggtccccggccgtgcgcgaggcagcatgatgaggcgcaccctggaaaaccggtaacagcccgagcccagctgcccagggccgcc

SEQ ID NO: 40785 - DNA, 2300 bp, Homo sapien
ttgttcattaggacctccaccatttggtaagcaagggaaataaaaggagaacaaatgcaaatcaattcactttgctatttgataaatagcacaaaggttttctacaaaggggcattgaaattattggctaaaataagattttaggattacctgtgaatataaattatctttgaaacattaagtccccagttatcatatataattgagagttacttgtttattacagaagtttcatgacaagaactccacatttttccaaaagtacctccaaatatgattactcttcaaatttgtatggatagcaatgatgagttcaattttttttatactcattctgttttttgaaaattgaaattcccgttttaggttctgaaaagtataaaaaagcaacgcagttctaactgggcaacttctgataagttaacctatgccgtgaaactgaaaataaatacaagtaaaagtgcttattaagtatttaaaggaaaaatatgggcttttagaaagaaaacaatcacaaggacacttctcctgctacccagagcaaaaagtccacacggtgtctcagtattggtttgcttccatgatacaattcatagcattttgttgttgttagtaaaccattggtcaattttccaaaccatggatgcagcaatgatgtcttacccatttattaataatttatccatccacattaccattcccaacatttccatctccagtcattctttaaaacgtacttatgtgccacacaagacattaagttatgcttattttcttccccctgggtactattcccactacccccagtaaacagccaccccttggccaaaagttggcaaataaagtggggaaattcaagacctcaagatgccctaaaggttagcttgaaaagggtaaaataaaacacagaacgcttctctttaatagactcacacagtcttatgaaaatgtacgttttatcaagtttgcatccacctctgcagttaggtagattacaagtgaaagtttccacggttccttcatccactacttcatggctcattcataacaatgacactgtgatctcactccatacctctgcttgtcgataatcctgaagtttggcaaactcatctgcaaagttcatcaggcccagctttaaatgcggggtctctgtagcagcatacgcgttaatttcattcaccaggaggtctgctttgtctctcagcctggcagttttccgcacataggcagcgaagatttggcacagttctccaaaatgcttctccacatttgagacagctgtttgcagttgtttcgtttgagcgttcctagggaaaaggtgacacaaaaggcaaaacattctcgttagagatgagaaggcttcacgttaatttaacatgcaaacattccccgggcattctgcagctttgaaggcgtaaacccatcaacgacccagcgtctcccggcgcggactgctctccatggggtcctgacctcactatccggactgtgtaggcacaggaaaaggcccaggccgggtgggcctggccttaactggggaggtggctgctccggctgctccgcgcagcgcggcctgggcgcccggctgcctcctaggcttccgcactgcccgcggcagtgtggggacccgagacccggtggcgtgggtgggtggcagccggccgggccccgggctcctcttcgccgccggcggtggctgcagcccaaggaattaggccccaggtcacagcggggaccgtgcagcctcccactcagggtcggaattcggcgcagaggccccatggacagaggcttccacttccctcaccccagccctccagtgtgggcggccctgggcagctgggctcgggctgttaccggttttccagggtgcgcctcatcatgctgcctcgcgcacggccggggaccttgcgggggcccaaggacggggattccaaggcgcctgggcgcgcgctggggcgcaagcagccgccgggagcctgaaagcccgcccctcgcgccgccgcggcaggccgggcgtttctatggaaacggggcgcgcgcccccgcggtcaatgcccgaggcagcctgagcgcggctggggctcggaaagcgccaagcaggcagggaccgagaggggtgatggcgcgcccacccctgcagagccgcctgcgcggttgtcccgcgcgtccctgccggcgaaggctgtgagaagcaccgcggggctacggcgcctccatcctctctaacagccgcgcttaccagacagccagcctccagcgctgctaggctactccgagcaggggagaaaagacgc

SEQ ID NO: 40786 - DNA, 2300 bp, Homo sapien
tccgaggacagagtcctctttctgtgcaatacagagtaatggcttctgcaggcaaacaagcaacgttcaattttgcctggcttttgtaatcctctatgcctcagtttcccttatctgtaaaatacgaataataatagtacctacctccaaaagtagttgtaagaataaattgagataatgtatacgtcctggcacataataaattctcaataaatgttaacttttttttttttttttttgagacggagctttgctcttgtcgcccaggctggcgtgctgtggcacggtctcggctcactgcaacctcctcctcccaggttcaagtgattcctctgcctccgcctcctgagtagctgggattataggtgcccgccaccacacccagctaatttttgtaattttagtagagacagggtttcaccatgttggccaggctggtctcgaactcctgcactcaggtgattcgatcacctcggcctcccaaaatgctaggattacatgcgtgagtcaccatgcccggccaataaacgttaacttttaaggtcctgttcctgagactgcaaggccaggaccaaactatggattatcaaggtaaatgatatctagtcaatgagcctacctcctcagagtgacatcctctgcttctgtatagatcaccttgacatttcaaacaagtcacaaatacttataatagtctcacttatttacatatatctgagacatacatatttactgaatgtttcccacaaccctaagaggtaggtactaggagtatccccattttacagatgaagaaactgaggcacagaggggctaaataatttgtccagtgagtaaaagatggctctgattttgtgttaactatctttttatttacttattaaactacctcttctttcttataatcatatcattaaagaatgggtattttgcagtgagaaagggatccacaactcactttttctgtcatctgtaacaatgtttttaaaatgtactttctgcttaatgagctttgaatccatccacaaatacatcaagtagctatacaacgtggtgggaaactttgttatttgcaaatgataaaaccaaacacaaggttgttcaccagctattacgtagcaggcatcacagagtacacctgtaatagtgcttttccattactgaaatttcagtactggctcatctgttctcttgtttcaaaaatccagaagatgggaacaaatttataaagacacttcacaaggttatttatatctataaaaccgactaagcatgcatttattaagcccccaggtgttgggattgtacttggcgaacatctaaggcagtaaaattaccttttctgtggtattctagggtctacaggagcttttttatttttgttttgagatggagtttcactcttttgacctggctggagtgcagcggtgcgatctcggctcactacagcctccatctctcgggttcaagcgattctcctgcctcagcctcccgagtagctgggattacaggcgcccgccaccatgccaggctgacttttttgtatttttagtagagacgggggtttcgctttttgggcgggctggtctcgaactactgacctcaagtgattcgcccgcttcggcctcccaaagtgctgggattacagacgtgagccaccgtgcccggccacaggagctttttagaagatgttttacgccacacagtaatgcaacactgaaaagacaagtcgccttttctctgcttttgcatctctttccttaacttctggaaatctttaaagtttgtccgccgtacttcgacagttgtctaccgaagattctcagcacatctaccggctgagccctgaatgtgtctctgaatttctcccgttgaaagtcgaggtccctgggctgggcagaatctgggcatgcgcagaagctcagccaaccccggggctccgcctcccctcctctagcgaggggaaacgggtgagcggcagcgcgcgtgcgcaagcttggtggtgggttgcgcctgcagagcgcatgggcagataaaccgtacgtccgtttgtccggaccggaggggcagtgggcgccatcttcttctgggctcactgagggtctacctgttttggggaggctgctgcgacgaagagttccctcagcctccggccttgtgtgtccgactcggcagcagtggtgtgtgtttattgccaagtgcgaagcagttcccctcggggcgccgggggtggggagggctgggcgaccaagccggaagaacggggaaaggcgggaccggcggccgcgccagtatctagc

SEQ ID NO: 40787 - DNA, 2300 bp, Homo sapien
acaacacccaaaaccagtgaatcctttccttggaaccaagaccgggacatgactggaacctgaacttggaactctttcaaaagtgttgggtccatttgcctggaggatcaggcctaaaatcggcctctacgtacctttttctaaatggtcaaatttcaagtcctccattctgcctgccaagacacattcctaaattcttcccttggctttccaagcccataagtttaccccagactctaaatcagggaaacagatttgaatgcactcctatctccttgctgaccagttgtgcaaataaagactttttttcctcaaaagcttgtgccacatagtattggcttctgtgcatgcattggatagagagctcatttgcttgataacaaaaacaagctattaatacctattatttctattattatccatacctctagctcccaccatgttaaatattcctataactttcatttctaccttaaaattttctttatccaataagttttcgcttagaagctatctaccacaggtatcttcctttaatatcacaaccgtctacccagccacccaaatcagaaacctggaagttatccttgattctgtttgtttacttcctatgtccaaataataaaattcttataattcttcttcctgaatagctcctttattcatcctcttctgcctctcccttcctccatggctccaatttagactctagatttctaccttagcctcgcaagtggtctctaactctaaacgtttccatatttttgtccaggatttttttttttttttatatagggtctctgacatccaggctggagtgcagtggcacgatcatagcttattgcagcctttgggctcattgacctcctgggcttaagtggttctcccgcctcagccttccaagcaaccgggaccataggcatgtgccacccacccagctaattaaaataaattttatttgtagaggtggagtctcactatgttgcccaggctggtcttgaattcctgggctcagacaatccttccactgtggcctcccaaaatgttaggattagaggtgtgagccacagcaccaggcttagattcctttattcacaaaaggtgtaaaggtgatctcattttatatacatgtcaactaaagaaaaaaatcaggcttttaaagactcaaagttagttttattcggagtcttactgaggaatgcaaccctggagagtctttcaaagagtttatgttatactggtccaaagcagctgttctgcccccagtttctacatcaagggatggagttctgcatgtgctcaaaagttacattaaacgtgctcagaagttacgttggagcaaaatctcatcaaagttttgtttggagactacatctggttatagattacagaggcataatcattaatcctgtcacacgttatcttacgtacaggaagaggcaagagctaggatcgctgactgtatctttttaaaaaatgaagtgattcaagcaacagatgtgaaaacttgtgctctatcctacttattgtcttcagggcattcttctggaggactgcgttcagtcactgagtcaggggctttgtgaaatttcgctggcaacagaatgagcaaacatggtttcttccgtttcgtactttgtctcgcatacatgatttcctatgctcaaacctggcaggaaagtttttttattttttcagtctttgagctatagtaatccttcactgggttttaagtcagtggggttttttgacatcaaattgttaaactacaagtcatgtttcctttaacgtgaaaattacctagtctgaataaattctgatgtaactataactcgacaaattatgatattttcaacttacgatgggtttattgcggggagggggcagccctatcgtaagtagaggaactctatacacgtttgaaaatatcgctgggctccagggttaaccggtctctaacccattctttactggacctgccaacttcgcgcagggttggtaacctagcaaccaagcaacacgagcagtgacttccggtacccggacttgggttgtccaatcagctcagcgaagccgccgcagaggctgatggggggctggaggctgtgaggcttccagcgtcggtaccatggcgacgcgcggtggggctggggtggcaatggcggtttggtccctcttatccgcccgggccgtgaccgcgttccttctgttgttcctccctcgcttcttacaggcccagaccttctctttccctttccagcagccggagaagtgcgacaacaaccagtactttgatatct

SEQ ID NO: 40788 - DNA, 2300 bp, Homo sapien
gataagaggtaagaaaatttttgaggaaaaaaatactgacttaattgttacgatgacttggaaaatgattttctatattttactatgtgagaatagggaaggcatcacttctctttttttttggaggcatggacgggtacgaagggatcacttctctacactttattatggagatacttgttatgcctttaatgcaaataaagtgttttgagaattaatagaataatagttacaattgggttttgttaaatattttctgaatatgtagaagcttatatgtttactatgagttacatctttattttgtttctaaactgttcagtggaaagagacattaatggaacattgttgtctcaagcaacttgtgagctctgtgatggaaatgaaaactcttttatggtagtaaatgctttaggagacaggtaagcagtgtgatgggggctaacttcattaatatcatcttatattagtgtataatttgtacttttaagagtgttttcctatcatatcacttagttttcacaataacccaaggaaggatagaagtagacattaacagatacagaagctgaggcccagagcgtgagacacactagggttcaaattttggtccagtctgttagttgtctgaccttggatagctcactacttcacaatcccttgtctttagaatggtaatgttaccacccacttcataggctgtaatggctcagaaataataagtaataaagtaaatagatacagttcttagtatagtgctacatagtaaccactctgtacagggtagctatttttgtttgttgttacataatttgtatataatctgtaatataattatgtgctaagtactgtactaaagcccttatgtattataatgttacatagaaaaacataaatgtatgctaataatagcccaggtaccctgatttatagtcccattttctgttgcttcctgttccccctttgtgcatgtatttgtgaaacacacacacacacacacacacacccctgcctgcctatatacttccctctaatttaagcacattataccaatttcagcatctttaatttattagaggcctacatcatgacttccctccgggcacagttttttctttagtttccaagtttaatatggaaaatagttgagcagcttttctgagggctacttagtgttggatcatcttttctctaaggctgacctgagttatggcatccaaataccaattttttttgcccaatatttccccaagcctagtgtgttttatgtcatgccccagcccgactcctacctgctctattttgcaagtgatgaatacccatatattcactcatcactgtcctcattggaccagtaccctccctccctctgtctcattcattaatgaaaaatatgaagtatttttctaaaataaacaaagatggtaaatagaatttatttaaaagtgttggctgtaggtttgataggagctagagatacatttctcttcgggttatgctacctttttactttgtggcacataaaataaggaaagtatatttgatataactaattgtaaaaattgggtttcatttatatgagtttgttgctctcttgttagttgagtgacttaattatctttcatactcagaattattcattatgtacattccatgtagttaaaaaatactcttctattattgattagttttacttactttatactttgtaacacagaatggcctaaaactattcaaatcagtgttattttaaatttgtttaacatatttacataattgcttactgaatgaatctactctaatccattgtttagaaagacagcttttctattaggtttagtataatttattaacatttttaaaattatttttgttatattgaacaggtgcgtccgatgtgagccaacatttgttaataccagcaggtcctgtgcatgttcagaacctaacattttagtaaggctaaccaaattgataaagtatatatatttttaattcagttgcttatgccttttcataagcttctattttttccctcatttatttatgaagacagggggattatgtttcagcagcacagggaattttcctctacgtagaatttcagctgcacgttatggagaagttgtgagtatgtttcaatttttttgttctgttgttaaaaaactttctacatttcatccattagtaatttcaggctagaatgagaaacccttttgtgtaaatcattttaaaacagaaaaaaatcaatctaagaaacattagtctaataattcagcagtataatttctaagtacagt

SEQ ID NO: 40789 - DNA, 2300 bp, Homo sapien
tgctcaggctggtctctgggctcaagcaattcttccgccccggcctcccaaagtgctgggattacaggcaggagcccaccaagcctggccaggaaaaagttgataagacaacagagaagtctagtatgtacttcatttctgggtcataaagcagaaactcttaaaattccactcacagcttcagttaagtgggtctctatgtccacaaagtaagggttaagaggcagagatcctctatataaatgaatttaaactgatattctaaggttcaaagattctccattctattaataacttattagtacctaacaatagaatataatgcacttgggggcctgggtctcctacttgctaggagttcttaatctaaaacactgacctggacatgtcgataatatcaagaatagctaacacttatataacactacatgctatgtactttcttagcaagctatatatgtcaactctcttaatacagccctgctattactttttacatttttatcttatatgtgagagaatgaggcatgcagagttgcccatgaccacacagaaagctgcagagctgggaatggaacccagccagcttggctccagctgcactcttaatcactaggctacaccatcctatgcatctatgaagaagaaaccagatacttaaattaaatgacaggaagagtagtggagaatatttgcaatttatgggaagcccatttgagaagcaaaaaggagaggatgaagggaggcagatggacctgtaaaaactgggatgaaggccagacagactagccacaaaagttccatgggtaacctggggatgggcaaaaacagtctcctctagtttatttagagaacagagaatacagcaacttgaaagatccaggagttataaaggaccagtttgggtatataacgttttttattacataaaaagaaattcactccacatcattttgtgaacctgactggctagtaagaagttatgtgtaataaatcaaagtcaacttattggtgaacactagggaagataagtgcaatgctctatctgccactgccaaggaagctttcagaagccactatcccataaaagggatgtatggatgtaagtcactgaagagccctcgaagatatcttgttttaccacagacaataccaatgccaccttaagtctaatctcatctgaggtggaaacaatctcatggaacagaaatgggacttagagcagggaatgacttggatgaaagttttctgactccaagtccagtgttctctccttgtaaccattcagggcaacggaaacaatactgatttcaaaactcctcagagaacgtgagcacacatctacgctacagagataattccctcatcacaactccctcttgctgctgtctacacctgcttcctctccctggggcgatagaaaacatgatgggcgttaatgctcctaaaatctgcaacgtatcaaacgaacgaagcaacagctactctcgaggttctttgctacgccttgtaccgcaggctggggtgagccgcagggagttgaggttcccgtgaggctgggagccgctcccgcagcctaccctgggaagcccgcacccaaccgcgaggcgcaggggaggcttggccgctgggccggccacccacaccaccgcatccccgcagaggtgccagagattctaggaagcctgcacgacaggggagcagcccgttcctcgggccccatgcacgcgaagacattggagccggcccaggcgcctcccctctcccgaccccgcagcctgctcagccaacaccgccgagctccacagaccaccgctccctagcgccgcgcagccacaccttccactcgctgggggcgggggggggggggtcacgtgaggcgggcccggggaaccaatgggcggctcgcgccgaatggaagggattgtctgacccccgtgacgtcacaaagctggcggggagcgcgctcctcttccgcccccgccccacccccggccgcagccctctccgcctcccctcccactcgtcactgcgcagccaatcggcaggcgggaagcactccggcccgaacgtgcgggcggggcagggtggcggccccgcacggtaggggagcagagtgggcaggccgggggtgagggctcgcgctccgggagctgcacggggctgcgtggaaagagcgccgagcggtggcgtcgttgtcgccccctcctcgtcgggaagaatcgtttggtctcctgccgtgcccggttcgtattccctactccctgccacgagccgccccgtccgggatcctccacccg

SEQ ID NO: 40790 - DNA, 2300 bp, Homo sapien
ccacacatgtacaatcatgtgatctttgacaaaccggagaaaaacaagcaatggggaaaggattccctatttaataaatggtgctgggaaaactggctaggcatatgtagaaagctgaaactggatccattccttacaccttacacaaaaattaattcaagatggattaaagacttaaatgttagacctaaaaccataaaatccctagaagaaaaccgaggcaataccattcagaagacaggcgtgggcaaggacttcatgactaaaacaccaaaagcaatggcaacaaaagacaaacttgacaaatgggatctaattaaactaaagagcttctgcacagcaaaagaaactaccatcagagtgaacaggcaacatacagaatggaagaacatttctgcaatctacccatctgacaaagggctaatatccagaatctacaaagaactcaaacaaatttacaagaaaaaaacgaccccatcaaaaagtgggcaacagatatgaacagacacttctcaaaagacatttatgcagctaacagacacatcaacatgatcatcactggtcatcagagaaatgcaaatcaaaaccacaatgagataccatctcacaccagttagaagggtgatcattaaaaagtcaggaaacaacagttgcaggagaggatgtggagaaataggaacacttttacactgttggtgggagtgtaaattagttcaaccattgtggaagacagtgtggtgattcctcaaggatacagaacctgaaagaccatttgacccagcaattccattactgggtatatacccaaaggattataaaccatgctactataaagacacgtgcacacgtatgtttattgtggcactattcacaagagcaaagacttggaaccaaccaaaatgtccatcaatgatagactggattaagaaaatgtggcacatatacaccatggaatattatgcagccataaaaaaggatgagtccatgtcctttgcagggacatggatgaagctggaaaccatcattctcagcaaactatcacaaggacataacaccaaacactgcatgttctcactcataggtgggaattgaacaatgagaacacttggtcacagggcggggaacatcacacaccagagcctgtcagggggtgggggtctgggggaggatagcattaggagaaatacctaatgtaaatgacgagttgatgagtacagcaaatcaacatgacacatgtatacctacgtatcaaacctgcacattaagttctagggtacatgtgcacaaagtattaaaaaaaaccacacagggtcaaacctaaaagatgacccatgataaaaaaaaaaatggctttgaactatagtgctgaagtgctatctagaattcctaagcacaggaaggctgtgatgtgtgccttacagggaaaaattgtggtttgggacacaaattaaaagtaatgtccaaaactgcaattattttccaccaacctaaatatgtgtgtttgataagctttgttcaggaagttctagtgctgttagatgtgagttaaatgttagaatgaacaatatatgttaaataagatatctttgaacagcaacacacaaaaagcaaggttatgtattgatcagttggggaaaatatgactagaagctcacagaaacctaaccctgtctttcctctaggagcaatggttcagcattcattaattcagtgtttggggcaactttatagagcataagtgctacaaatgataattgactatatttagtataaatttctacagagaaatcatgaattaagaacttaaaggatgctttagccctttcttaccttatgggaagatacatgtggaatgatgtggatgatactttgggcagtttaactcatatctagccatgttccagtcaaccttagtatgtgatacaaaatgagctttattcctgctaatccagggtctgaagttgtattttcatttttttttcctgtcctggcaggtactcatgcccgactgtctaccaggcacacagagtttgaggagagggagtatgtcgtcttgatccgcatcaatgatgggggtcggccacccttggaaggcattgtttctttaccaggtagatattctgctataggcaactcaggctagtatctgtcaccatgggccgtttgaggagattcttgtctttgatatgggattctgcaactattcacttgagaatttatcctaccaaatactgtcctgcttttcagttacattctgcagttgtgtggaaggaagttgtttccggccagcaggtcaccag

SEQ ID NO: 40791 - DNA, 2300 bp, Homo sapien
taatatttatcaattacattttccttattcctattattagcaagtctattgaaccagcaatgtctcacttttcatgaaaatgagttcctaaaatgcagtggtggctacctgaaacgtgcacattcttaacatttggatttaatctggaaggatgtctaaaccatgtaaggaatatatgaacagctctcagaatcttgttaacctggtatcccacagtacagaaatagcttctgtaattcagaaatgcaataatcacctgttaatttctctgatgggtggtttaggcattttcagtgtttaattaacctaattctttgagctggaagctgggggctagagatagcaagtgatgtacagaggaaccccatttcggaacttggccatcttccaacaggaatgggctcatgcagggatttctgcccttggacttttttttttttttttttttttttttttactcgcataaagctggaaggaaaaaaatctggcagagtctatagctgtagtgaataggatgggatttgaatcagaacagggttgcagtcccgattctgtagtcaaaggctgtgtgacttagacaagaaataaaacctctctgtgtccccattttctgtctataaactggaatctactttgcagacatgctaaatgagaaaacagaattttaattgatataccaacatgtcacgatcattgttattgttgctgaaaaacaatgactataaatgatacatatgcactttatttttgaaaaaaaaaaactcataaatttaaaagcactttattattttaaaattttcaaagaagacccaaacttctttatgaacaatgctgtgtgatgagatgcttgcccttgattccaggaactgaaacatgtggcaagtggaagcgatttgattttgtagaacaagcacactttattcagctaatgggagggcagaggtgtgaagaatgtgagaagtgcttagcctcaataacctcattcttctaaatgagtgatgctggctgtgggacaaagcaagaagggcctttgctgaacccaccagtccaccaaggatgttaacagctggcatgcaactagatggtttcacttgcagggtcctcaggataaatgaggtctattcccacagtggcttagagcactcatgaaaccttctcatgaaatctggaaaggagggagcccttctagagagtgggctgggctctcttgctttccctctgtcagatgcacacctggagaggaatggaaaacacaacctcagctcaggagaagccaagaaatgaacatgagaaggtccacagaaacagggccaagtgtaacacaccagacacagacatgacattgatgctcaccttcagtgtggattcccagagtgaccaaagtgtggaaatcaggaattggtctaaaagaagccttgacttgagaaatctgggggcattggcttttattggttaatcaaaaacctcattttgattggggaaaaataagttgttcctaggtaaatccattccctgaattgtgggggggaaaaaaggacttggtttgtgtttgggggaaatttgctatcggttgtttcttgcagactttggaagggacccttggatttcaaaagcaggcacagccatattgtgtctttcctcatgtcttctgagtcatttatgatatctcatgtggctggttatcaatgaactgtgtcattgctcagacatggcgcccctgctccgtcttttgtgtttgagatggaatctacataaatatttgctgatcaagtctcctgtgctaagtgttgggggtacaaaatatggaaagtctttgatgtcatgaacctcacactctagagatagttggatacacaaaaacttttccactctaacttcttgtcttttcattgactcatctacattgaaaaatgtagcaacctgttttgagatggattagatgtaagttaaacttcttttgatacaaagtcatttctttcctggagtaaaagtaatgacactttttatgatacccagtggctctcgaagagcaataaaaaatgttaatggttaatgtttgactgaagctgaagggagaggctgggaggcaaagcagggaagagggagtgttcccgggggagatactccagtcgtagcaagagtctcgaccactgaatggaagaaaaggacttttaaccaccattttgtgacttacagaaaggtaagggctgacatgtcttaactgtgtcagtaacgtatttattccagaaggacaaagtagatggagggggagggcacttaaaaagttgcttgacaaattt

SEQ ID NO: 40792 - DNA, 2300 bp, Homo sapien
gctcactgcaacctctgcctcccaggttcaagcgattctcccgcctcagcctcctgagtagctgggattacaggcatccaccaccatgcccggctatttttttgtatttttagtagagacagggtttcattacgttggccaggctggtcttgaactcctgacctcgtgatccacccacctcagcctcccaaagtgctaggattacaggcgtgagccactgtgcctggccagaattaggtttttataaatgtgaagtattagattcttatcaatcggcaaaagtagaactgaggaactatatcatatgcttataaactgatttcttcttagtttttactcctatgatgtttctgttgagaccagttgacagagtaggagtgtcagtatggaaaaagcatggatcattttgaaacatggattattcatcaattacatgtgttttagaatggagtcagtgatatactcttggagatgatctcccccaccccccatctcctctccttttcctttccccacatctgtagccacttcctgtcagcgaaacccagaagaaaaacttgacagaagcaaagggcatccagagaattatgatccccaggttgtagttccagttctgtcatgtcctaagcggtcatctcctctctgggtctcaggtttcttatgtataagataagtaggagattggggccacaacacctgagactaaaggaattctaagttttcattactctatggattccacctttgctagcttgggacctggcaggtctcagcagctggtcatgtagctaattctcaaagcagataaatgcctgcaggataactgtgaattgactctaatcacagcagagtccagctgcttcaatagatgctggtgcctttggctgcttcccggagccaccagccaacccagagttgaagctggctggaaaagcagatatgttggagaggccagcatcatctctaaacacagcatctgggaaatacccatgtccccagaaagaggtcattgaaatccttcacttggtggtgcagtgcagagactcaggaaaaccaggctttgagtcctgaccctgccacttataccagcggtgtgaccttgggcaaattctctggccctatgttatcttcctcctccatacaatgagggtagaaatagagccaccttgcagaagtatagtaaggattaaggtcccaggaggcctaacagtacctactaagcagaggtcctcagaggtacttaataaatggtagtagtagttattatcctgtgccctttgttcacaggagtctcttacaggggtgttggtctcagtgctcctccccatggccaggctgtattggctcatgcccaaggcgtagccttgccagggagcctggtacagagatgctgctgattgggatgctgattaaattccctgattgaggagcctcagcattctggcccagagcaggagggccagcaatatttagcacaatctgcttggatcctcaattaaattgtttttccaaactgcccttttcaaggtcttgtcctctttcctcacctctttctggccccttctctctgggtccttgccagagaagggaaacaaagccttgtggggctccatctgcttccccctatccagaagaaggtgacaaggctgtcttcgttgcagaagatgtggttaaaacaagccttggctattcaaggtggctgcagtctcatcctggaggctaaagtctctgcgcattccaggttgatctctgttttcttggcaaaactgagttctcaactcaaacctgcctctcccttccatcctttatcccgacagctcgcaagtgctttgctgggaaggacgattaagtgtcacttagtgtatttttccattttcctgtgttcatctggtaaaaagaaaataaaacaaaataaaggaggcccaggattgaactgtcattattttttaaatggagagagaaggggtcacatgactgcgagtaactgatttagccaagtggctgcaactccgagtttgctgcagagccgccccctcccggcgggggcgctgacgtcacggaaaagccccgcggcgggtcggctgggctggttataaaccgcccggccgcggcggctgcaggcggcgggcaaggacggcgggcacagcgcagcactccccgctcgttggcccgggtatcccagcgcggacccacgcgatacgctgacgccccgacgccgatccggccgagccaagtaagggggacggcccgagacggagaagggagagagtgggagtttcccagcccgcagaactttcgaa

SEQ ID NO: 40793 - DNA, 2300 bp, Homo sapien
tccttccacctcaggttcccgaatagctggaactacaggcatatgccaccacacctggctaatttttgtattttttgtagacatggggtttctccatgttgcccggtctggtcttgaactcatgtgctcaagtaatccttggcctctcaaaactgttggattacaggcccatgtgccactgagcctggcctcactcttggcattttaagtcttaaaaaattttgctaatctaggaatgaaaatcatttttagtatacatttccctgataactagtgagattgaacattttttcatattttagtagtgtttcattcttaacataatacctgtatttcttctgaaaataacaaaataattatctaaagtatataccctgtgttctgtaatacctgtatttcttctgaaaataacaaaataattatctaaataaagtatataccctatgttctttctttggttctcttttaatgttccaaaagctcagaaaatgctagaatgattttgagtacctgtggtccagttgttgttggggcaggtcgattttctttttgcatctctatggacaagaatcatttgcattactgatttctacaatttacagagctgtgaaactgctcaaagacaatgaaagggtagaactattatggaatcaaattactcagtagcgtataccagacaacatctagcattccgtagaacatccagcaatctttcactgttttctgaaagataatacacttaaagcttttaacacattggctcacagtgagagctcagtaaatgtaatttgcttctccattgttaaaagaatgaaaaacaagataattgagaatttatagcatttctgtggaactacagttccctggataggtgctgtatctagattcatttttgatttcattgggtcttgcacagtgcctgggagcatttatatacgtggtcagtaattaaaaacaatttatttttcctacctcttaataactatcacagttgttcagtaatagttttattggatagaactatgttcaagtatgttctaatttattcccctatctggaaaaatatgtatattgtgagaaaataggtttgtcttgcttacattattatgtatcatatattttcatactggggttaacaaatatattctaagcaccgaaactggtggccttgaaaatggctagactagctgtttcctttcatagtccaaactgtgtgaatatagctaaataaaaaatctggctctattataatagcaaatgtgattttgtatgtggagtcttaaggcgtgattatactgtttctcaccatgaacagtgattttttacacatgataaggcaggctagcaaattcacatacattacggctagaataatccattgctttaaaaacatgatttttacctgctttttagattgagtgttctataaaaattttttcttaagtgaaaaaaatatgcagaggctaatgtagactgtaaaatgaaggagaagcttagctttactgtggagtctgggtctgggtgtaacctaactagctagaggatatgcaattcctgattgacagcagatccagcattatgcagattttgtaagggagaacactcagctcagaaacagtgatgagaggctctgttaggaattactacattcactactcatatcttttagttttctgtctactggatttgtaaataaatagcacaaaacagttcctcttttgtttttattaaagtgatactgcaatgcagttcagtctgtcagctaggcatacatgtgtgaaatttgatattctcactaaattagctaatttttagctgtgttccatgcttatctctagacctttgtgtattaaatcctgtctcgagctgttccctttatacacaagtgtgttttgcttgtgccttcctgtcttcttcagtgagaagctttatgtaggtcaggcttggcttaagcagatttcctgaacctgcgtcagcttaagctggaggaattttaataaaccctcccctgtaggcgtgggcctaaatgaggctagcctagttaagcctgatctttttctgtttgtgaaaagagctgagcagagctgaaggctgcatggtggtttcagaaactgcctacttaatttgaaaagaacaatggtaggaaaggctagatcttccaattttaccttatccgaaaagcttgatttgctaaagcttgtgaagccatatgtgaaaattctcgaagaacacactaataaacattcagtaatagtagaaaagaatagatgttgggatatcatagcagttaactataatgc

SEQ ID NO: 40794 - DNA, 2300 bp, Homo sapien
aaaaaggcaacatgtttgatatttgtatgtgaattgtatttccttgcattttgaaatttttatttaaattgctttaaagaagatatcatgcttatagtattatcaaaattgacatatacttaaatttacaccatttgtattagtctgttctcacactgctaataaagagatactcaagactgggtaatttattaggaaagaggtttattggactcacagttccacatggctggggaggcctcacatttatgccggaaggcaaaggagaagcaagccacgtcttacatgggagcaggcaagagagtttgtgcaggggaactcccatgtataaaaccatcggatctcgtgagacttagtcactaccacgagaataggccctgcccttgacatggggattattacaattcaaggtgagattgggtggggtcacagccaaactgtatcaccgttcagtttaaatcttaaattcttttcaatagcccttgatgaaaaataaaatcttactagctattgaacttattttctttttctttttttttattaaaaaaaaaaaaacaagagatgggctctcttgggctcaagtgatcctcccactttggcctcccaaagtgctgggattacagatgtgggccactttgcccagcctgaacctgttttctcaggcttattctcatatgttttgtttttgttttttcagttgaagtcttgctgctatgttgcccagactggttttgaactcctgacctcaagggatccccctcacctcagcctcctgagtagctgagactacaggcatgcaccaccaagctcctcttatctttttttttttgagacagagtctcgctgtcgcccaagctggagtgcagtggcgtgatctgagctcactgcaagctccgcctcccgggttcacgccattctcctgcctcagcttccagagtagctgggaccacaggcgcccgccaccactcctggctaatttttggtatttttttttagtagagatgtggtttcactgggttagccaggatggtctcgatctcctgacctcgtgatccgcccgcctcggcctcctgaagtgctgggattacaggcatgagccaccgtgctcggcctttttttttttcttaattttaatttttaatagagacgaagctcctaggttcaagggatcctccggcctcatcctttcaaagtacagggattacaggcatgaaccaccacgccggccccttttacctttttacatatgtcatggttgtattaccaaaccaaacttgagacggcctgcctggcacagcaaagctctccacagacattgggatttgcagcaagagaaagtgaggcgtttattgcagggtgccaagcgaggaaaaatgggtagctaatggttaagacccaaactctgtgatggctttcatgtaactatttttaaagatggggaggcagaggttacaggcaaagtcataaatcaatgcatcattgatttggcctaaaaaggtgagacatcttgaagtgggggcttgcgagtcatagatgtattaaaagattctctgatttgggattggttaaggaagtgaagctctgtctaaaaacttggggtcagcagaaaggaatgttgagctctggcttgtgggtatgacttcctccaggcctctgaagaagaaattcagaacaaagaataatagcagttagagttcagtcctgtttcccctaatctgaggtctgtgtgccagtagacagtattttccatttggtggtggtctggatttctgaaaaacaactcaaggacatatgttaagatgttacctttagtttctagagggaaccaaacattttgtcaatctaacttccctcaccattattttaagctattaccttcttgctaatcatattgctcatgtacttttcagggctagctaagtgcctggaatttcctttgaaggaactgaagattttccttttgtttctatgcttggggggccaggcaggcccataagaggggtttctgttccatcttagttgtagttttgagctatttttatatttgggggtgattgtaattagattcgtggatagttaactgttttgggtatttttcaggtcacgactgctgaatatgagacgatctgcagcaccaagtcagttgcaggggaattccttcaaaaaaccaaaatttatacctccaggaagaagtaatccaggtctgaatgaagagattacaaaactgaatccagatataaaattatttgaggtaaggcaaaaaaagactcatgatatagataatatagagaagcatgtat

SEQ ID NO: 40795 - DNA, 2300 bp, Homo sapien
tccagctttctttcttttcttttcttttcttaagagacagtgtctcactatgttgcccaggctggtcttgtctcaagctcctggcctcaagtgatcctcctgccttggcctccaaataaatatcaacaaatatttattgagtgcggtctgtaagactagtacagttctggctgggtgctgtagctcatgcctttaatcccagcactttgggaggccgaggtgggcagatcacgaggtcaggagttcgaggccagcctggccaatatggtgaaaccctgtctctaccaaaaatacaaaaaattagccaggcttggtggcggcgcatgcctgtagtcccagctgcttgggaggctgaggcagaagaattgctttaacccaggaggcagaggttgcagtgagccaagatcatgccactgcactccagttgggtgacagagaaagactccgtctcaaaaaacaaaacaaaacaaaaaagactagtactattctaaacacatgggtacagcagagaataaagcaaagatcctgccctcatgtagcttatattctgagagtaatagaaaaacaattaacaaataagtatatgttagggaatggaaagtgtgatgaactctataaagcagggtaagggagatacaagatgagacaagagagcaatgcactgtcagataaagccctttgacaagttgatatgtgagtaatgatctgaagtgaaggatcaaaccagatgcaaatctgcaagaggaatgtcccaggtcacctttagccaatctgttttagattttctgaactccccagatgatattaaggtaggctgcagacactatgaagctagcttgttttctggttacccttactctttatgtgtcccagtccaaagaagaggggggtgcggtttactaaggtgcccaaccttggcaggtccccatttcaaattcttgtaacgctggctccaggagctgccaaaagcacaactcaacctatgaggtgctctttatgactggaaaaagtccccaggataaaagctccttaagcacattactctttttttttgaaacagggtctctctgctgcccaggctggagtgctgcggcaccatctcggttcattgcagccttcacctcccaggttcaagcgattctcccgccttagtctgctgagtagctgggattacaggcgcgctccaccaaaaccagctaatttttgtatttttagtacagaccgggtttcaccatgttggccaggctggtctcgaactcctgacctcaagtgatccgcccgcctcggcctcccaaagtactgggattacaggcacaagccaccgctctcagcctcaaattactcttttaaatggctgtacctatttacactcctaccagcagcccaagagttcccattgtttcacatcttcatttcacccttgatattttttagcttttactttttgtcaaactgctggataaaactcaataaacaacctttagccattctctctcctttcagattagcctttctaataccatttttcagggatagttgactgtgttaccgcctagcacttagaaggtgctcagtaaatactcattgaatgatgtaactttcctacttaacatgctttaatgcttttccaagtccggaggcggctccccttttctgagagcctaataatcacgtattcgtttctatattcccagaacctaacaaagagtttgaaaattatcctgcaggcaccgctaagtcaatgttttttcggatgaatgaataaccaataggatatcgtatacttctgcgatgcacgcatttctattatcgcacacaccgaatcataccgtatttattacttatccacgcagatggtgaggtctgtagcctcggcatctacactgtgtctgaaagtaggcactaaaccagtatttttttaattgaaccgtaaacttgaatcaaacttggaagcatttaaagccaaacgcaaagatacatgcgcagtgatgcagtagggtcgtccaatcagagtagggcaggacagggcagtgcagcggctaggtagtgcgcacgcgcggcgggctcgtccgcgattggcttcgccgaggcgggatccttgagcttctccggcggcgaggggatagctggttaccagaaggacttctttgcagggccagtggtttctgtcagattttcgccggtgcgtcctgcagggggaagctcgggaggctgcgacagcctgtaggctcgtgcgggacaaagcagggagtggcgccggagcaggccaacgagggaggagggagggaaggcggcaggag

SEQ ID NO: 40796 - DNA, 2300 bp, Homo sapien
acttttttttttttttttttttggtctagactctactatgagctaagagatagtaacgttttttgaatgttatttcttccaaggtttttttgttttgttttgttttgttttgagatggagtcttgctctgtcgcccaggctggagtgcagtggctcaatctcagctcactgcaacttccatcttccagattcaagcaattccctgcctcagcctcccaagtagctgggattacaggcacgtgctaccacgcttggctaatttttgtatttttagtagagacaaggttccacaatgttggccaggctgttttcaaactcccaacctcaggtgatccacccgccatggcctcccaaagtgctgtgattacaggcatgagccaccacacccagccccaagtttttaaacaattgataatgctgttctgtgaaagctaagaaaactgaaacataactatttgttacctagaaacatagcataggcaggtgctaaggacataggcaattgtatttgtttttcctctaacctgtgccccacctggctacaatactagactctgttggtatctgcatttaaaaaaatgtatgccatgtaggccagaaacattccttgctgcttcctcacttttgaatgaagtttagtactcaaagcgctttttatttttattttttttgagacagggtttcactgtgtcacccaggctggagtgcaatggcacaatcacagtttactctagtcttgacctcccaggctaaaatgatccttccacctcagcctcctgagtagctgggactataggcacgcaccgtcatgcctggctgattttttaatattttgtagaggcagggtctcactatgttgcccaggttggtctctaactcctgggctcaagcaatccttccacctcaacctctcagagtgctggaattataggtgtgagccactgcactcagcctccacaggactttttaaatatagtcattgcttcatttttggcagagaagatgtatgaaaagagtatatagaaagtagccattgtaaactcttaatacagggagtttcatacatttctttatgttatctttgttctagttgattcttttcagtgaatttgtgcattacagttctttttatttacataatattgtatatagtacaacatatgccagagatcaaataatcttgataaattcatttaactctagggccttgttcatgttttaaatttacttaataaatataaaatattgtatgttcttaacttgaagctcatattttcaagtaattccttgtctggaattttctgttgatctcatgggtactaagaaacgaaatattctgttcattttcatttttaaagaatatcgataacttgatgaccccagaaggagttggccttaccactgccttacgtgttctctgtaatgttgcatgcccaccacctcctgttgaaggtaatgtggctactgtattttaaaaactacgattcttaagcctagaataaatatcatttattaaatatttagttaattattaaacatcatttatttaataatgaaaaatatcattttaaattaaagtaattaaatatttgtcataataaaaatcatttattataaatataattatcataaatattaaatattcactttaataattcttaatcagttattaacatataagtaattagttttgtttctttttcttatcctatataaaggtcaacagaaagatctgaaatggaatcttgccgttattcagcttttttctgctgaaggaatggacacgtttattcgagttctgcaaaaattgaacagtattctgactcagccttggaggctccatgtcaacatggggactacccttcacagagttactactatttcaatggctcgctgcacactcactcttcttaaaactatgttaacggaactcctgagaggtggatcctttgagtttaaggacatgcgtgttccttcagcgcttgttactttacatatgctcctgtgctctatccccctctcaggtcgtttggatagtgatgaacagaaaattcagaatgatatcattgatattttactgacttttacacaaggagttaatgaaaaactcacaatctcagaagagactctggccaataatacttggtctttaatgttaaaagaagttctttcttcaatcttgaaggttcctgaaggatttttttctggactcatactcctttcagagctgctgcctcttccattgcccatgcaaacaactcaggtatcacttccatataacatgcatcttataaatgact

SEQ ID NO: 40797 - DNA, 2300 bp, Homo sapien
gttcttttttctttaaaatctggttaagtttcatttttaaaaagttgaggaatgagatcatgtcctttgcagggacatagatgaagctggaagccattatcctcagcaaactaatgcaggaacagaaaaccaaatactgcatgttctcacttacaagtgggagctgaacggtgagaacacatggacacagagagggcagcaacacacactggggcctgttgaaggagaacagagggttgggggagagcatcaggaaaaatagctaatacatgtgggcttcatacctaggtgatgggttgataggtgcagcaaaccaccatggcacacgtttacctatgtaacaagcctgcacattctgcacatgtactccagaactaaaaaatttaaaaaaaaaaaagagataaaaaagtagattttggaaaagagtttagggagaatgaggcaaaaggatcacttgagtccagagaattgcttaagaccaggagtttgagtccagcctgggcaacatagctagatttcgtctcataaaagagtgctatgtgtggtaatactaactgcttaaatgttaaaaattgacaatttgaaagctttttccctagagatactaattcagtctactgtagtaaatctgagtatactatatttttctatagtacagtcatccctcactgtctgcaaaattggttctcagacctcccttggattccaaaatccaaggatgctccagtctctgatataaaatataaaatgatgtagtatttgcatataacctatgcatatcctcttgtatacttgaagtcatgtctagattacttataatacatagtacaatataaatgctctgtaaatagttgttatactattattgtgtagggaatgatgtaagaaaaaagtctgtacatggtcagtacagatacattcttttctgtcttttttttttgagacagagtcttgctctttcacctagcccaggctggagtgcggtggcatgatcttggctttctgcagcctcaacctcctgggcttaagcgatcctcccacctcagcctcccaagtagctgggactacaggcatgggccaccatggccagctaattaaaaaatttttttagagacagggtctcactatattgctcaaggctggtgtgaaattactgcgctcaagtgatcctccagcctcagcctcccagagtgctgggattacaggtgtgagccaccacagccagcccaggcttttttttttttttttttttttgatgcagggtctcactcaggttggagtgcagtggagcaatcatggctcaccgcagcattgacctccctgggctcagcctcttcagtagctgagactacagacatgcgccaccacgcctggctaatttttgtattttttgtagagacaggtttttgccatgttgcccaggctggtcttgagctcctggcctaaagtgatctgcctgcctcggcctcccaaagtgcttgggattgtaagtgtgaccaactgcacctggcatcagatgcacttttaaaaaatattttcgatttgcagttggcttaatccacaaatgcagatgcggagtgctgactgtatatactatatttttcctagatacatgaatttaaatataccaatatgccatgaataaagtaggaccatggtgaaaaaggagcatttgataagtgtcctggaaagaaggcccaaaatttaaagaaaagcttgtcaataattatttatttaacatctgttgagtgctaactaggacaaagcctcacagaacattcactcttatttggcctcatctagagaagacttgccactcacattatgttttcagttaaagcagtatattactgaggataaggattatggtcattaaaaatttttatcagtgtcttgtctgaatattgagtaaatgaagaatgctttgcactgacttgacatgtatcaattaactcttccacagatatcttcacagtcatcacttcttggagttggttaccttgcttctgtcaattccagtaacaagtgctcaccctggtgtgctgcaagccacaaaagatgttttgaagtttcttgcacagtcacagaagggtcttcttttttttatgtcggaatatgaagcaacaaatttattgatccgagctctgtgtcacttttatgatcaagatgaggaggaaggtctccaatctgatggtgttattgatgatgcatttgccttgtggctacaggactcaacacagacattgcaatgtattacagaactgttcagccattttcagcgttgtacagccagtgaagaa

SEQ ID NO: 40798 - DNA, 2300 bp, Homo sapien
gaaatggcatttaatgttaaagcatttatgcagaataacagataatctgccttggcttttttctacagatagtaaaaatgaatgtcatttcagaatcataggggctcttttaaaaaatatcaaatagctagattatcatgtgatttttttttaactttccccattcacagattatcaaataattatttctagatttattgtatttggcaaaagtagttaaatgttaggcaggcagttttctttttttctttctttttttttttttttttttgagacaaagtctcattccatgacccagactggagcgcagtggtgcgatcttgtttcactgcaaccttcacctccagggttcaagtgatttgtccctcagccatctgagtagctgggcttacaggcacgcacccctacgctcaggtaatttttgtatttttagtagagatcagggtttcaccatgttggccaggctggtctcggactcctgacctcaagtgatctgcccggcttggcctcccaaagtgctgggattacaggcatgagccactgtgcacagccatattttaaatggacacattttctatcaaaatataatggagacctacaaaactgtgtgataggtaaatgcagagaaataaaaattctggaatgtgaaattgttataaaacgaatctacaatggttttgctgaaagtatttggtttaacctgatgatattagttcttacttaacttaaaacaaccagttttttttggtcttaaaaataatctctcaagaggacaagcataatttctttcctcctgagatagatatttttgttactttgaggcatttctaattatatttctgtgaggaaaagatatctgttacagttagttgtaaaactgaacagatacagaggaatttgcttaaaatgtttgtccagttttcaggtctcacccctttcaggaaaaaaagaagtttgtccataattctattagaaattataaaatgttgtaaaattgtgggtaagatgttggggcagaagttggttttgttgaggaaatcatttttaatgttttattaaaactatttcttgttcaatcagaatttatgtattagacaaagatgatgtaatacttaaatattattcatactaattttcaggggatgatggttatgaacaaatttccagtgatgaagatggaattgctgacttggaacgtgaaacatttaagtatccaaactttgatgttgaatacactgctgaagacttagcttcagttcctcctatgacatatgatccatatgacagggagcttgtaccactcttatacttcagttgtccatacaagactacttttgaaattgaaatcagtagaatgaaggatcaaggtccagataaagaaaattcaggggcaatcgaagcctcagtgaagttaacagaactcttagatttgtatagagaagatagaggtgcaaaatgggtaacagctttagaagaaattccaagtttaataataaaagggttaagctatttgcaattgaaaaacacaaaacaagactcccttggccagttggtagactggaccatgcaagctttaaatttacaagtagcgcttcgccaacctatcgccttaaatgttcgacagctcaaagctgggaccaaattagtgtcctcactagcagaatgtggggctcaaggagttacaggactgctacaagcaggagtgatcagtggattatttgaacttctgtttgctgatcacgtatcatcttctcttaagttaaatgcttttaaagctttggacagtgtcattagtatgacagaaggaatggaagcttttttaagaggtaggcagaatgaaaaaagtggttatcaaaagcttctggaactcatacttttagatcagactgtgagggttgttactgctggttcagctattctccaaaaatgccatttctatgaagtcttgtcagagattaaaagacttggtgaccatttagcagagaagacttcatctcttcctaaccacagtgaacctgatcacgacacagatgctggacttgagagaacaaacccagaatatgaaaatgaggtggaagcttctatggatatggatcttttggaatcctcaaatataagtgaaggggaaatagaaaggcttattaacctcctagaagaagtttttcatttaatggaaactgcccctcatacaatgatccaacaacctgttaagtctttcccaacgatggcacgaattactggacctccagagagggatgatccataccctgttctctttaggtaagacatgtttgcctttt

SEQ ID NO: 40799 - DNA, 2300 bp, Homo sapien
atcaccactaaagaacttttccatgcaaccaaacatcacctgttccctcaaaactgttgaaataaaaataaaaatgtaaaaaaaaaaaggatatcaatgctaagaaaatcagactgtaaaaatgacaactataaaagcactatatagtacattggttaagggagagcttaggggaaaatttatataaatacatatagtaataaataagaaatatgaataaaaataaacatcagtggtagaaattagagaacagcatataagcctaaacacagaagaagggggggggcacggtggctcacgcctataatcacagcactttgggaggctgaggcaggaggattgcttgaagccaagagtttgagaccaggctgggcaacgaagcaagaccctgtttctaaaaaaaaaaagaggcaagaatcagaaaacagaaaaatattaaaagcaataaatatcaatgcaagaacaaataataaaagataaactatagctagctaatagaggaaactggatggctgaggaaggatgtggagaggagatttactttagaaattcatttattattaaatatttcagacataccagaaggtacaaacaataatataaggcatgcttgtgaaattaacattaacctaaataacaaaacattaccaaggcatgtgaagcctttctgttcttctccattacatctccttccagtttaccactatcttgaaattttagttactccaatacatgactttataatttcatgacatatgtacactcctaaaattttatattcttttgcacgtttttaaatatatagatgttattttacactatatattttttatttccttttctaagagatgggtgtccccactggcctccaactcctgggcttaagagattctcctgtctcagcttcccgagaagttgggaccacaggaacacgccaccgcacccggcttgcgatgagaggagttaaacttgttttgttttggtttgtgtcttttttttttctttttgtgaataacggggtctcgctatattgcccaggcagttctccaactcctgggctcaagcgatcctcccgcttcatcctccctaagtgctggattacaggcgtgagccaaagcgcccaccaaccctgttttttgggtttttcatgctagtaaacatagcactggttcattcttcgtacctgctatatactattatataaatacgccactatttacttattacttctgtcaatggcacttatgtttcctgctcttttgcaacttataaagtttgctatgaatattcttgtatttgtagatacgtgggcgagaattttcctagaagagtggtaggcacgtgtaattttacaagctatttcctagttgctctgctaagggtttgtgccatttagactaccaaacccgctgagtttatctcgttgctccaaagctcatcaacacccgacagagaggcttacttttcattctgcctcctgttttattgttcatggtacttcacgttacacaattcctcgaattttatttcaattactcctcacaatcaccctgtaggttaggtacgatttttcacattttacagataagaaaacaaagaatctcttcgttggttgaaacaacagtttttcttctatttaaatcaatgtcttacttttcaacctcgctcactgttatctttttgctcccagcgctggaaaaagtgggacatccccttcggtgggtgtacggggttggtatccaaagttggcagctttccctccccctcctccatccaccgtctccaaaaccccgtctccgcacttcgccacccggagaccgctgtagctctgtaacgcggaggaacgacagggtttgaaccactggagaccccgtagtccccatctcacttccctctgccccccctctgcgttctagggggcgccctccgccgcgctggaaaaggcggggccggcaactccgggcaacaagatgcgttgggataggccgaggtttgcggcgctagtgctctggtcaccggaagtccctctgtttctccctctcctgagtcgctgtcgcggaggctggagcgctgccccggaagtcctcccccctgttccccgcccgcggcaaacatggcggtggactcggcgatggagctgttatttttagatacttttaaacacccgagcgctgaggtaaggcttggcgacttgattctgacgctgcttcttgacttgggatctttacaaaaaaaccgttaggcgttctccacttttccttctgcagattgcttctttaatttctcgcttacacacagac

SEQ ID NO: 40800 - DNA, 2300 bp, Homo sapien
cttggcgacgagcctccggaccgccccgcgctatctgttccacccggcgggggccacgcacggggttccgcgtccctgtgaggcggcacctcctgggcccagcagagctgagcacctgggaaccgcgcaccgagagccccacggggaggtggttagggggaaccggctcctccaggcggcctcgcccactgcaatgcaatctgggtggtttttccaggtccctccctgcctcgttccgcgcccagtccctgcccccgcgacgcccgagggcctggacgggtagctcggagttaccggggctggggaggagcgaggctactgcagtaagccagccggaacccatttatgactccgcactctgaagttcaggacagggaagcacccacctctggaactcaagcagtggacgagggaggtcccgagcgccgtcgcagcgctgcgagtgtgggaccctggccttcgcccgctctcaggggacgagagctgccacctgtatcacgggaggccccgcctccgcctgcaccttctcctaccaggaaacgagacggcgcgggcctcgggctcctctcccccctcccgggagctgaacccccactgggaaagccaggtctccagcttcccttgacacgcgtcttgaaaggttaccggatttgtacccggagtgggttctgcagggataggtgcatggttgcccgtttcacatcatgaatatgaacggggctggacacctagagccgaattattaatacttcagacagaattctgttcccaagaacaaatcgctttgagatataaaacccgagaaaacttcacctctggcgcttttctctctaaaatgtcaacaagacccaacaacatactgccaccgatctggtggctggggggtgatggttggggtacgagcctctgggcagaccaagctgaggtggagcagggaggttgtttgggagcttggtcaagtcaacacactccaatacaatgccaaaagcatgagcagagggaatggggtcagggcgcagaacctgggaaaaagcctgcgtggcccgatttaagaaaatttttattaggcatgcggatagatgcttttcatttggggcccaaggcaaataaaaggaaatgggccccagctctggaggatgttccagcttcgaactagcagccaggaccaaaccagacatagcattcagagttgacagaaaaagaagcgggctccattgtgcctgagtttccttgcggggtcccccagctgctttgcgcgcgataactgcgtcctggggagtgactaggtggttgggcgtccagcccctggcgtccggctctgccgcgcgcggggttcctctccggaaggtgggcagcgcggcgggtttgggacgagcgtgcacccgggctccggcccggagaagggggggctcgcaggatttctcctgctgtttgcactgaaagttgtgttggctcaggagctgcttttccggggatctgcagttgcccccgccacctcctggctgcggttggcaggtccctccctcagcagttcgtcctccgcctgcgccgcgccctgggcagctccgcgccccgggcctcacctctggcctcctttcgcctccctgcacctggccttttcgcttgaccgttcagaaccttcggcttcgttccctgcagccggtattctccgagcccccctgcacctctcagttacctccagtgggaacccctccccccagcgactccgagccctttacctctctgagccctttccccgtctggcctcgtctaccctctgggtgtcaaccgcctcttccctgcccctcacgtctccccctcctcctcccctgccctcgcctctccattcatccagccattgtctcccgccccttcctccccctcccgaagcggcctcctcccccaccgctgccacgtcgtggtttgaaggagccaatgggccggcgccgccaggtgtctcttacctgcaccacgtgggggagggggaaggggcgggcaggtaaagccacatcccaaaacagaaaagctttcagccattgcgtgcctcccggggggggcagccttgctccaggctttttgcatagacgcccgggcaactgaatacaaaaagggcaggcctcctgcgccctccttcccaccccccttcctgccctgggcgtggagcaccgaccaggtgtgggcttgggtggttggttaccgccttttgcactagcagtagcaaggaaggggggtgggcgctctttctttttctcttagaagagggtttagcacaggttttttcgttctcacttccacaccac

SEQ ID NO: 40801 - DNA, 2300 bp, Homo sapien
cagagtgagagaaatacagtcttactataggtaaaatgtgatttctctccctgggataaatactgaggggctgtgggaaaaggaacagcagagacaacccacccagtgtagccaatcattgttaatacactgtctcttaacaacttaaattagtttgagctgtaactttttattgtggtaggcaggcaccgagcttgaaaagatggaagtagaatatatttaggtacctgtataaggcaaggcttgcaatgaaagatgtagactgacaaatgacgacccaggcaagtaagtgcagattttatttcgtttaatatattatgacaattcaaaaagtttgaaggagtaactcaagttgttatgtcttcagaaaatcattccttttatacgagtcttagtaattatttgacaaaaggggaagaatttttttaaaaaattaaatgctagactagtcgctacatccttaccagaaatagtaatatgtaaggattacttttttactcccaaactcacatgacggaaggacaagacttaatcttttccctgttgggccagaggaaaatagctgttttcattatttaggtggagtgctttgggtgtaggaaaacatctggagaaaaattaagactttttcctcagccacagctattagaattttgattaaatacagaaactaaaacaattaatgttatagtgaaagtaattctgtatattcgttaaagaaaagggaaaatggcaaaacatgaaataatcctgccactcaatatattaaaatgtttttctctaacatgaatgtatttggatatattcttctagatttctgtagacaagcattatttacaaagagcattcatacggcgtaagccttttagcctacattatttaatagaacatcaacattgttataaccactaaataaaatactcagtattttaaatggacacaacaatttaaactgattattgttgaacatgtgagttattgtccttacaaatagcttttaaatgagcatttttgtaggtaatagggaggtttcatggttcttttggttgttaacttttttaaaagctgtgaccatgatgcagcaatactgatttcaaaatacagcatgaacaggtcacatctagtaaaatccaatagaaggaacttggagaggagatattttgcatgaacatttaacatttaaaagtcttaatttccttgatgttctaatgtaaaaatgggtaaaaattcccagcaaattaacacaatttcaaaattttaagaaaaatctgaattgagtttttaaaaggattatctttaaaagttatccaatgctgggttattttgttaagaaaaaaaaaaacaaaggaaacaatagtgtaatatttgtccagacagttgagctttgcttcgtagccacggtagtggtcctaatagctaagaacagcaggtaaccatttctcctttgcctttgggatttgtgagtttgtttttgtttgtgtttgaagtctaatttgagttcacaggtacagctacaatattgttcaagaagactaatgtgggactattatttggcacagaaataagccttttcagttaatcaggaatttactattctaatctcacttattactgaaaatatgcattattagaacccaatagttagaactacccagttttacaatctaatcccacacctgtgtgaaaactgaaagggctgctagtgctgcctgaaaatacagatgttctaaaatggttatggctggaaaaaattagtattaacagccagaaaatatgaagtataacagcacaaatgtatcacagcttcagaattgttttgaatggaatgcatactggagcacaaacattgtaatccactgccttaaaacaagaggaatttttttcatgagacttgtacataggatctaatatagaaacaggaccaacttttaaaaataaatctacttttacattaaattttaaatttttccattgtaaaatatgcttatattcaatttttaggttcctaattgtgagagaaacattgaaccaaattcacctagttaacattatctaccttgtccttcctcagaatgtactattacctgaatgcttctattccttttttgatcttcgaaaagaattcaagaaatgttgccctggttcacctgatattgacaaactggacgttgccacaatgacagagtgtatcctttaaatcattactcaagaatcatttgaaaagatagttccagaaaaggtaattcaagaaactttcaaacattttaaattttgtcagcatatggataaaattggcctat

SEQ ID NO: 40802 - DNA, 2300 bp, Homo sapien
aaagaacagtatgtgtggatcataacaggctctcaaatgtattaatgaatgagttgctgagaagcctgtataaaaatctaactgaattcttccatatgcaaatgtaaagtatttcctagcttattgtcacctaatttttggttaaagaaaattatatttgctggaaaatttaacagtattttgtgctgtcataagcaagatacaattctacaaacccataagccaggtggttgtagttgaaactttggaacttttttttttttttgagacagagtctcactctgtcgtccaggctggattgcagtggagcaatctcagctcactgtaatctctgcctcctgagttcaagcaattctcctgcctcagcttcccgagtagctgggattacaggtgcccaccaccattcccggctaattttggtatttttagtagagacaggatttcaccatgttggccaggctggtctcaaactcctgacctcgggcgatctacccgccttggcctcccaaagtgctgggattacaggcgtaagccgccgcacctggcctgggactcttaattaaatgcaaagctgtattaatttttgaaaatgttttctgaggattaagggttgaatgtaggcttatattgaaaatactgaatttttttcccctaaattgctaatttctcaccttttcacttggagatttggtcactttcataactgtaatcttgtctcactggaaagcctgtaccattggatacaaggaatcagaaaccatcctgagcccttgccttctataccagttttctgcatcagcacatgctcattctaagtcttcagtcaatattgatattaaattatgcaacttgttatctgaccctctcagcatgcttcactggtagcagttcttttgaataaaattgcccacatttaagcatcaccagggaattatttggtttcttattgagtcaccacttctaataacccagaggccattactctttgattaacaacagtatttgtctctctttgcctcatgtgacctattgtgattacacttgggaaaaggttcttagatgatgcacaaactcttaggtgccttgaggatgttaggtttccatcttggactgggtttgttgctagtttccctggtgtggtaactctaatggtaacttgcatggtaataatttcacagtccttaagagacttattgagaaaaccataaaataagaaagtagtcctgtaagctgatcatgtctttttctcccccataaaacattcgtgctcaataaaactaaggcgttctacctctgtggaacacaaatctacaggcttggtttgaaatagggggttttagcaagctattactaatagaaaatgtctgttagtaatacctgtttgaccaaggtagagctgtaaggagtgagagaagggctcccaagcaaggctgatgatacatacagctctcacaaatcatcactgggccttgcacctcccaaattccttgcccccaagccacattccaacctaggtctcagggatgagggaagattgaaagggatatggcaggtcagtgatggactggaactgagagccaaaaaagaataccggttcagtttcctgtaggagggtacctaaagctccagtgctggttctgttactagcttttctcaattgaatgagatttaatcgaatttttcagaagagaaaaaaactagtatacgatcctatattttgaagcagcagtcacaaggagaccctttcaaacccttgtaaatctgatactaattaacagaagtgaaaaaggctcattttcagctatgagctctcaaaactgtttcttaaaggttttgttggccattctggtgatcaggtgatgaaatgcaagtcaggttccagcagatcacaccatcacccggattttgtggctaaaatatctgtattatgggtgattgtcactttgcatgttttgtaagcaaccatttccttgttgaaggagacagtctccttttgtttttattcttcccccacacactcagggccgcccatcaggagatgcctttatccagatgaagtctgcggacagagcatttatggctgcacagaagtgtcataaaaaaaacatgaaggacagatatgttgaagtctttcagtgttcagctgaggagatgaactttgtgttaatggggggcactttaaatcgaaatggcttatccccaccgccatgtaagttaccatgtaagtttttcttgggtcttggcgctattctacgctatatgctggtaggtgcttaagctgctttcgtaactttctgtgc

SEQ ID NO: 40803 - DNA, 2300 bp, Homo sapien
ctgggattacaggcatgcgccaccacgcccggctaattttgtatttttagcagagatggggtttctccatgttggtcaggctggtctcgaactcctgacctcaggtgatccacctgcctcagcctcccaaagtgttgggattacaggcatgagccaccgtgcccggccctaatgtgggtttttagggttcaagagaagaatgtttctactagggcataattatctctatcttatcttatatttccatttgttattttaagaagctattttttttctatcatttttctttcccctgttattgtagaggtcaggcaaacttaaaatttagtccattagtcaacttgaggtgaccgtgaagaaactgtaggatattaagactctagacttagaaaacagcagacctcaatagctactatatgttttccaagaggtgcagctctttcagtcagctgatctgataagcagcatactcaggtactgttgctcatgtccagggaccctaccatatcctgtggttttcagggtccttatattctgtgctctcttggctctggcaccaggccttttctggtccactgtttctaactcctggtaaagtgttgttttaaggcaaaaaacatctttacggggaaccagacataaaaagagttcctggaggccctgcgtggtagctcatgcctgtaatcccagcactttgtggggctgaggccggtggatcacttgaggtcaggatttcaagaccagcctgggcaacatggtgaaaccacacccctccacttctctactaaaagtacaaaaaattatccgggcgtggtggtgggcacctgtaaacccagcacttcggggggccaaggtgggcggatcacttgaggccaggagttggagactagcctggccaaccaacatggtgaaatcccatctctactaaaaatatgaaaattaagtggtggcttgcgcctgtagtcccagctactgggaaggccgaggcacgaaaatcgctttaacctgggaggcggaggttgcagtgaacctagatcgagtcattgcattccagcctgggcgacagagcgagactctgtctcaaaaaaaaaaaaaaaaagttcctggaaccgtttctgcacatcactgaaaaatgatagcctctccccaaatatcctaacttaaaggtgctattaggagaatcttgctgcctgctaataatggggtgtccataattaccccatgacttcagtgaattctcgtgcctgtttctcccgatctaaaatgggtatatttcatttactaaatttacttctgagtactgttggggaaaagatcccggtgtttgttgaagaatgctagatataatgaaagttaaacacagtttaacaaattaaaattattccctattgctctgtaatatctaattgcacactgctctaccccagaccattgtattatctccccgcccccccccccagaatatcatgaaatgcaacatatttgctaaaccagttttggtgatttaaaacaagttccaagcacaagcttctttcttgtaatggtcaagtggcctacgaaaccaaagcgccaactgagaacgttttgctgctgcactctgaaatcccagcgagaacgcaggcagcgatggcagttctggagcaccgggttccacttctgcctctgaccggctttgtgacttccaccacattagatctgagtttcctccatgtaaaatggggcgggaatggaggctggacctgggaggtgtcgctgatgatcgtctctgactcgctaagtcgcggagtcacaaaagtggcggaaagcatgccctcactttttgggaagagtaggacgaggggcggggctgcagcgagacccaccagtctcgctttccagggcaggcggcggccaggagctacagctgtgggctgcactcccggcgtggagtctccttcctgcccgcgcaggccccggcgccccagcgaaacgctccggccgctcccctctcccaacactctggttcccgggccgcctgcggggacgcggttggcggcgacaccggaggggggtgggtcaggaagtgggggcgcggcggccaggagcgggcccccggaggccgaggggttcggcgacgcggagggagggagagtctgggccgcgcgggagccgcagggcgccctagccttcgcagaaacgatggcggaggaagaaggtgattgccgcggggtccagcgcgccaacggctgccagtggtctcgggaaggaggggcgggggcgctggaggtctgggttggagctgctggtggccgcggtcgcgg

SEQ ID NO: 40804 - DNA, 2300 bp, Homo sapien
atgataatcaaaacttattgagttgtacattttacatggctttaggtttatagttagttattcttcaatgaataaaaaatcctgaaaggaaaaaaaaaatttctgaatgaacctgtactttttttgatattgggtcatacattcctttggattactttttaatattcatagactaatttttgtaccatcttacccttttctttttctttctttttttttttttttttgagacaagatctggctgtgtcacctaggctggaatgcagtgttgccatctcggttcactacaacctctgcctcctgggctaaagcgattatcctgcttcagcctcccaagtagctgggattacaggcacccgccaccaccacatgggctaatattttgtattttttgtagagacatggtttcaccatgttacccagtctggtttcaaactcatgagctcaagcaatctgcctgcctctggaagttttggggttacagacctgagccaccacacttagcttcatcttaacctttttttttttttttttttttttttgagacagagtctcgctctgtcgcccaggctggagcgcagtggcatgatctctgctcactgcaagctctgcctctgggttcacaccattctcctgcctcagcctcccaagtagctgggactacaggcacctgccaccatgcccggctaattttttgtattttttaatagagacggggtttcaccgtgttagccaggatggtctcgatctcctgaccttgtgatcctcccgccttggcctgccaaagttctgggattacaggtgtgagccaccgtgccaggcccatcttaaccatttttaagtgtagcgttctattgtgttaagtatatttatgttgtgacacagatcttagaacttcttcctcttgcagaatatagactttaaattttatcttatttttgtattttattatttttttgagacagagtcttgctctgttgcccaggctggagtgcagtggcacgctctctgctcactgcaacctccgcctcccaggttcaagtgattctcctgcctcagcctcccgagtagctgggattacaggcacccgccaccacacccagctaatttttgtatttttagtacagacagggtttcaccaggttggccaggctggtctcgaactcctgacttcaggtgatccacccacctcggcctcccaaagtggcgggattacagacgtgagctaccgcgcccggcctatactttaatttttaaaacaattttagatttgcagaagaattgagcagatagagttcctgtattacactctcccacatatggagtttcccttattattaacattttacattagtatggtacatttgttacaattaatgaagcaatattgatacattattattaatttaagatcatatgttattcagatattcagatttccttagtttttacctaatgtcttttttttttttttttgagacggaatcttgctctgtcccccaggctggagtgcagtggcatgatctcggcttactgcaacctccacctccctgattcaatgattcttgtgcctcagcctcccgagtagctgggattacaagtgtgcgccaccacacccagctaatttttgtattttagtttcaccatgttggccaggctggtctcaaactcctgacctcaagtgatctgcctgccttggcctcccaaagtgccaccatgcccagcccctaatgtcttttttctgtcccagtatcccatccacaataccacatgacatttggttattatgtctgttaagctcctcttggctttgatactttctcaagctcttgtttttgatgaccttgacagtttgagagatatatttataggatgcccctctgttggaatttatctgatgcttttctcacaattagactcgagttgtgggttttggggacaaagaccatagaggtagaatgccatttttaattacatcatatcaagggtacatattaccttttcattacttttaatatactttttcagatgtattatttcaacgctttgcaaagattttcattggctgtcttgcagcggttactagtggtatgatgtatgctctctacttatcagcataccatgaacggaaattctggttttccaacaggcaggtaagaagaaagaattttgagcatatgaaagttattttcccagggaaccagaatgtatgtatgataagtatgacaagtgctgtcttatttatggctattaggaacaaaatgctccagaagctgttttgagaatatagttacagtatc

SEQ ID NO: 40805 - DNA, 2300 bp, Homo sapien
gcctgccaccatgcccagctagtttttgtgttgttagtagagacagagtttcaccatgttagccaggctgatctcgaactcctgaccttgtgatctgcccgcctcagcctcccaaagctttggaattacaggtgtgagccaccgcacctggccaaggtatcttttttttttttttttttttttaaatggctctggctattgactgattttttttctgtctttttgtttgttttttattttatttttatttatttttacttttttggagacagggtctcactccgtcacccaggctggagtgcagtggctcaatcacagctcactgcaacctccgcctcccaggctcaagcaatcctcccacctcagcctcctgagtagctgagactacaagtgcgtgccaccatgcccgtctgatttttcttttcttttttttttttctttttttgagacagagtcttgctctgtcacccaggctggagtgcagtggtgcgatctcagctcactgtagcctccgcctcccaggttcaagtgattatcttgcctcagcctcctgagtagctgggattacaggcatgccccaccacaccgggctcattttttttttttatttttagtagagaatgagtttcatcatgttggccaggttggtcttgaactcctggcctcaagtgatccgctctctttggcctcccacagtgcagggggattacaggcgtgagccactgcgcccagccccaggtgatttttctgtttttcacagagatggggttttgccatgttgcccaggccaggctggtctaaaactcctgggctcaagccatcctcccgcctctgcctcccagcgtgctgggattatagatgtgagccaccgagtctggcctgttttttagcatataactattttctgggagatcttctaataaaacattgcatttaactttgttatgctcactagttggaccaaaaacaatactttactctgatggtgcatttcatggcagtatattttcactgggtaggttttgggggctactgctaaaaattatgatttttgatttatgtaatttgaggttgcatagatgaattttaataacagggcaaactaagtgaaattaagaaggttcttccagtctgatttagacactgatgcttttaaagctctttattttgtttccagagagttttaagaaaacagtgataagggccgggtgtgtggctcacgcctgtaatcccagcactttgggaggctgaggcgggcagatcacaaggtgaggagatcgagaccatcctgactaacacggtgaaatcccgtctctactaaaaatacaaaaaaattagccgggcgtggtggtgacacctgtagtcccagctactcgggaggctgaggcaggagaatggcgtgaacccgggaggcagagcttgcagtcagccgagatcgcgccactgcactctagcctgggcgacagagcgagactccgtctcaaaaaaaaaaaaaaaaagaaaacagtgataagttaattacacactattttatacatatatattatatatatatgtatgtatgtatgtatgcgtgtgtgtgtgtgtctgtgtgtgtatatatatatatatatatatatatatatttttttttttttttttttttttttgtcctgagacagagtcttgtgctgttgcccaggctggagtgcagtggtgcgattttggctcaccgcaacctccacctactgagttaagcgattctcatgcctcagcctcccgagtggctgggattacaggttcctgccaccatgcccagctaattttttttgtttttaatagagatgggtttcaccatgttggccaggcttgtctcgaacccctgacctcaatgatccacccactttggccactgaaagtgctgggatttcagatgtgagccaccatgcccggccaacattaaaaatattgattaaacatttgcataatactttcctaaattatagtagagcattaactgtataattatagttaaatctatataaaacaaatgaaaatatgtatgataaaatataacttattctcacttattttatttttgtcacaacaggtttatgaagtttataaaatctacatattttccctctttctgggatatttactacagtttgagaatccagctttgttggtatctcctttattaagtttagtagcagccttaatgcttgctaagtgccttcaggtaactagaattatctttttattgttcttattttgattttttttttttgaagtggagtctcactctgttgcccaggctg

SEQ ID NO: 40806 - DNA, 2300 bp, Homo sapien
ttttccccataaaatcttcattctattataatattgatcttgaatttgaatatgtgcaaggtcagatacatttctcaaacataacatttaataaataatgtgatataattatttaatagaaagaataattccgaccttcaagcaagtttctgaaggtattttatgatgtataacaactgaagttttacaataaaaactaatttaaatgttagctgaagatatgtggcatttaaattaaaatggaaattatataaaggaaagtgatttttaaggatatacataaagatatatttagaattttcatgatactgttctcctcatctactgcttatgttaagtgagaactttcttagtaatacataatgcatgatgttactgcattttctaaatgactagtaagtgattagttttttcacttatgcctattaatttgataccaatttaatcatgataaaacaataaccgttaacatatattttgttaaatggacatttaaaagaatgttgttcaggttttttttttaaatactgatatggggcatacaatctattcacatgttttctactgaagtactaagtaaaaaaattaaatcattatcagaataaaaatatgtgttctaaaattagcaacaatttctggggatacatgcagatgttgttaaacgtacctctgcatacagatatattataaaacacaagcaatgttatttatgaaactgtgatgcagtcttcaacatcaagaaaaaatgacaactataataaaatttacaacacagtttcacagtctaaatgctatgttcctttaagtattttcatatttttaatcatttattaagagaaaattgtgaaaagttaatttggccttatagagagattcaggatagatgtagcctatagatgtgtcattttaataagttgggatacatgtttagtttttccttatattcctgttcagtgaacagattttcataattctcacttgttaaagtgctgcaaaaattgcattttcagtactctaaattactacattagaagagagcatttctccattgtctttattttctgttatatatgtgttgtaaaagtacactacattagaagggagcttttccgttgtctttattttctgttatacatgtgttgttaaagtacatgcattcttagactaactctcagatgctttgctcttttggagctgaagaattgtttgatggtgatgtcatatatctgatagattagtttcagtggttctcatttcacttttatacgtaatttcttaactatattaagatagttgcaggcagtgtacctcaggttgactctgtacatctgaatagtgagtcactagtattttgcttcaagccttctgaaaatataaccatagttacctaagcacacagtgaatagtcacatggtagtacttgtgattagagcatgtaaaacaatgtaattgaaaagtcagcttccatattttgtaggggaaatagaacaccctactttttatctagtgtgaaatatttaatcgaatttttgttgatttatattatgttacctgtgctgaattaggtttggtacttgtgttttgtttgacatattagtaagttgcttttgcttctttctgtcaacttattttttaaataaaattgatctggaaaaattgttaatgggatgttttaaataatgaatttttcatccagcatcagttgaaaaggaaaagaaagcttcattatggaaatgacaatattgaatatgacagataagtttatttgcttctgttttaactgcagttaatagtactagacaactttaagtggaaagcatttagtttatttcttcacttatttgtagagtgaacaaatgattcacaattctacaagtaattccacttaggtaacttacagttgttaggtttgacaataaagatctactatgagaggagaagaatttatgggttttgggtggaaggaatttctcaaagaaataaaaaatgttctttgcccttgatactgcaaacccactgatacaagtgccttgaatttattattattattattttttatttttttgagatggagtttcactcttgtctcccaggctggagtgcaatggcgcgatcttggctcactgcaacctccgctcgctgcaacctccgcctcccaggttcaagtgattctcctgcctcagcctccggagtagctgggattacaggcacctgccaccaagcacggctaatttttgtatttttagtagaaacggggtttcgccatgttggccaggctggtctcgaactcctgacctcag

SEQ ID NO: 40807 - DNA, 2300 bp, Homo sapien
tttaaatatttcttttgcctctgttgtttctgagagccgaagacatagcaagttgaagaagccttggctttttgacattctgggacacctttcaagaacactgaacccacaccaggattgtcacacactgacagggaaagatgtgtcactccagacccaggcaagcaaacttggccacagctgggatatgtgtcttgcatcaaagcagaagcaactggtagttttgagggtcttctgacagacaccctccaaacatactgctcagaagtgaggtaggaggtgagatgcgactctggagtcagggtttggacaccggaccaaattcagggatggggctgaagcagctttccatgagacatgctcaacagtgtgccatgtcggtttaccattgccatggcaacacctgggcattgccaccccattctatggtaatgacccgatgacccagaagttactacctttttcctagaaatttctgcataaacttccccttaatctgcatgcaattaaaagtgggtgtaaatatgcctgcagaacctccctgagctggtattctcagcgcactgcctgtgggttagccctgctctgcaggggcagtcacagagctgtaacactgccacttcagtaaagctgttctcttctaccactggttcacacttgaattctttcctggacaaagcaaagaactctctggggtgaagttccaatttggggtcacctgccctgcattagagggacaagagtccctggctggaagcttgagttcattagactcctccaatgttgatgaagtcttaagttatgactccctctaagagatggtctctaagtttaataaacttcaagatctctgtcaaccttcaagtattcaattacccactctgaaaaggggagttcagtgctgtaacacttttatggcaagacatttttgagtctaaataaaacaccttgggacttgaaatatataatgttgttattgtattagatggtagtggaataatgaactcttccttaattaaaacttatttttacatatgtaatacaaatgtcaaaatgtcaagttaatctgtactgatttccttttttttctttctttttttttttctcgttgtgagacagggtctcactctgttgcccaggctggagtgtagcggcacaatcacagctcactgcaacctcaatctcttaggcttaggtgatcctcccgcctcagcttcctgagtagctgggaccacaggtgtgtgtcaccatacccggctacttaaaaaaaatttttttttgagacagagtttcgctctgttgcccaggctggagtgcaatggagcgatctcggttcactgcaacctccgcctcgcgggttcaagcgattctcctgccacagcctcctgagcagctgggattacaggcgtccgccaccaagcccggctaatttttgtatttttagtagagacggggtttcatcatattggtcaggctggccttgtattcacgatctatgaatgcatcttttttcagttttaatcgttaatgaaaaatacaagaacatcacagaacggaggtaaatgtatagggttaacagcgcctctagcggggatatcgaaaggatcaactaggctctaagtatcgggagctagcagcaagggctgctcaccgtatgctgccatccgtccaggaagcgagtgggaagctggtgttctcggcaggacggcgggagcatctgaggagaggacccaggtgcgaggaaatctcagaaatgggaacggggaaattgaaagcacaggagataaactttgcttgggtcacaactagaacccttcgcttcgcctttacgaaaatattgaggcccgttgcaaccctagatgaggttgtctcattttctcgctggagaactgtcagggaacacggaaaacccacccgcgacccggcttcatgcggcgccgtctcctatggcaaccgggaggaggcgtggttcgaaggttagtcacgcccctttccttccaacccgaacaacgattggtccgaaggcgcggcggtggcgcggggaggcggatccaggaccgcagctccggctggcccgcgccgccattttggattgtgtgagtttccgggacgttcggagggtggcctctctcccaccgggttccgcataccccaggcaccggcccgcatccaagtgtcaggttggagccgggaagcggccctggtggtagcggcggcgggggcaggatgagcgcggaggcggcggaccgggaggcggccacctccagccggccctgcaccccgccgcagacctgctggtt

SEQ ID NO: 40808 - DNA, 2300 bp, Homo sapien
gcggggatatcgaaaggatcaactaggctctaagtatcgggagctagcagcaagggctgctcaccgtatgctgccatccgtccaggaagcgagtgggaagctggtgttctcggcaggacggcgggagcatctgaggagaggacccaggtgcgaggaaatctcagaaatgggaacggggaaattgaaagcacaggagataaactttgcttgggtcacaactagaacccttcgcttcgcctttacgaaaatattgaggcccgttgcaaccctagatgaggttgtctcattttctcgctggagaactgtcagggaacacggaaaacccacccgcgacccggcttcatgcggcgccgtctcctatggcaaccgggaggaggcgtggttcgaaggttagtcacgcccctttccttccaacccgaacaacgattggtccgaaggcgcggcggtggcgcggggaggcggatccaggaccgcagctccggctggcccgcgccgccattttggattgtgtgagtttccgggacgttcggagggtggcctctctcccaccgggttccgcataccccaggcaccggcccgcatccaagtgtcaggttggagccgggaagcggccctggtggtagcggcggcgggggcaggatgagcgcggaggcggcggaccgggaggcggccacctccagccggccctgcaccccgccgcagacctgctggtttgagtttctgctggaggagtcactgttggagaaacatctgcgcaagccctgcccgggtgagcgcggcgcctgcacctggggagcgggacccggccaccggcgctgtccgcccagcttccctccgctccccgccttctcggtcaccgaagctgcggcctgggaggcgcgcacaggagcccagctccggccgggctcctcgcttcccttaaacatgcccgggtggagggtcaaagaaaagctcgaaacaaaggctctcctacccccggaggggagggcttggtgctgtcatcctaaaccctttggtcctttttacgatttacctttttactgttggggttttagaggctgcgaggcgggtcttgtggttgcttgggtcggggaggctgaccagacgcctccttcaaccccaagctgaataaattcagggagctggggagaaaccagctgttgggtgttgatcgtgacgctagttattatcttaggttttatttaaacatttttttcttcagtgagggaattttattgactcttattccaaagttgggctgtaagttaaaagaaaatctttgaaagtaggaactgctgcacatttgcaagatggctttgtatagtgatgataatgattaatagcccagttaaatgggtgtgattgatgggggaggaggaaaactccaggcattctcaaaaaaggtattggcacaaaaaggtaagttcctcggatagcatttctctaaattcaaatctagatatggcttgttcagtctcagactggccttcactgatagagaccactgtgtaagaagttagtgtacttaggcagttttggcacctgtataatgcccttaattcattccttttgaaagataatttgttgagtgctttccgggtgccatgcactgtgcttaattgctcacatccgttacctcctttaatttaatcttcaaaatgatcctctattttgcattggaagaagcaggtacggagaggtcacttgatggaggtccccctaattaagtgtcaaaataatagttctaatatttatatctcattcttctaattggcagtggttatttgcagaaccagaaatctatgactgttatgttcttccccgtaaggtgcttttttttgctttcttccactctaatctgttacccttcctccttaccactcttccgcatctcctttaacccccaggcacacttcttacatacgtattccttagtcattttaacagcgcagctgtttggattccttttgtggcaaaaaaaaaacccaaactccccccccccccacccacccccccaaaaaaaccaaaccaatagtgaatccttttgtatctacataattaaaacttaaatttaagaatttattttcttttaaaccctagatcctgcaccagttcaacttatagttcagtttttggaacaggcttccaaaccttcagttaatgaacaaaaccaagttcaacctccgcctgataacaagagaaatcgtattttaaaactacttgctcttaaagttgctgcacatttgaagtgggacttagacatattagagaaaaggtatccaagatttcagtgaaatttc

SEQ ID NO: 40809 - DNA, 2300 bp, Homo sapien
tgtctttttttctgtgttttcgtgagataaagacagttttggttctgtcacctcttaagtacctgagaaattgttaagcaaattggtgttcattattatttcaggtgtgctatgatttgggcgcagcatacttccagcaaggctccacaaattcagctgtctatgaaaatgccagggaaaaattttttagaaccaaagaactaattgcagaggtaaatccagtcataataggaacttaatgttcagttctttaaaacatctatacatttttttggctttgatttttctgatgataaaaacgtgttcattattataaatgtgtgatgttcaagaaagtactaaaactggtttttaaaaatctgtagtaatataacctggaaatatagccccttttataaatctagtaaattttcttccagcttttttctctctgtttttgtacagttaagctcatattgtaaatactctgtatcttgcttaaatctttgactaggcattataaatgtatcatattatgtggaagtactctgatttacttcatttcccttatgtttgggcatttaggtttattatacagctgcaatatttgtatctgcaagcctaaatttttcttcagatttcagatatgtttaagttcctacaattattgccatgtcaatggttatgtatttttctaaggctataatttatcaaaccacattactttccaggtacatttctcacagagcacttcagttagcagtgagtgtttaacaaatttttatttttatttttttgctaacttgattggtgaaatatagtatcttttataaacttggctttcattaattcctaatatgggtaaacatttttactgtgtttatcatttgcatttttcttttttatgattcagatgactgaattgtaaacctagtatatctataactaggtttttatatggctggtgcctggaaaaattcccacttcaatctgctgtccttagtagagatattgattaaatgccctagaggtttaaatgctctgactattctagatagacccattagaaatactcattttactttgctaggaaattaatctgctttctaattttatggtatttcaggtatagtaatttaaaacaaatattttttcaaactttttttttttaatcctgtttgggtagaagcatttctattctttccaattgagtgatgattatgctctttgctcgctcctttaaatctctgctggtatgtgtcttttaaaacctttaagcttgtttttaattttaacactgtttgctctttgttaatgtcttgtcatacatacttggtatgataatgatgtccaccttttgtatgttggcctgaaaactctaagcttcagcaaactttctttgtaaagggtcagttagcaaatatcttaggctttctgggccacattcagtctctattgcatattcttaccatttttttggtcccctttgcatagtttacggcccacaaaaattgttcttagctcaagggacgaacaaaaacagaccataggctggatctggcctatgagcaatagttttttgacccctgttctaaacctttaacctttttgttttttgattcttccagttttaaatttttcttttctttttttttttttttttcctgggacggagtctcgctttgtcacccaggctggagtgcagtggcgccttctcggctcactgcaacctccacctctcctcccgggctcaagccattctcctacctcagcctcccgagtagctgggactacaggtgcccgccaccatgcctggctaatttttgtatttttagtagagacagggtttcatcatcttggccaggctagtctcgaactcccgaccttgtgatccgccagtctcggcctcccaaagtgctgggattacaggcgtgaaccgctgtgcccagcccggcttgaatttttcgttagcatttccttgtactgttaaaacatgctaagggggtgctagactattgtttatattacatgaatggataatggtgtatacctcttactttacagataggttcattatctcttcattgtaccatagatgagaagcggttagctggctattgtcaagcatgtgatgttcttgtaccttcttctgatagtacatctcaacagttgactccatatagtcaagtccatatttgtttgagatctggcaactatcaggtaaggtgtatgagggggatgcagtgaagttttggaagccagacaaaactaagttcaaatcctcgcaccatccatttaccagttacgcgttttggggcaag

SEQ ID NO: 40810 - DNA, 2300 bp, Homo sapien
ttcatgtttaactcaaaataggaatcatgaaatgataaagccataacttagttttgtgtctccaattgggtattattccagctttatagttctcttacctaggggtttttttgtttttcacagaaaataggtgaagagaggaaacaagatggcacttctttcccctatctttggccctttttaaaagtattgctttgtcctaggaaagaaaattaaactttcttgaagtttaattaccgacacaggtgaatttaataaagactagagctctctcagttatagctccctagtaaaggtttatgaagggtgagatcaattatcataaaatacagattctttaacaagttggctgggcaccgtggctcacacctgtaatcccagcacttgggaggccaaggtgggaggatcgcttgagtccaggagttcaaggttgcagtgagctatgatagcactgctgcactccagcttgggtgacagagcaagaccctgcctcaaaaacaaaaaaacccaaaaaacaaaaaaacctctctggagtggtaagacctgtgccaacaagaccttaggaatatcacccagagacaagtacatgttactgtgactgtaataaagttccacaaaaatcagaaaatagtgtaatgggtagctaagacggggaaaataggaattttgttgcatctttgagattcattacttatacatgcaggactctcttagaaattgtatttcttcgaatggcattgtgtttttatgaactatgtgggttttgtttagtgctgatgaagtaggagttgagcagctgtaacaggtgtgtcttctcacacttgagaagctgctgtgttgctcctgtggagccctgccttgctcatgttttgttatggaggtgaagctagtggttgctccatatttttgaaaccacttatgtcagtacttttctggtagtggctgattagtttaattttcagatatctcctttccccctcctctcgttaacaccctttctttctttcctgctcttccattcttgagaagtagctaagaaaaagtctgtatgtaataatctgggtattttttgtagttcacagataatatattttaaatcatttaaatttattataatcacttgttagcatgttttttcagctgaattttttaattagttttttttttttttttgagacagagtctcactctgttgcccaggctggagtgcagtggcacgatcttggttcactgcaacctctgctgcccgggtccaagtgattcttctgcctcagcctcccgagtagctgggattacaggcgcctgccaacgtgcctggctaatttttgtagtttttagtagagacgggatttcactgtcttggccagactggtcttgaattcctgacctcgtgatccacctaccttggccttccaaagtgctgggattataggcatgagccaccgtgtctggccatttaattagtatttttttagtttgttttatgagcttgtgtttagagagaataataatttttttttttttttttgagatggagtattgctctgtcacccaggctggagtgcagtggcaccatctcagctcaaagcaacctccgcctcctgagttcaagcagttctccttcctcagcctctccagtagctgggattacatgcaagtgccatgatacccggctaatttttgtatttttagtagagacgggatttcaccatgttggccaggctggttttaaattccttacctcatgatccacctgccttggcctcccaaagtgctcagattacaagcgtgagccaccatgcctggcctaaaatttttttctaataacatagctggattgcctctcattgactgattcctttcttacctctcatttttggtctgtgatcttcagttttaaaaaaggggtagcagggctgtttttgcccttaatcaaattttagaattttaggaagaaaaggttttcatagtaagatatttttgtgattgtttttcaacttgtattttccattatagaaagacttgtttaaagtaaaaaaactttaccatgatttttgaaatgggtgcaactttatgtgtgtgttctaggaggtaatacagattttcattgaagacaacttaaccttgagtttacctgtccagttccgacagtcagtcctaagagaactctttaagaaagctcaacaggggtaagtaagttgaaaaattacttcttgatttttgaataaaacagcaagtgcattctggtttatcaaaaccacattttcaaatttcctatggctctgtgacattattttcat

SEQ ID NO: 40811 - DNA, 2300 bp, Homo sapien
ataaataagttgaggcatctgtcttttttattgtctggaaaagtttgtgtaaaaatgaagtcattgcttctttcagtgttgggtagaatttaccagtaaagtctgggcctgggtaatttttttgtgggaaggtttttgatcagtgatcatagaactatattctcgtttttctagagttagttttaagaagttattttctaaggatttgtccatttcatcttaagtttattagtattaaaatttattattttaatattaaagcatctacagagatgcccactagtttgagtttttctttttttaaattgaagtgcatgaaattcacataacatgatctgttaggtttgcttattagaagttacatgttccctacattgttccatgacacatgtacaaagcttctcactatgtgaataaataatctgttgtaaaaggagactcagatatttattactcaccataagatatttacatatggcagcaaagaaacaaagttattagaatgtaagtgtataatacatactccaagatgctcagatgttatttactgataggttaatttgttaatcagaaaatggtatttgaacatagcacttttaaaacactgctttttttttttttgagatggagtctctctctgtttcccaggctagagtgcagtggcctgatctccactcactctaacctctgcctcctgggttgaagtgattctcctgcctcagcctccccaagtagctgggactacaggcccgtgtcaccatgcccacgtaattttttttgtatttttagtagagacgaggtttcaccatgttggccaggctgatctggaactcttgacctcaggtgatccacctgtctcagcctcccaaagtgctgggattagaggcaggagccaccgcaccaagcctgtttttttaataacagtttcatcaagatataattcacataccatacagttcacgcatttaaagtgtataagtcagtgcgttttagtgtattcctagagttgtgcagctatcacttcacttccttttttcactccaaaaagataatctcttattcattacctgtcactcttcattttccctcaatctcgcaccacctgaggcaactactaatctaatttctctatagatttatctgttctggatattttatgtaaatggaactatgaaatagatgatcttttgtaactggcttcttagcacgttttcaatattgtagcatgtatcagtacttcactttttatggctgaataatacttaattgaatggatatatactgtattttgtgtgtttattcatcagttggtagactgcaggttacttatactttttggctactatgattaatactactatgaacattctattttgtgtgtgtgtcaacgtaaaaaatatttagcaatttcttgagattatggacttttacactagttatattttattttggcttcttataaataatatattaggaggaatcctaatctaatgaataaattcaacataatatgaaaatattatttgtagataactaatatgaccataactagtttctattctttgtttgcattgtttactttttaaaccttggttacctttttaactattcatgaatagctcatgaatatagaaccattagttctatattcatgataaatcacttactcttttcaattattttctttttggttttaaaaattttttatttttttaactcttttctgacaggagctactgatttctatggtttatcacttaatataatttggcaacatagttgataaattctgtgagaactgtatagcatggtaactaggttattctttgctacatgtatacacctgcacttattaaaatggtcacattccattccctctttgtgatggattgttattccttggtctggtctcttctgttaagttacttaactaaatctgtgattggtacattgttgaaaaaggaaaattcagttgtttttaaatccagccttttcaaattataatttacatttttataagtacccatattcaaatgaaaattactcaaattcctaggtatgttcaagatcagtaaatttagaaaaagcttcagagtctttgaaaggaaacatggctgcttttctaaagtaagtacctttcttttcttttttctttttttttttaactttgaacttagtcctgtgaacaaaatatctgtattatcttttgtttttgtcttgggtatcttttaaccaggcagtaactggtgtttgagaacccattaagttcaaatttgtatagccacgtgagacattaggat

SEQ ID NO: 40812 - DNA, 2300 bp, Homo sapien
tagtaggattcgggcacatagaaaccacccaaagataggcgccttcctgctgacctctaggggcattaaaagtaaaagtgtcagaggaatctatcgcaaagcaataaacacataattctattcttattcatctatcctccatttttcccccaaacccacccagcccagttctgcattaccctaatttcatactgatgtttcttggtgacctcctctcttctttttttgacatcctggaaaatagaaaagaccattggtaaactaaagtcccagcatggaatttcgttcctccctctttctccttaaatcacctgggtagttttcctcttcttggcctggattatctgggcttcttggggggattccgtctggctgggctggggctgctgcttagcttgtaaacggctactgtagtgaatttttaaaaaggaagtgtaattagtaagttaaaggcagcaactaatttgaaacatgtctctaagacagataatgttaccttcgtcttgacattctcttctttcaggtgtataaaacctctgaaggggggagaggaaaagccgcagtcaagtacattgtcattcacattctccaagtgccagtaagacgctgattcgcaggtgaaagctcagtccctccgaagggggcctgggccctgtgaccctgccatcttctgtgctatgttagctagctcatggtaattcattttggatacaagcctgcatttcctcaactgaatgtacagctggaacgcgagtgtccaaaaatttaccaagcactcctgacaccttgaacgcgcagggaggcacatcttcctcaaacgggtttttctgggtcctccaccctctcccccgtacaccgggagtggggcttgggcagcgcccccacgtcccgcctccctcctggaccagcggggagagggggttgtggaggcgaaatgctgtggagaagccggttccgcgccaatttggagagcggcggtggcggggaagcagggggcggaggaaccaagactggtgtcacggcctccagtctcctttccctccttcccggccctgccgccctaccgccgctcggaggggcgccgggaccccaactccagatgggaagcggagggcgtgggggagggcaggaaaaggagctaaagaaaggggagactgggctggctgggaacttttctccccatggaggggacccggcctcccatcctctctcccacgggatagctccccaaatgagggtgggatagagaagcccctagaatgaggggcggctctccatgcccagccgcttcccggtcccctgccaaggttcctgacagggacggaacgcgggaacccatgacccccagtcgtctagttctcagccctcccgattttcctccctgaggctcccgcctgtggtaagtgatcggcccaactgggctttctttcctcccacatcccccctacgcgcagcaactcctcaccgccagaccagctaccgctcggctcagctggcgccggcgccaacccaatatataggccgggccggtcccgccccgcacgcatgcgcctcagactgacacctccggacagcgcgctcccctctcccgcccgtccgcccgcgtgcccgcgcgccgcgccctgctctcagtgcgcgcccgccacccggagcggccgtggggtccactctaccgggccttctgcccgcgtccaccgcgctccacggcgcggccggcggcggtagggaaactctcaggggctccttctccgcggctgttctccccgccgcctggctcgcgcatctcccgccagtttgcttttgcttcctcccactgcaactcctggatttcgggggtgtcagcctgcggctcagcccgggcgcataacagggggacacgactcgggcgaccatagggtggctgggaagtgaccgtccaggggcgcgccctagctgtcccgccaaggcctcagggaacccaggtctttcctgagcgacgcggggacccgagggcccgcccctcggggaggagcaaagcgttggctgaagagctggccaatgggaggcacgggcggcagcacaacgtggagtggctgcagaatgtaaacaccactcagccacgcgcctggccaagtgcggctctgctctccccagtcccggtccgcgaccacccggagcccgctccgccggccttgcgcggcgcgcccagggaaggcatttccagcccgcccacccaggtatgtatcaaccctgctttccggctccctgctccccctaccgggtttccctccccatgggtcggtcgctcccccaacccgccg

SEQ ID NO: 40813 - DNA, 2300 bp, Homo sapien
cacaaagacgtcttggaattttctaatttctcctttactatgattgcattctgttcacataatagtcaagggtatggaaagaacatttataagagcagtgtcttttaaaatcaatttactagttaactcagtactgagcatacattcatcattcaaagatgattcccacaaacgttactcgacatactggttttcagtatattttatcaaattcaaccacgagggccaccagttctgcttacgatcaggtgacccttgttgggagacccctgaccccttttcttgacatcatgctgttagacctttaagctagctataccgctaactgcgttttgagtgactgcaaaagggaggcaacttctgccccgccgagagccatcctaagcgttagaaatggcagaaagtttcttgggactgacaaggcatgggcttctcctgatgctgtcaccttgggcaaagctcctacaggtaaattagggagagaattattttgccggcgtcacgagacgaagaatcgaaaaagtgtgaaaaaggacttcgcccgccccaaagcgcccatccggcggcggctatttcccgggcctcaagcgcgctcgagcggcgcagcacaaaaggccgggcgggagcgggggtcgccgggcgccgcctcccggtgcatctcgggaagggctcccgcccgcgaggctccgtctccccggcgcggcccgctcgccgtccggctcgctcagggcctgggcagacgcggcccgcccgagctaccgcgggttccgagacgccttcgcactgctcctccacccgggggatctttgttcccggagctgttccccgcctcgctgctcccgccgcaaaacctgtttgcggaatacccgccgcaagtctgacttgacgatgtgcagttttggggtgcgccagttgtgggggcattcatagaggcagcgaagggacccctaagtttaaacacccggggaaggataaaggaagagcgtcgggcccccctcctcccaacagcgctcgggcgcgaacggcgccctcccgcgctgccggctcgcgcgggctccgcagggcgcgctggcggcggcggcggggcggggcgcggcaggcgggcccggggcctgcacgtggtggcgatctttcttcccacccggccaggtccccggggaccaccgcgctcagggggaggaggaatgccgttcccgggccccgctccggagaggggttttaccctctgggatcccggaattggaggtggagaagagaggaagcaagggagggcgcggcgtggcgcgagcgtttcctgcgcggggactgcggggtggcagctggaggccactgcaggggcagagcggcgggttgggggagcgaccgacccatggggagggaaacccggtagggggagcagggagccggaaagcagggttgatacatacctgggtgggcgggctggaaatgccttccctgggcgcgccgcgcaaggccggcggagcgggctccgggtggtcgcggaccgggactggggagagcagagccgcacttggccaggcgcgtggctgagtggtgtttacattctgcagccactccacgttgtgctgccgcccgtgcctcccattggccagctcttcagccaacgctttgctcctccccgaggggcgggccctcgggtccccgcgtcgctcaggaaagacctgggttccctgaggccttggcgggacagctagggcgcgcccctggacggtcacttcccagccaccctatggtcgcccgagtcgtgtccccctgttatgcgcccgggctgagccgcaggctgacacccccgaaatccaggagttgcagtgggaggaagcaaaagcaaactggcgggagatgcgcgagccaggcggcggggagaacagccgcggagaaggagcccctgagagtttccctaccgccgccggccgcgccgtggagcgcggtggacgcgggcagaaggcccggtagagtggaccccacggccgctccgggtggcgggcgcgcactgagagcagggcgcggcgcgcgggcacgcgggcggacgggcgggagaggggagcgcgctgtccggaggtgtcagtctgaggcgcatgcgtgcggggcgggaccggcccggcctatatattgggttggcgccggcgccagctgagccgagcggtagctggtctggcggtgaggagttgctgcgcgtaggggggatgtgggaggaaagaaagcccagttgggccgatcacttaccacaggcgggagcctcagggaggaaaatcgggagggctgagaactagacgactggg

SEQ ID NO: 40814 - DNA, 2300 bp, Homo sapien
tttgcatatccccccaatttaccatattcgaaatgcctaacctgtactttctgcaggattcattcctgtttccctaaatggttccaccatcctctcagttggccaagccagaaacctgggtctttgacttttcccttccccttttccaggcttacaaggccctgcaggacctggttcctgctcagctcccctagcctgctattgtgaccctccctctggaccttgagcggtactgaaggtgccacattctcactcatccacaggcttccatagtgttcctttgcccccttcctccattactgacctcagccactcaagagtaaagtcattgcaggagtccacccaggtagcctggagaacaccaaatacttcttccatggcattcatcacactggattgttaaacttgtgggagggccctgttcacagccatctcccctgtgcccagcactgcacctgatgcataacaggtgctcagtaaatacatgtagaataatagttgacctggactgaggactttattcgaagtattttgctaagtccattgcctttaacaagagtaggatcagggagactgtctagtagacagttttggcaaagtctcagagacaacagtttggcttaaactaggatgagagtggtggatggaagcaggcagattcgagctgcctgtgctcctggggttgacgggacttggtggttgggatgaggggtgagtaggagggagcaaaaggcatgcgggtgcggcagctcacgcctgtaatcctagcactttgggaggctgaggtgggcggatcatgaggtcaggagatcgagaccatcctggctaacatggtgaaaccctgtctccactaaataaaaaaaaaagaaattagccggatgtggtggtgggcgcctgtagtcccagctacttgggaggctgaggcaggagaatggcgtgaacccgggaggcagagcttggaatgagccaagatcgcctcactgcatgcactccagcctgggcaacagacaaagactccgtctcaaaaaaaaaaaagcgtgaagggtgactgctagggtgttggcctgaataactgccagctgctgctgcttcctgagaaagggatgaagggcagtgtatatgaataagtttgtgggggaaaaaaacctatctttggtatgtgtttggtttgatacgcccatcaggtagccaggtagaaatggataaatattccaagatcaagcaagcctggagttcttcatttagaactcaccagaactccctaaggtaggagctgttgccagctgaagtcacataacttcctaactcacacagcaagtgagcagctagccagggtttgaatgcaggtggctgacccagcacccacctgctgagctgctacacaggaagggtgtttccagttctaggtttggccaagctcagtttcctacagtgtaaatttcttcatgccagctgtaggaattgtttagaaggtcaaagtatgcttgctgggcttacagattttaagtgtaatcaggtgtgcttacagttatagacaagaagtacagagtagaagagaaaatgagccagaggaggatgagggcctggcataatggtggtcaccaggcactgttgctgggacttctgagcagttgaataacatatagcaagactgttactatctagaatttgctcatctgcttgcagaaaagtttgaaggatattattcaaattcaccttattataaaagcataaatatgaaaaagaaccaactctttcccttttatttcacattttaagatatttataggttgaatttgagtaagagtatttacaaaacattatgttgcatttcttgtgtttgactcctgcagaaagggaatagctgtagaatgtaggccaaggcatatgctttcttctaagggtatgtgtgtatgtgtatgtacttatgtatatatgtgcatgctgatttgaaataacttcctttttctgttttattttaggtacaatgactcttcttgcttttcacctaagttgaataagcaccctgtgcactttaatctcctgtcggtaccattgggccaactaaagacaaggttttgaaatctcagctataaaagacatccagccaaactctcagtcttgccttaacaatgttccagaggctgaataaaatgtttgtgggtgaagtcagttcttcctccaaccaagaaccagaattcaatgagaaagaagatgatgaatggattcttgttgacttcataggtaaggtacacttggttacttggtggttcatcttcacagtaaaaatggaaacttgc

SEQ ID NO: 40815 - DNA, 2300 bp, Homo sapien
tctgtgatgggcatttctgttagctttgtgttttggttatcgctgctttaaaaactaccccaacatttagtgccttaaaacaatgatcatttatttgttcacaatgccgtcattttggcagtgctccgtggggatggcttatctctcctctgttcagtatggtgtctgctggagctggaacttcctaagggcttttccactcatgtgtctggtagctcagctgggatgagctgaagagctagagctggccaggcatctctttcttttcacatagcctctccctgtggctagcagggtggtctctcctcatgggtggctggcattttccagagtacaaagcagaagctgtggggtttgcttaatgcttttgcttaatgacgaggcttggaagtcctagaacattctttctgccacattctattggtcagagcaatcacagggtcagcccagattcaaagggaagaaaaatacacccacttcatgatggagatactgttgtggtcatctttggaaaaatgatctacttcatattgaatttttctatcataacaagatgatgatttcacatgttgctttaaccatgataaaccttatcaaactggaaaaaggtaggcctttttctttttaaaaattagccccttgtaattgtcatcataccttggttctgaatgtggagatggcctcttcaatggattcctagggagaaacaagagatcatggggctcctaccatagcatgtgggagaaaatattagaacaagcctgatttgcaaaaacctaaaatccaaagcatgttcaagtctgtgagactatctagaacacagttttagctctttctcccaagataaggtccaatgaccatcatattttgatcattactccttggtgtctgacaactccctgcactgcaatttacatcctttaaaaccagcattgttggaaatggactgactacattgtgagggtcagaatgtgagtgtctttcagatactgtaatgtgtgataggcatccctccagggttgctatacagctcaccccaggtcaaagaactacatcccagtccaaacagtatccacatgagagctgataggcatcaacgttactcacctgcctttgccagacagttaatccacctatatgtgggacagagccttggtctggaaaacactttcaagcccactgtctcactctcttgtcactataaataacctggtgagttggcagtcccggcgtgaatgcccacaatttgcaggtatgcaaacagaacagaggggctaagttccgtgggtcacatgagagctaggctgcagcgcctggggaggcggccgttcccgcccggtgcgcttgttgtccgctggagcagaggcccccgagcctgctgacctctctgccttcaggcctggtctcgcagtcccttgtgcctcgcctataggcaggcggaatccagagcgtgcagcaagcccggccggctctcggtggcggtttctacagcaggtggggcctggctccgtgattgagcggcctctacccctctatctggggcccagcagcggccccctcccagcaccctggctacacgtctaaccctaggctgaccaggtggggctctcggaggcgttagccccagccctcccaggagtcttaatgttcctctcacaggaaaaaacgttctgcgccctttgtgccccaaaccctcgacccttcactcggcgagaggggtcgctgagggagagatccacctctgcccttcccgttgcccgccggttcttcctcgcccgcctcttacgcaccccgctcccgccggctcctggaaagccggccccggccccagcgcttccctccccggcctagcccctctctcccacccttccgctcgcccaggccttcacgctcagctcccggtttttgttgcccgggcttgtttcggagctgagcgcgccgccggccgggcgccaggtcacgtgcgttggtgacaacctctcgcagggcggccccggggcccccgcaccgccgattggtggggcccggcctggcgcggcccggggcggggcagcggggcccgacggcgagcggagcggccgatcagctgttgcgagcgctgcacaacaacaaaaggacttggactggccggcctgggcgcagcgacccgagggctggagccggccccgcgcctgccgtctgggtacctgaacgaggtgcagcgcagcccggccccaccgcagctacctcagcagtcccgccccgcccgcgtccttccccgccgagccggcggccgctcccttccccgcgcagccccgcac

SEQ ID NO: 40816 - DNA, 2300 bp, Homo sapien
gcttcccacagagtaagtgatgagagagagagagagagcacccaagatgaaatatggaaggtgcagaccttttataacctaatcgcaggagtgacattgggtttttctttcgaatttttctgatttgtttccctgtggtgtcgatttatcttgtttcttgtctttttcttataaactttaaaattagatttagaagcttaattaactttatgttaagcctttttgccaagaatatttcatatgtagtatattgaattttatgtttccttttattagtgaagcaactttcccagaagcaccacagtggacttgttctcaagtctaattggccagatcagggaaatatgcactgtcctggaccagtcactggtgatgaaagggtaacacccaccaccggggttctgctactacacaggatgaagaaaggtaatttcagagagtaaaaaccaaagttgcatgaattggttagagttcttagggccagaggacaaggtgctttaccttgggtttaaacaaaaacattaacttggagtcacaaaggcaagtggccagagttgaggcagaaaggtaaattgaggccacatcatggacggactgcatataacacacagtaaatgctgtcaagtagggaaacgccatgatcagatggacattttagaaagaaccagtctggccatagcaagaaaagtctaggcaaatctggaggcaagagggattcaagtgtaggcagctgctggctgggatcagctagttggtagcagctagacccacctctaatatttgagggccctgaaagtaagagtaccaaaggaagccaacataccatgtgaacaaatattcaaagttaatcccagcactatgggagactgaggtgggcggatcatgaggtcagatcgagaccatcctggccaacatggtgaaacctcatctctactaaaaagacaaaaattagctggacgtggtggcgtgcacctgtagtcccagctactcgggaggctgaggcgggagaatcgcttgaacccgggaggcggaggttgcagtgagccaagatcaagccacagcactccagcctggcaacagagtgagactctgtctcaaaaaaaaaaaaaaaagttataaatcaagttagtaaactgttaaaagctctgtcttcctgccttgataaatacatcttcctaaggacctgaaaggtcaggtttacattgaaaattttgactccttggagttccatgctggaccttggaggcccagacaagcaggctctggcctatggccgtcttcacttcctttccctgtccaaataagattgtggaataacacagatattttgaatgtttggatcttacccgactacttactatttatgtgaactgaggcacttcagcttctacaattttcaagtgacagccattggggtaaagcaggaaacaaaataatggcactgcccgtatggaacccagaggatactgggagaaaaaagtcagcaagcaggttagctataggtagtggttgataatggcctactgtgtggcttctctgagagatgtgtgtgcttttctgctggaggtgttaggtggccagtggttcccaaacagggcgacatttccagaggcctttggtggtgtgtgggcgtttggtggtcaccaagactgggcattcacctattgcaaacttccagcaacgtgcgggacagcgctattgcgcccaaagtgccaaggcagcccctgttgagaaacagtgcaaggtgttctgttctcatggtggatttggggtataggggcggcggggcgtgattttggcagctacttccttcaccagcagcacccatcacttcttgtaggtgctctgaggtcgcctgtggatgcacgtgggggaaggggaagagcccaggaggggtcggacggacttgggcgggtctttcctggaacgaaggccaaagagtcgcggcggcggcccagatgcagaggaccacagcgacacctggctcttctttgagcggcgtccagaggctgccttcccgcgactcaaaggagcataggggaacctgcaggggcgtggccggggcgtagctgcgcgccgacggcggggggtcgaagggcacgcagtgccggcgtcatggcggcctccgcgcacggctctgtctgggggccgttgcggcttggcatccccggcctgtgctgccgccggccgcctctgggtctgtacgcgcgcatgcggcggctgcccgggccggaggtgtctgggcggagcgtggctgcggccagcggaccgggcgcctggggcactgaccactactgcct

SEQ ID NO: 40817 - DNA, 2300 bp, Homo sapien
agatacttcagtactatgtaagtattctttttccatcaaacttttacccctttaacattttcaggcatttattgatgatttttatctgaatcagttaatactatgatagttatcaaatggtgatttttaaaaattccatcatgtcttctaaatttagtagtaggcattgtattggttgtcaagcttttccttctcttcctatttattaatttttattggtacaagctcatagagtcctgtttcaaattgttactattatttatttatttatttatttatttattttagagacaggatctcctgttacccagactagagtgcagtggcatgatcatagctcactgtaaccttgaactcctgggctcaagtaatcctcccacctcagcttcctaagtagctaggaccacaggcccatgccaccatgcccagctaatttttttattttttaagttttttgtaaagacagtgtctcactgtgttgtccaggctggtcttgaactcctgacctcaagccatcctccctgctctgcctcccacagtgctagattataggcatgagccaccatgctgggccctgtcattattttttgatcctgaaattgctgtggacttggccagtgagaactctgtcaagccagtttctgtgttcttttgagaagtttcctccatcctttaaacatttctttactttttgctcaagaaaatgtttcagacttatcttgtattttccctgccctaggaatggagtcagttattccttccaggagcctgtgttagtctgttttgcattgttataaaggaatatctgagacttggtaatttgtaaagaaaagaggtttctttgactcatggttctgcaggctgtgcaagaagcatggcaccagtatctgctcagcttctggcaaggcctcaggaagcttttacttgtggcagaagacgaaggggagcaggtgtatcacatggcaagagaggaagcaaaagagagaagggaggaggtgccaggctcttttaagcaaccagctgtagcgtgaactaatacactcacttatccccaaggggatggcaccaaaccattcatgagggatccacccctgtgacccaaatacctcccactaggccccacctccaacattgtgggggtcacatttcaacatgagatttggaggagacaaatatccagatatcagagccctagtttctttcagtggagaatggtttcagaaaccaagatctgggtgctaggtgtgttcaccaataccgggaatgtggggtgggggctgggggcattattacttctaggctctttcagcaggtgctgcaaggaaacgtatgtgtgcacacagtcctacatgaatttctatgtcttatctctgcctttctgtatatctgtctatatgtcttaaaaaccatacattcaccccaatatttgcttgaactattttaacttgatttattcttttgaagctcatttgaattcttactaaaacaaaagtgattctgaaacagttaaaattataagtactacataagtcatagtaaattgatagagattaggtggcattggggtacatttttcataacttttaaggaacggttataaaaaataagacatgtcaggccttttctgaactgaagcctcacgttgttattgtttttttgagatagagtcttgctctgtcacccaggctggagtgcagtggcgcaatctgggctcactgtgacctccacctcctgggcttaaagcagttctcgggcctcagccactcaagtagctgggattagaggcacatgccaccatgcccgactaatttttgtatttttagtagagacgaggtttcaccatgttggccaggctggtctcgaactcctggcttcaggtgatccgcccgccttggcctcccaaagtgctgggattacaggcatgagctaccgcgcccaacttgaagcctttttgttttcagttaattttagtcagtatttttttgtgcagcttggaaagtgaagagtaactgtcttttttttctgtctgttacaggaaacgggattatgaaggttatttatgctccctgctgctccctgcagaatcccgaagctctgtttttgcactgagggcctttaatgtggaactggctcaggctggtattaagataccttaaaatattatttgcgaaatggtgatataaggtgtttaatgctgaacaataaagaaatatagttgtaatttatatgttagatgtgtttaaggtctctgctagtgatttcttttccctgctaactgtttaggcttagtaattcaatac

SEQ ID NO: 40818 - DNA, 2300 bp, Homo sapien
catcacaatgaaaggagggagcaaagagtagaatgtttgttaagcatattcttaaaatgagatcatatggaaattgcacagaggagaagaaatggaagacttgtaaagtttttccatgatagccgattaaaattctaaatgtgttcttagtgtgctgtagtctgaggaaaactcttatttaaaagttgagattgagatttagatatctgctagtggtaaatggtcaacttgttattgtgcccagtttttcactcataaatcctgtttttcagatgtaaaacaggataaatgtctccttttacatgtttaggttatttctctatgctatttctattgatttattatgcacttagaatagagcagccctgtgtaatttctgaaatcataggtataaaggatcttcatgcagatcatgctgcaagtcatattggaaaagcacaaggcattgtcacttgcttgagagcaacaccatatcatgggagcagaagaaaggtgttccttcccatggatatttgtatgctggtaaggctgtaatttgtacctttgaataatttacctcaggaatatggggaaggaagttatcttttgcttttttgcttagtctattcaagtaattgctttgaaaggaatgcttattgcttactaaaaatggccttcctctttttatcccagagttatcaagtcagaattgtgtccatcaggcattttaggtctctggaggagcaatgagtaggaaggtctagagaacctcatttggtatagcttcatgttgatgccttgctcccttccaaacaactgcagtaattattcctagcgttcaccttagcctgttctttattttattttattggagtaagtcattttaaatatctgtttatgaggactttgttttcttttcttttctttttttttttttttttttgagacaaagtcttgctctgtcacccaggctggagtgcagtggcgtgatctcggctcactgcaacctccgcctcctgggttaaagcgattcttctgcctcggcctcccaagtagctgggactacaggcgcccgccaccacgcccagctaattttttgtatttttagtagagatgaggtttcaccatgttagccaggatggtctagatctcctgaactcgtgattcgcttgcctcggcctcccaaagtgctgggattacaggcatgagccactgcgcccggcgagaactttgttttctatatgagattcattatttgttctttcaaactttttgtatgtttcttttcttgcttgtatattttcattctacctacaacttgttaattaacatcttgttgtggccaggtgcggtgactcatgcctgtaatcccagcactttgggagggtcgcttgagtccaggaggttgagaccagcctgggcaatattgggaaaccccatctctacaaaaaatacaaaaattagctgggtgtgttggtgcacacctatagtcccagctactcaggaggccaaggtgggaggatcccttgagcctgggaggttgaggctataatgagccatgattgcaccactgcactccagcctgggtgacagagtaagaccctgtctcaaaaaacaaaaaatcttgttgcatgttccaggtgtcactctctcatttttgtttttttttctctctctccacacatgcacacacacgcacgtgctcacatacatttctaaagacaaaataggcattaaactgtacatactgttctgtcacgtgttctcttgtgctaagttagttttaattgttagtttaattttctttcctaggtgaactgttggaaggaagtgcttttaggttcctaatataatgtatatttccccacacagcatggtgtttcacaagaggactttctacggaggaaccaagataaaaatgtgagagatgtaatatatgacattgccagtcaagcacacttgcacctaaagcatgtaagtcggcttttttttgccaaatcatttagggaataatcatttctagatgtggctcttcttagaacatggttatgatattcccaacttggcagtcttttttccatttttcattgatttcccagtagatttatctcggagtctgttgtaaacttttttcacttaaaaaagtccctccccccacctcacagcatatgaatgcgttctctactgagtaaatcaagcctgagctttctcatgtgggctcctctgtgctccatccacttctctcttggaagacagggtgtctttctgccttccaaggctgatgcctctcgtccccctcccaggggctgcaccctcagcca

SEQ ID NO: 40819 - DNA, 2300 bp, Homo sapien
tgagaaataatgtttttcacgttagactctatttgaggggtggggttgctggctgcctgataatcattcctgctttctttgaatgaaatttttgaggttgtaaaagaaggaatttggagtttgcaaagcctaatcataacatgaggcccttgatctaagggctctccaatgggcagtggcaggtgggatcgctggaaggaggaatctaaggacaggaaaccagtgaggaagtaaatgtaacagagaaaatccacatctgggattagacaacagcagtgagagtggagaggaagagatgagtctgagaaacagtgaacaaggaatccacagaacttggtgactaagtggagggacagagaaaagaggagggggaagtcaaaatggctagatggcttctagtctgtgacagaggcagaggaaatgctctgctattcatagaaatggggaagttaggaggtagtgcataaggctgtacagttttagacataggacattggaggagatggaaagtcatcttcaggtggttagaaacccagggccacttttggttggtgttcaggaagggaagtgcagagaggtggaaatctcagccacaggtcaaacacttccctggccccagattaaagaccaatccaattaagcatgagagcacacgagccacacaagtcgcacaagtcagtaacgaaaaggactcccaggtgatcttaagtcacataattaacatattttcagggccctacttgtatgtggccctgaaaacgttgagactaatcagctggaatatatccatttttttttctccttctttttaaaaccttattatagagaattttaaaaatatacaagagtagaaataattctagaacgaactcccatgttttcattacccagcctcaacaacgatcaaatcatagccaaccttgttccatcccaacccttacccacttctccctgcgttattttgaagctaattccagacataaatatttcagtctgaatttctaaaaataaggactctatcctttaaaaataagcacaatgccattatcatgccttaaaaaattaactatggtttcttatatcaaatatcaagtcaggttcaaatttccactaaagttttaagtttccattaaaagcagttgatttgaatcaggattcaaattaggacatcaggttgggattggttggcaggttttaaagtctcttttactctttgggtttctcccctaccctctggagagagctccccacaccgtggctttgctgactgcattccttgggtggactttcacttgtgcctctgtcctcgacatgtcctgtaagctggaagccgggatcagattcagatccatttttattttaagtgttatgcaaaaagacacccagtgaaggtgttagaatgagccatggcagtggatggggttcgcaggacccctgcggaagggggacgtttaaggggcaagcggaaaaggagacacctggaatgggggaggaggagcagcggggcgaggcgggggcggtgccgcgtggtctgcgagcccggatattccctggggagcgcacctgcgacttcacctccagtccctccccggctggggcagcggggcgcgggcgctcgggagaggtggcgctgcctactcggcctcatcttgctgagaatgcgacggggcgacagcttcctgtcttttccagtggcttttggcatccccagaggaaaaaacggggagacccgctttggcctcaggaagcgcagaaacactgtcctggctgcgcgcgcaagggcgagaacctaggggacccgcctaaagcgccgttggggctgagcaccgaactcgcacagctccgggcagcgacccgcgatgcggcatccttccgtccggtcggagccctcctagccctcagcgcgtctattcctagcttcggtccccgcagccatataagcaatgacaccctcgccgactcgcctgccagcttggccgcctccctgcagagggctgacgcttctccagaagttgtaagaaaaggagggaaagcaggccaacctcgaggatctccccagccttggcgttcaggtgctgaggagatcgtcgaggttggcctgcttcccctcactcctcgggccttgctcttcccccaggtgcccactgccctccctgctgtgtaccactttcttgctgcctgtgaaggtatttgtcctcactcttgtgctgctccttcaatgatagaactttgggactttctcatccagcagcaccagcctgaaaaagcagtggcttgcaccaccacacacatacctggtc

SEQ ID NO: 40820 - DNA, 2300 bp, Homo sapien
gttagtggctactgtatttgttagcacagatctaaatcaacggtctccaaactggggtgcacgcagcccagggagggcatagactatgaagagtacagaaagaaaacatacatatatatatttaaaatcattatttctgatttttttgtgtgtgtatgttgttttttaatgtacctaacatactaggtatattataataggtgtatgtgtgtatataaatacacactatatatatcatacatataattctgtgtgtatgtgtgactgggtcttgctatgctgcccaggctggattcaaactcctggcctcaagtgatcctccagcctcagcctcctgagtagctgggtatattacatatgtaacaacttttatttcacacttacgtagcactatataaatgtgtatattatgtatgtaataattttatttcacacttgtaaagcactgtgtgccaggtatatgctttacatatattaattcatttcatctgcataatgactctgtgatatacttttattatctccattttacaagtgaaaaaaccaaagttatctttggatgtgccaaggttgttagagacaaagccaatgtttgattacagtcattctggcttctatctatgcactttacttaagctaaataagtacatgggaagtgaggagggcaaacatttttactaatgtgagtgaccaaaaatatttgataactaatgctctaggcttgaccttagacaaccagtcagacatagcaattcctactttcaaaatttaaaaggattttaggcattatttagtcctgccttttccccactgatagatattgctgtgcacgtagaggtgaatgaggtagagtgatggtacggacaagcgtcctggtgacatctgtactcatctagagacaactctaacacacgaaagattgtgtgtgtgtgatcatacaattttccccatttaaaaaaagttcatctttgccaattttgttctaattattaatttaaaaaaagacttgtttgtttcagagacaaactctattgaaataggggaggataggaggcaacaagcctggaggaggaagatcccaggtggaagagcagggcggaacccaagtctgctctcatccctaggtgctcatccacgtgcagcttggctggtagtgactctaattcaacagcaatcaaacacaggttaaaacaacttactgaagtaatagatgaataagaaatataaaatttaccaaaacccaatttcctcctacacaccacacacactttgtttaaaataagtatgctgttctccctacttcgcccccatccctagtctaccctaagcaacttcgttacctctctacgaacccatcagagcgcttagctatcagatcaattagggcacatttaaccttatatactatgcaataattacagtttctaggtatgtgaagtaggctgatggggttttgtgtcgtcaaagttttgggaagaccagaattctaaagtatgcatttaaaagaaagggctgggtggagcacgtagggtatgtgtgtgtcgccgcagttcccttggtttcaagaggagggattttaggtaaagcaaagggaaagtgtgacggaaaggattgctgtgctaaatgggagcagcaaatgccagtaccgatgcctttgggcatttagatccaaagcctgcctttctcgttcttcagttccccggggaggcctgttgtgggtggggaggtgtcttccttctattattccagtctccctaagaacttcgtagacagttgagcaatactttctaagggctggtcggagtcaggaaagtcaggtaaggcgcctcacgtgcacctcaacgcgtcgcgggagcgcgtcccgacctcacacatggacaagctccgcccgcggccggcctgagtgggtgtggcctccgccaaaggccccgcccctagagcgcgtcgcgaggggcgcgaggggcggggcgagggaactggcaagaaagggcggggagcgaggggtgtgggtgtgctcgtgcccgcgcgctcgcgcccggagtgtggacgggggcgcgcccgtgcgcgcgcaggggagaggccagcccaggcagccgttgtcgggttcgactggaggggcgggggagtcacctgcgagcggctgcgctggcggccagcccgcccaccgcgtctggatcgcgccggctgcgcggggctgcggacagcacacaccctggaaggccccggcggggaacgggcagagtccgcgccctgcgtccgcgaccaggaggatcggaccttcgccttcgctgtcgccgccg

SEQ ID NO: 40821 - DNA, 2300 bp, Homo sapien
gcaacttggaaaaaaactttaaaaaattaattagttggaaatcatagaatatgccaggattctagacaaataactagtgtccgagtcccctccttgccccaacattgtctccccaccctctagagttctctactctgactacaagggtaatacatgtcagggtgcctctaggatactacttaagcatcctgacagtgtctgatctgagtggtcagtgctcaatgttaagtattttgcataaaaatgctagtttcccctgtgtgtgtaaatatacatatatgtttatatgcatatttgtgtgtgtgtgtgtgtgtgtgtgtgtgtgtgtgtttaggccaggattctaatagctaaaacaaagattcagagacaataaatagagcagccctgcagaaaaggggagtgttgccttgctgagaatattcacagttggtctgatggtaacatggggtgttctactaaatgacagtttgatctagatgatttgtttgttcaaagtatctttcatctcctagggataaaaagccctgctttgtcacatttgcaatttccctcatgtaaataacacccactatggctcatttcaagcttcccaagtgacatcactgaatggaaagttaaagagagaaagtctttcagatgtaaacaatctcaattatatttataaataatagtaaaaggtagtggaatcactagcatatgaattttgagtatcatatttgcttttaacataatgtaattgcaagtttgcataatttaatatttaataataattgcatttaacaactagctcccaaaatccttgaaaatttatcactgggtaggagtgagcatgtcccattggctccagcacaccactacatgttgctcttcagggaccttaaaagatactttgaacaaacaaatcatctggatcaaactatctccagagttcccaagggtgccaacctctttgctaccccactttagaaatacccaaaacacaggttaaactatgcacagtatttattaagaatgccatttacaataccttacacttgtatcacgctttacacttttcaaagtagtgcttttatggcacggtgggactgtctgaccctgcagagtgaatttaaatcgctgggtaatagctttttaatgtataatgggtgaaaagatagtcctgggagccgtttgtcaaagagaaaggcgaaggagtggaactggcagccccacaaggaagtcgggaagctggttggcccctacccggttcctggttctctcctggaaatggctccaacattgtgcaagcaagtgggtgtgcaatagttttgagcacgcatctctctctctgtctctctctctctctctctcggatttaattagaatttccgttttttccaacaaagagttggacgggatacgttctaagacttttacaaactgtaaaatgatgagcgaggtaacattcaaatatgctcttaacagaacagctcagtaatggtttcctccacatcaaaacgtgcctattgctgcagcagacgcttatgcagagtctacatgcactctcaccgcaaaaattcacacagccagtagtcgtggccgagtggttaaggcgatggactagaaatccattggggtctccccgcgcaggttcgaatcctgccgactacgggaatgtcagctttttgccgtcaacacttactttttgtgttttagagcgttctgctcaaaccttccacagatttcaggaatttacaaacggctgaaacacaacagggacccaaacgggagaggagagaatgaaggggcgagaatgcgtgcttgtggttacaacgtgggcccgggagggggagacgggaggaaccacgccagacatgctgaaaggaagaaacgcaaagcatcgcgagtcacacagacacactgcagagacagctccgaactctgtccctgcatacgcccgcccctcacgaacccaccgcgttctctgccgcgagccctcgtgggcgccgggttgccacgggaagcggtgcgcatgcgcggggacgcctaacggggcaggagcccgccaggtcccctcgttactcctggaaaccaccggagccttggcgattggaggggaaaaggccaggcgattcaagatggcggaggacctggacgagctcttggatgaagtcgagtccaagttttgcacacctgaccttctaagacggggtatggtcgagcagcccaaaggctgcggcggcggcacccacagtagcgaccggaaccaagccaaggcgaaagagacgctcaggttaaccgggcgggaggggtggact

SEQ ID NO: 40822 - DNA, 2300 bp, Homo sapien
aaaaaaatctctaatacattttaaaataaaaaggatagcgtaggcttctttgttttgcttttgagtttaattagtacaccattgagaataaaatcaattaattacagcatctgctgaacaaataaatttgattgtacagatttttgatgtgggtatttttattagatcttaaaatattaaatcataattctatttctgaaataataagtagttggttatgatgttcttttgaatgctgattatatttcagtttaaatattaattaaaagttagagatttttgtgtatttataaaaataaaaatatccaaatacaatatgactttttgtttattcttccgtttttaacatttttttgctgtctgtatttttttattattgattttaaggtgcattcaaatcatttttttccaaaaagtgttatgtttttataaataacttatatctgccatcacaacataatgatctccttctcttacatgcaaaagctcattaataatatttgcccacattacattttagactattgactctctttgtgctttatgtgcatctctaagttcatgcaaggatttaaataattaaataggatatcttgatgagttttctacataattttatgttctttgttaattctctatcttcctattttatgttttttaaagttgaacttctatgttttttcatttatattatgaatgttaatggactgtactgttttctttttcacattagaataatttgaaagtttaatgtcctacacttaccattacttatgactaattttaaagagtccataagcatccttaattggagtagtcattaatgtattactataaaattagccacaattgatcgagaccatcctggccaacacagcgaaaccccatctctactaaaatacaaaaaattagctgggcgtggtggcgctcgcctgtagtcccagctactcgggaggctgaggcaggggaatcacttgaacccgggaggcggaggtttcagtgaggtgagatcacgccactgcactccagcctggcgacagagcaagactccatctcaaaaaaaaccaaaaaacaattagccacaatcacttttggcacatattttctagtctaatattactttacgtctatacatttaaacacaattactgtgatatcttgtctatggaggataagacatttttgtgctttgtggctccccctttcttctgttcattattttcttaatatgaggcacttatgccttcattattttttatttattttgtccgacttttatttaaattattactcccattacttaaatgtttcagcaatatcaatctccttttttcttcgatttgctcttattccgttaatatcaactcactatctttttctactaacatttgcttatttttaaaagaaaaaaaggaaacttgactttactggataccagggtgcgtttctacatcagctttcccctccaaagactccttcttatgctcctgtcccagggtttggtgagctggttaacactccatgtgatctctgcagagaagatgttctggaggttttctaaaagatagaccatttgaacatttttgtctttcctacaactcatagcttggctgtgtatatcgttcttagatctgacttttttccttaaaaattctgaagctctaattctattatcttgggatagcagtaaagcaacctgaagacattctaattttggcttaaaatggtgaaatctttattctcaaagttgaagcattttaatagttactttccagagttagtttctgtttatttattgaacatgaggcagtgattttttaaaattaatttatagttcttttaataattttttttaaattctggatcttaaaaaattatatcttgattattaattttaattttgcccttcaggtacttttttttttttttttttgaggcggagtctctctgtcaaccaggctggagtgcggtggcgcaatctccgctcactgcaagctctgccttctgggttcacgccattttcttgcctcagcctctccgagtacctgggactacaggcgcccgccaccacgcccggctaattttttgtgtttttagtagagacgggctttcaccgtggactctatctcctgacctcgtgatccgcccgcataggcctcccaaagtgctgggattacaagcgtgagcaaccgcgcccggcccccttcaggtacttttatagtttgcattttggatttctgttcttcatcttccatatccttctgttttctggtattcttttggtcttaataataattata

SEQ ID NO: 40823 - DNA, 2300 bp, Homo sapien
ataaggtctcagaacttgacaaccatgaaacccaaactaggggacataagtagaattgggatagggccagaaggggcatccacggagaccaaggggagagcagccaagctcaatagcccagtgattaagagcccagactctggagtagtgtgaccctgggcctcactttccctatctgtaaaataggaataatacagcacttatttcaggattgctgtgaagattaagtaaaataatattggcgaagggcttcaaaccatgactgacacacaagttctctgtgggtgcttgccattacctggaggaggccagtgtccagggtggagggcatatcccagaccttaaggaagttaaaggatgaggggagcagcgcagcaaaactccctccccctgcaggctgtcatgtgagtggtccctgcaggacagaagaggtgatgaaaaagcaaaaggaagaaggggttagaaagtgagagggaggagattggagagactgggaacacacacagaaagtagcatggcggagaaagaagccacctgagatcaagtgaaaccataaagagaagaaaaaagccagaactgaaatagagaagttgggccaggaatgactgtctatgctgtagtgggaagaatcttgggcttggggtgggagcctgggttctgtcccttgctgcataacctcttggcagagtggccttggaaaagtcacttatttccattgagtcttttttttttccatccgtgaaggtgaaaatagtcaacgccaacctcacaaagctgttggcacgattaaaggagggtactttatggttggtgcctgagcacccaatcagtactgagggaaactcttctgcccatagcagtccagggcagagcactgtggcagacagaagcagcgctacgccgcatcgcctttcagcgtgcaggcccaggaatgagcgaggcagtgggcggggaagacaggcacggggaatctggggacagataaaggaaactcgtgatggggcgaggctgggctgaagagaaacagattggggtagagctgcaaagggaggggtccactggaaggcgaggggggaggccgggaagagagagggtgggaaggcagtgtgagatgggagggcagtgtgagaagaaaagcaggctggggaagagggattggaatgcagaaggaacttggggaaggaggaagtcctgcaggcgggagggaaagaagagagggaaaatggggatgcagtggaggcggggggcaggccgcgagagggagaggatcccgggagcagacgaagaagtggagcagctaaagtctgcgtcagaagaggttggggactgcgagaggagaggctggggcctgcaggggagcgcagcagcttttagcatcgatccaaactctaaagactcgtggcctttgcctgacctcgagggtcgggaatagacgcctgtctttgtggagagcgatacccaaccgagaaaatggggctgttccgagctgggccctgcgcctggcccagggcgaggcttctctggctccgggctggcccctgaggggcgcaaacggcaggcctggcggttggggccgaggagggagggtaccaccgccccgaggcagcacgcagcctgcagcagaggcgcctgctccaagctgtctcttgggggcgccgccgccgcttccctcctccggggccgctcgctcccaggaaagtggaggcggctggcgaggaccgagagccggggccgcgctgcggagggaccacacctccgggagttcgagggggaccctggcgcggcgggccagcctttgctccccggccacgggccggcagcgcccgccttcccccggtcagcgcttgcggcccgcgccgcgcgcaccgcccggcaaccccgcgcgcgtcccgcgggggcgctgcgtcttcctgccacaccggcgcaccgcggcccctctcccccacacctccggcccgcaccacccggctctcctcccaccctccccacccctcctctgccctccctccccattcctcccctcccggcgaggggcgggagggggcgtggcggggccggggtttgtgtggctgggacccggctcctcgcactccgagtccgcccgaggagccgggccccggccgctgtccagccgctccgtgccccgcgcgtcctgcgccgccgccaccgcctcctggggagacgcagccacttgcccgccatggatactcccagggtcctgctctcggccgtcttcctcatcagttttctgtgggatttgcccggtttccagcaggcttccatctcatcctcctcgtcgt

SEQ ID NO: 40824 - DNA, 2300 bp, Homo sapien
aattttgggtttcagatcttttgatatgtcttttcttgccaccttcacctgtaaccagcaagctaaaacttaaagggtggaagggaggagagtttattgagtacctaccctctgcagggcaatgtgccaatgtacaaatgtactgcatttcttcacatctttcagacttcactttggctagtgtaagatagatcattcatcagctttagtgctgtatacaggactgactaatgaagaaattgtgacagcatggagatagaagaaaaaggaaaatcaatataattttagaactggaatgtgactaagatcgttaaatctaaccttttgaacttaggatgagacaaggttctactctatattgtcccagctctgagcttaaaactgaggggaaaaaaaagatatcactgagtaatggtagaagttcaccagtaactatcagtcatgctagctccccctaattgttttctgtctctagatgtttatgcctaagacttcgcatgttggggttgagaccttaaaagtgagaaaatctatatacttctcttttgtcttaaaattgtgtgcaaattctgcaatacatcttagatttaatctttaaaaaccttttctgctgggcatgatggctcacgcgggtaacccagcattttgggaggctgacgtgggtggatcacttgaggtcaagagtttgataccagcctggccaacacggtgaaaccccgtctctactaaaaatacaaaaattagcgggcatggtagtgtgtacacctgtagtcccagctactcaggaggctgaggcacgagtcatttgaacccaggaggcagaggttgcagtgagccgagattgtgccattcagcctgggtgacagaggctgaacaacaaaaaaaagggtgaaaaaaaacaaacaaaaaaaacccaaaaccttttctgacctaaccttccactaaaatagctagatatagatcttcagctggagaaacccaaggcctgaaaggcttggtgtctttcctggattagtagtgtagcagtatagcatatgaccctagaattaaggagccccaaatttgcatctggattttcagattctggaagaagaacctggactcttctagtcatgtgctcttggacaagttattcaacctttctgagcctcagctttctcctctctacaatgagataattacagtacttttagaattaaaagatagtttaggggagtgagagatcacctccaaccctccctcccctttgctcttatgtgggctctttggttgaatctaggaaccaaattgacacatggcagattaacaagagaaaagcatactaattttactagttttacatgtacatggggatccgcacaaaagagtgaagtggccaatgtaagatgcctttatactttttacacgaactacaaatcagaagaaaggggatctggctaggggcagtaaatttctcgcggagtcattaggagaaaagtgtgtgtgttggggtgtaaacttagtggaagataacggttacttcggaaagtatattcaggtccaaagcagcccccagtttcgtctctggtgataggtgctattttctccctctggtaagggacgggtactccagaggaatcctggaggaagctttatggcttgctgcatgcaggaagagataggtcatcaaaccttttctgaaactacaatttctccaatattttcaactcgaaataatcaatgtaccaattccatatatttttgggatggcacatccatcagtccttcaatagaaagtaagacgatgcccttaaaacatttagcttcctgcctggcacaaagagctgaattaatactgtccacgctcccatagctattaacagcaaataacagaacccagctttaagccttggtctcctaattcctgacctgtgttcttcccatcacatcacaaccaatacttcttagaatgtagcacgcaaaatgccccgcctactccattggcctcaccctggccgagaggtgcttacgcaggtgctgaacggcagtcgtcagaactgcgcctgcgcaagcggcctttctctgttcgcgatgtgacgtaacgcgcctgcggactgggcccagcttgtcctctatgacttacccagaaggcaacgcttctctttctggtcaaaatggctggtaagcaggccggtaagtaactgggggtcttcttggccggcatcgtcgcgcttcaccgtttatttttgctgcagcttgctccgttttctctcttctttgtaagtggccaagtttgtcgcggaagggaaattggctgcttc

SEQ ID NO: 40825 - DNA, 2300 bp, Homo sapien
ctttcctacagtgaaacaaaacttgacaaaactggttttgttcaattccctttggaagaacagctttatctgtgaagtaatcaacagtgttcagccctgagaatgaagcaagaaactgctttcactgttctgtatatcaatgataatattttgatgatttgtttaggacacagtagatttctgttttttcattttgggacaaatttatatacataaaatgcatttgaataattcagtgttactttgatcagcaatgtgctgcggaaacacccttcacaccaaatttcaagaacacttatttgcatcagcttattctctttaaatgattaaattaacagattagtgaggtctgctgtcacttgaacatttgcagatttttgttttaagcatttttcttacaccagtgtcattgcattttgtttttaaattgtaaagtatatctttatttttccactcagaagttcctgtctgttggtttgtaactgagattgccttgttgttggcttttcctgtacataagaaacatctcactattttagactaaatatatatttaaacacctttcaattagaaaaaaataatttccagtttatctttttgttgtttgaataccgttttaaacatttaagtaaattaaatttctcttcttttgacggttatatctttcctttgtagactaagaaaaatggctttgtcagcccaacagatacccagatggtttaactcagttaagttgaggagcctcattaatgctgcacaactcacaaaacgttttactagaccagcaagaacactgttacatggcttttctgctcagcctcagatatcctctgacaattgctttctccagtggggatttaagacttacaggacttcctccttatggaatagttcccagtctactagctcaagtagtcaggagaataattctgcccaaagcagtctgcttccttccatgaatgaacagtcacagaagacacaaaatatatccagctttgattctgagctgtttctagaaggtaattctgaactttcagaaaagtctccctttccctactttggccatttgaacaagctacctgtttaccttctgctagcccatttcaggtaatattttgtgccaagaaagaaaaagaataataccagttctattgatgaacttctatcatgcctttattttactggtaagaaaaaaagtttgtgggctaacgtgtaagattattttatagctacacatataaaacatttgctttttaaatattttattgtttagattcttaaaacaaaattcttctagtggtaattagttttattagggtataattatatcaagtaaaattcatcttgtgggatatatagttctatgaattttgacatatgcatttagtgtgtaagaactactgcaatcaacaaataaaacaattatattaactccacagagttccctcatggtcgctttttagtcaatcctctccttcctatgggtcctattctaggaatatttcgctggtaatgaaatgatataaggttaagtagaatatgaaggaaagagagctggggagagggcagggaggagatgctggctataaatgatgagaaaggatagttaatgatgagaagcacaaaacagaacaaaagatcacagacctgattccttagcttaaggtaatgtgtagttctaagtgtcttccatgctgcgtttgattttaaaaaaacaaaaacaacttcagaatcagggctgtactagagagtcacatctcctgtagagaggactgcaggttgtagaaacaatcatagaagcccttttaaagatgtatttgagggtaacttggaagggagggcattgggtcaaaacaaagactttcgggatatgattactttaatccatgcaattcagactgttggcatatgtgtacttttagccaagttaacaggctatggtaaactcaatctctgtttcaaaattcacttgaaagttaggtgatttttagcattctcacctactgattaagtgaaggaaaggcattgtgtgctttgaaatttaccaacaaatttctaatctcagaggaacagtagttagtctgtctaaatagttgtaaccttacctcttaaaaggtgaaaaattagggacttggatgtttaattctaaaatgatcccaagatttaaccactgaaagaagcaaacaagggaagagctggtctttgcagaaatagttttaagtgtgcatattagagcactaatttgtttctctctttcaaagaactggatgaattgcctccattgtctccaatgcagccaa

SEQ ID NO: 40826 - DNA, 2300 bp, Homo sapien
ttcttggagatctgtagttttgggaagtttgctgaaagagattttacaaaagtgaaagtttcctttcattctgcaattatttattattattattattattattttttttgagacggagtttcgcccttgttgcccaggctggagtacaacggcaccatcttggctcactgcaacctctgcctcccaggttcaagtgattctcctgcctcagcctcccgagtagctgggattacccacgcccgctactatgcccggctaattttttgtgtttttagtagagacggggtttcaccatcttggccaggctggcctcgaactccttacctcaggtgatccacccagcttcccaaagtgctgggattacaggcgtgagccactgcgctcggcccattctgcgatgattttagaaaagaagtaagtattcacaataccctgctgggataggtggtttctgttagattttggtgggaaatgggactccaaatgtgccaagttttccctcaaacctacaacattcattctctgcacggtagtcataagggcactaaattgaaagtcagaagacctcggttgtgctaccttgacaaggctgtttctggcagcagtctaacaaaagcagcagtctagcccatgatgtggggggtgggggtggggtcaataactattcttcaaataatgcttttttaaaaggctaggggtacaataagatgattcttaaggcccctatcagctctaacattttttgacgtctaagcacttcatcctacttcaaactcctgaaatcccaaattcatcctgaagcctttccacactcaataccacttaaacatcaggaagactcactttcaaatttcaccccgtcattaaaagatctttgtgcatacaactaatgtttatccttgcatttttatttacaagtgcactatcttctccacatcctttcattgctgcctacacatcttaacaattgattaactgttcatgcacgagagcagagctgggtctcatccctggatccatccttccggggactattctccactttcccagagccttgtactgctctaatgtttgcggaatggaaataaatcaatggcaagtacagttaactcacttgcttacacagtatgcaaaagcgggtaggggatgtgcagatgtgtataaaagccctgtaaggtggtaacctgaagtcttctaacaaggtcctttcatcaggaaaattacagaaaacccttaaagaaactgaagtctcttaacaattcatatatactgttctcaatgagtgcctagtgcttcgctagaaaaaggcactgaaatagagttcaagatttctacctacgaaatgctataaatgaaatcaggagagaaagggaggttatgggggcagcttcctaataaagggtctctcaatacttcccaggccattttagcccacttcagttccccaaacttgcgcaggaaggcagagccccctcctgaggcttctcacactgcgctaattagccagcatggttgagttttcactacatcagccagggaaaaacacaaaacaaaaccaatcaccctctactgggccgcgaaaacctaaaggcccttgaggccctggggcgcggtctggacgcgggtgcgccggaacctgaaccctcgccaggagcgcgatcctcgtgctggggcagctcctgctttacctgtggcgaggcctgcttcccgtagcgggtgaccccgggaccgaccaactcgctgggccgcacgtcccgtcccgccgcgccgcacgccggctcctcagcccgccctacacagcgcagccgcgctcccgggcccacgtgggccgcgcccggagtgggcgagaccatgtgccgggttacgcggggagacagcgggctacgtgctctgaaaagagccagccaggggccccggctacccttctccggctcgctattcctctgaagtcctgtggacttggagtctgaaaattcctcgagtggtagagatgcctcagctaggatgacagcgtggggacggccggcggcgtcccctgccccaggccgcggtggcggcgccgcgaccccgccctctcgcgcctgtccttccctctgctcccagcctttgctgggcgccagacccggctttgccgtccggctattagcctactgtggctagtcacccccggggtcccggccttctcgggctggggccgccgccaccgcggcaggacggggaggcgggccatggcgtcctgcgtggggagccggaccctaagcaaggatgatgtgaactacaaaatgcatttccggatgatc

SEQ ID NO: 40827 - DNA, 2300 bp, Homo sapien
caatccttgtgactacccaatatatatatccctacacatgttctgctgaccctgacagagaaccttgattgttggataaaaatactgggagagaagtaactgacatgaattgtacattgtgctccagggactctgctaaatgcattcacacacattcatttaattttcataaccctatataagtagatatttcatccccattttacgagtgtggcccctgaggctcagagcaaggttatgcaacttaattaaggacacacagccagttttgaaaccaaaagtgtggctcaaaaactactctactctaagttggccttttaagccataatggtgagagaggtgtgacttccctttctttaaagaggttcattcagaaagtataaatcattctaagtaggaaccacggtgtgtacctccttatgaaccaaggatgaattagttctctaggttaggaatgaggagccacaggcgcagtgccagagttaacatgaggtgtgttcaagatttgggctgggcagctcctatgaaccggtatatattagaatgtgtgtgtatgttttccagggaataagagagttgtgttatgctgtgtgaggtttatgtgtttcatttaacacacagcagttactataccccaggcaccattaaaattgctggacaagatcacatttcagcacgtatgttaggtaatgagtgagcagggtatgcaccgcgtgatgtgtggcgggctggtgtctgtgcagccatgtacacagatgatgggtattgggctgtgctggaaaggaaaggtccgctgtgaggtgtgtgtttagagtggcagtttgtgccgtggtacagatggtagtgtttgaggctgggggaagtgttatgctggatgacttgtgtgcaatgcatacgggaagtgctgcacaggaaagaccgtgtatgcagcacacatgtgcattttttgtgcgttacggatagtgccgaataccggagttccacaggaagggatctaggttgtgtcctgggcctgtgtatggtgcctgcaggcgctgtggattggggtgctttgtatgtgtagcggtgtgtgctgaaagtggtgcatacgacatgattcatgcggtgtgctgggtagggacgaaggctggagcagtgcagaggaggggcccgcgtcgtgatgttgtgtggagcgatgctgagtgcggtgggtgagggggcgatcgtgctaggtgactcgcgtgcgttccccgtgtaaccggaggcgctgtatggagaaggggcactgaggggtaggggagcaggctagcgtactgtgagacaccgggcgggcggaggggccgcgtgggcggcgggctgccagtgcgtgtgcgtggagcagccagcccacttcctcacccagagccatgccgggcccccctccccgccaccctccctcccgcctcttccctagcccttggacgcgccccccgctcggctgggccgccccacctggtaaaggcgaagtacatgaggctgacgatggtgaagctgagcagggtgatggtatgcggccggtagaagaagtcaatggtgatgtcctccacttgctgctcgttgatcatccggaaatgcattttgtagttcacatcatccttgcttagggtccggctccccacgcaggacgccatggcccgcctccccgtcctgccgcggtggcggcggccccagcccgagaaggccgggaccccgggggtgactagccacagtaggctaatagccggacggcaaagccgggtctggcgcccagcaaaggctgggagcagagggaaggacaggcgcgagagggcggggtcgcggcgccgccaccgcggcctggggcaggggacgccgccggccgtccccacgctgtcatcctagctgaggcatctctaccactcgaggaattttcagactccaagtccacaggacttcagaggaatagcgagccggagaagggtagccggggcccctggctggctcttttcagagcacgtagcccgctgtctccccgcgtaacccggcacatggtctcgcccactccgggcgcggcccacgtgggcccgggagcgcggctgcgctgtgtagggcgggctgaggagccggcgtgcggcgcggcgggacgggacgtgcggcccagcgagttggtcggtcccggggtcacccgctacgggaagcaggcctcgccacaggtaaagcaggagctgccccagcacgaggatcgcgctcctggcgagggttcaggttccggcgcacccgcgtccagaccgcgccccagggcctcaagggcctttaggttttcg

SEQ ID NO: 40828 - DNA, 2300 bp, Homo sapien
acctggcgtgtgtagtagtggagatccttctacattgggacgggcatgctacccaacccctttcttcccacctcctgccccagacacccttacacacatgcatgcacgttccgtgatctgattatgattttcaagatctctctgtagtcgtaagctagatgtgaatacctaggtgcttattatagcatcatctatactttgttatatgcctgacacattccacagttttcaaaagctattattatggaagtctaagcaagaaataatagtggcagcgagatgcataaaagaacaacctggggaggtaaagtgaataggacttggtatttggttaggtgtccagcaagcaaggcagagggtaaggccgccaagatcagcctaggaccagttgggaagtcagcagaatctgtctttacccatcttttgctcacaggcatgcacctgtccacttgaccccctttccaggcttcagctctacactgtcttcagttaaagcctgttcctcctggttcccagggttctgcctgcatgcagctctctggctgctttaaactgcaatgccctgtggcccttccaggacaaggacctcaggtcttatgaggggataattggcaaatctgttcattactaactatactgcaaatagacggattggtctttatgatttttaaaatgcctttccgcatgtcaaagcatagagctacttaatagagtgtaaagtcctccagagttatctgcaagctgtgattactttaagagcagccttctaaaaacagatcttaccccttccttatctaaccctacacagtgtattccagagtaaagaagagggtggggtggttgagacatttgaggttgactggacgtggccctgctccttaacctaatatacaacctgcttcagctaagggcatttccctctgtcagcctgtgattctctgtgacaagaacgtgctgttccagagtccgggaagaaacttttcatcttattgcagggcagtttgtttcttttaaagccttatcttgacttaccctattgaattttatcctcttttctccagatttcccatttacacagcataatctcacatcatactgcttctcaaaaaatagaattcttaaaaatgtttgttcagctttgcaagttgaaatgcattttatctgagaaggaaatctgatgtgtggtgggtttcagaagagacagggaagctcttttgctctcagaaagtatcatttctggaatttaaaactattatagtttataggaatttttttcagctggctgataatagggggtgaatatttgccaactcttactactgcctgtcaaattaattttgggaagaaaggatgtgaaatgtagagattcccagtaaatgttatattatcatattgtcatgcagtcatatgataagatattaaattacttagaaatacgtataatcaaaaacaaagatattagaaatggaaccaacattctgaaaagctttgtaatttttaatatttaaattatgtagtatccgatatatttttggggaggggagttctcttttaattactgaagttgggtgcttttcttcttttttctagcataactatttaaggctttacattttcctctaaagttcaatttttacgtggtgtattttcgttatcattatgacacgttaaaaaaaattcctattatgatttcttctttaatccatgatacttagaaatgtgtgtttaaatttccaaatctattgggaatcttttatttgtgctttagttactggctttaatattgttgccctgtggtctgatgacatgatctatgtgataccacttctttaggatatgttgagcctttgtaaaattattttgcttctcattttaatgcagcttttgcaattcagagcaaagcagttttgatttataaactcaaatacttgtctattttccctcaaggcccttaagttattaaaactttctcatttgttactgagcaggacttatttgttgtcaagttcatatctattctttttatttaccggcagaatcctggaagcaagttgatttctagagtttcactaattattctcttttttattttaaataggagtatgctgtgaactgccatgtgatcacctgggagaggattatcagccactttgatatttttgcatttggacatttctggggctgggccatgaaggccttgctgatccgtagttacggtctctgctggacaatcagtattacctgggagctgactgaggtaagaaggagggcattgggggttccccagactgtgccatgtg

SEQ ID NO: 40829 - DNA, 2300 bp, Homo sapien
gaaccagcaaatcagtggagtgcacttcctgttttactggaattccaatttatttgatgaatacttaactgttggggacaatggaggtgtggccttgcctgaaggctggcgagtagacgaggcctcttatgaggacagagctggtattttatggctctttgcatgtattttgcattgctgcttttcctttggaggcctttttaagaagtctccccatctcatgaacctcttcaacccacagactccatcttaaaaataagggcactaggctggtggctcacgtgtctaatcccaggactttgggaggctgaggcaggcagatcacttgagcccaagagtttgagaccagcctgggcaacaatggaaaaccctgtctctataaaaaacacaaaaattagctggtgtggtggcctgtgcctgtagtcccagctacttggtaagctgaggtgggaggactgcttgagcctgagaggtagaggctacagtgcaggccactgcactccagcctgggcaagaatgagaccctgtctcaaaaaaaaaaaaaaaaaaaaaaaaggctgtggttcattctttcaaaagctaagtggagcccacattggcacagatgccagctacagtgtctgtggaatcagaagcatcatctgatgttacaacttctggcctattgctctttttcttctttctcctttgcctactcttctatttctccatattacctttttgttggccaatgccttagacttgctcatgagcatttgtaggtttggtagctggcacacaaaaccaaaggaataagtgtctccaagtttgagttgtaattctccagttaaatttctttctttgagatttattacagtaataggttactaagacatttaattctcactgagggtatgactgtattttattctaatactgagttgaaaaattaccatggcctcatatctatatatctacattggtgtattttaaaggctcacaactcttatacggtataaattgagctttagagcaaaatttattcaagataatatttatcatgtgtctttatgtaccaggaatgagaatacaatggtgaacagacagaaaagtctctggtttcctgtagtgggcattccaggagcagaatggcgtcataattcatttactctataagtcagagagaaaaatgatggcacgaactgcaagggatttgtgtgtaaaatttgtgacagtaagaaaaagaaactggaagggaatacgcatttgccatgttctataatatgccacagacattgtaacaaaatatttcatgtcagctacttccatttaggaaatacatgttcattattttcttcaaactaagaattactttatccctcttttctttgaagttatcttaaatctgttattattcagggtctctatccaacttctcatcaaattaccctatttgtagcttccaaacgttaacacctatctgctaaaatggagcctataaaaagccttagtggcataaactgtgtgtgagggagaaatggtatttaagcccttaatgaagttaggagctttcaaactgttgcactttgggtttacaggatccttcctccatgtcccttttttgggggtgcggaaggatttgggagaatgggaaacactctcactatatatttattacattaattatcttctcttttaaaatgcaattttcatgaactggcgatttatgaacacttcacattgcttgaaagcatcttacactttttttttccctcaactcacaaagcagtttctttctactggtcgaattctcaaggcagaaaagctacatacgtctctcgtttcttcactaattgttctctagaaaagggaaagtgaagaagggaaagagaaaagacaacggggaagaaaagagcatagaggagagaggaaaagtggggagagaaaggaagaaaaggactgagaaaacgcaggagccctggcttgccggtgagcagagccggcgcagccacagcgcggagccgcggcgcccactggtcctcggagctgccaatcggcgtgtaatcctgtaggaatttctcccgggtttatctgggagtcacactgccgcctcctctccccagtcgcccaggggagcccggagaagcaggctcaggagggagggagccagaggaaaagaagaggaggagaaggaggaggacccggggagggaggcgcggcgcgggaggaggaggggcgcagccgcggagccagtggccccgcttggacgcgctgctctccagatacccccggagctccagccgcgcggatcgcgcgctccc

SEQ ID NO: 40830 - DNA, 2300 bp, Homo sapien
tacctggctcattatacatgctatagaaatgcttattcaattaaataaataaaagcatctttggtaagataactctgaacattgtatggtttagtagaggatgctgacaagaataaataattaaaacatatcatgaagtaagcataaaagatagtggtaatgcaaagatgcgaatgagctctgcttcctgtgattagtgtgagcagacaaattcactgtactcagaagcttaaagcctagcgtgggaagctgacatgaatgaaaaccaacgggaaaaaatgttagagtagaggtgtaagcaagagtgattaatttcaacttgaaagcaaatgggggaggtttcacagagaggggcccagcatgttggttgattgcttgggctccagaatcaggccagctcagtttaatgctgactttgtacctcactggttttgtgacttgacctctctaatcctccatctccttatctgtacagtggggggaaataataatgataataataggtagctcataggacaaataagaattcacagttaatgcatcaaaaatcttagcacaaggcactcaataaatgtgaagcttttattgttattacgagttgaaacttgagtgggaaagaacttcgttcacattaaacatgagaaaaggcccagaagttgaaaagcatttgacataattaaagaacagcaagtcagtgccacttaaacggtaatccaaccaccgccagtcagtgaacagctttttactgctccatgaacaggtaagtatagaaattgtgagtaagcatttagaaataaaaacaacaacaacaaccaataattgaaaaactaattttatactttttggcatactcattgtacacttgtaataaaaactgggcttgtagtttttgtctcttttcttatttgctagcaggttttgatttgtattttacagaaataatggtccatgtcagattggaaataataaaaacttgtcttttacccttgatagtttgagaaaaaagtaattcagtggggttagatatggcatccgagagatgattcgggaaaggtgggccagggccatgtttatgtggaccctccaatgcctcagagttcacacttgtttcagtgggcaacaggactagtaaggtttagagggactgttaaccgaaggtgagtggactttgcacattttatggtattttttttttcccagtaggcatgtgcttattctttcttttcttttctaattaaaagttctgtttggtttttttagttaagaggagagactggaactgctcagtgtttcacaaagataactgtttgtatttgataagagtttcgttaaacaaaggaatttgcacttatcaaaacataaagcattgaaaacactgagcacatactctgtgaccagaatgcgtgtgacttgttgagataagccacaccgggtaatcagatgagtctcctttcttcttgggcaccctcatataattcaggcacaaacgaaagagaaaacgctttttctgatctctcagttcgggtcatctctgccttccatcatcaccgcctaacaatcctacacctggcagggtgggaaaacggtttaataatctcttccctttgggaggcgtttgacagctcagaaagcatggcctttactcaggctcagagacacacaaaaacctttcacgttttcctttcagcttcgcagccccgtccttctccacctgcacgggcacccactgaagcacaggacccttctgccaagccatgagccttctcaggcccctgccgcccgcctcgcctgaggctgcgcttctgaaaagcacgcggccctggcctgcgcaccacccagtctgaaggcgacgcccctgcacgaaggagtcaggcctaggggctcgggacccagggcgacactcaattttctaacaggagccacagcccagaagctgagaagccttccggccgatctgtggccctgaggtcgcccttggagggcgagtgagaaccccccaggcgttccggaggtggcccccagcccgaacccggcgcccgccccggcttcccgagtcaggtctttgccccgcctctcggccccgcggcctggccggcaagcagggctgcagtcacggggcggcgcggagggccccagcccagtcaggggtgtggccgccgccaccgtaaggctaggccgcgagcttagtcctgggagccgcctccgtcgccgccgtcagagccgccctatcaggtgtgtttgcagccgaactggcagtgcccgcgggcggctgggccgaggccttggctcctacccgcggg

SEQ ID NO: 40831 - DNA, 2300 bp, Homo sapien
gaagccacacagctccttcagtattttgcttagaaatttcttccatcagatattctagtttatcactcttaaattctgccttctgttaaagccctcaggcatggacacactttagccaagttttttgccacttaataacaaggatagcctttactacagtttccaatacgttgttcttcatttccatctgagacctcatcagaattgcctgtactgtccatatttctgtcagcattctggtcatgaatctctaagaagaatcactcaagtaatctctaagaagttcccgactttctctctggctcatctgctcttctgagccctttccagaacttcccttaatactgcattcattgtaatctaggcttttcctaggctgctcttccaaattcttccggcctctccccgttacccaatttcaaagctgcgttcacatttttcgggtatttgttataacaacccacctctctggtaccaatttttgtcttagttgtgtgagtgtgtgtgtgtgtgtgtgtgtgtgctgctttaacagaataccacagacggagtaatttataaagaatgaaaatttattagctcgtggttctgcaggctaaacagtccaagaatgaggggccacatctggtgagggtcttcttgccacatcataacatggcagaaggcatcgcacagaagaagggcaaagaggggatgagagagatcaaaggagacacaaaccccttcctgcaataaacattagtttattcataaaggtggagccctcatgtcctgaatacattttgaaagtccaaccttataataccgtcacaagcgcaattacatttcaacatgagttttgaaggggacaaacattcaaacaatagcagacatatagtttataaaaaagtgtctaaaccagtgctatccaatagaactttctgtcatgataggaatgttctgtctgtgctgcttaatataatagccactagccacacgtatctattgagtacttgaaatgtggctagtgtgactgagaaaataaatctttagtttaatttaattttagttaatttaaattgaagtgaccatatgagacaattgattactatattggacagcattgaatacatttactcataatctctgtatttacctattgtgcattagtaaaaaacagtttgtggactggtatggcccacaaacccatgctttgagtagcactgtttaaagcatggactctagagctagaaagcctttgtgtatctttggcaaactgcttaatcgcttggtgcctcagtttcctcatttgtaaaataaaggtaataataaactaccttatagagttgttgtgaggattaaatgcattaatgagtgtagcatacttagtacaaggtctgacacacagcatgcactatataaatgcttcctgttattgttattattatttattatgtaggtggtggatatcaaacagttaattggtaacaaagcccagtctttttattaattctctgctttttgcagtagcttagactttttccttttaaaaacataccacagtttgtggcatctagtggcttccaataaataccttttgaacataagcataaagtacttttcaagcacagatgaagaagcaattattgttctgaggtggggggggggttggtaaaattatcaaaaacagatgacagctgagaaggcctcaatggaggagtctgacaggcaaagaggagagaacacacctggtggagggagcaaggacacccatttggattatactctatttaggagactatacagcaggtaacactgacttagccctatcactgctaccaccacttctttctctccttcccagctcttttcttgatttatccttttagcatattttaaacaggattaataggtaacacgtgattctacagttttaagggaggtcaatcgttgcctctttacttgttcattcctcagagtaacagtgcctgaatttgatggtggatgttgggcagtggttgggaagggaaggggaatgctgcttgaaaagcaatccctgggttatgggcagatagctgtgagattcttttcccctaaaacataatgtttcttatttatgtagattatcttaacaagaaaaccaactggaaaaaaaaatgaaattccttatcttcgcatttttcggtggtgttcaccttttatccctgtgctctgggaaagctatatgcaagaatggcatctctaagaggacttttgaagaaataaaagaagaaatagccagctgtggagatgttgctaaagcaatcatcaacctagctgtt

SEQ ID NO: 40832 - DNA, 2300 bp, Homo sapien
agggatgtcgcaacaatagggcaattttggcatccggattggagccactagaaatgaagccaaatttctataaattttcataggccactgtgaaattaaagtcacacgagggtggtacttcattatggtctatgcttccattcaagtttttttttgttttgttttgttttgtttttaacaaacaagagagtggagtcctaaagtgccaaaacctaatctagacaccacagttgccaatgcaaatcactagtagcagctacaggtcaaaacctatcactgtgaacttggaagaagagtttaaattaatctgtttttctgaaaactcacagtcatctctgattcctctgtctcctttatcccccatatgtaatcaatcccccaatactgataattttactccttagaaatcaataccaattgaaatcatgaactctgttcaacccccttacactctcacagcaggccctcattacctctcttttgaactattacaggtctctactccctggccctcccataccaccggtgtgccagcctccagcctggctcctttttaccttcacagagctgccagagtgaacaagtcaaactactgaagagtcagatctgccccaggcagcatccccaacccctcttccccatttccacttctgccgaaaacccatcatttcaacatccaaagtctgcctacctatacagacacttttccctgtatagacacctacctatacagacaccttttcccaccttcatcatgtgaccagtacctatgcatccctcaagattccactcaagaatcacttctttagggagcattccctggcctcttgtctcctgtaacatcagggaagcctggatcaggtaccgcccttctctggactttcagagtacctgggacatatctgggaattgacttaatgaaactctctctaccccttaaactgtaatttcctccatttgggtccatgttcattcttgtttgtgtgtcaagggactaacccagtgcctggcgtacatgtagccagttggtcattaagcacccctggagttgtgctgctccaaataagagactgctgactggatctaaagcatttccatgaatgttcagttttacctttaaagtttgatagcccttctcccataggaactcagcagtctgattcccttacacctacagtacagctgcagaacaataaccaagcaaaagaggccttggggcactcagaatagaaataaaaattccaagtacaaaaacttgaacacaagaaagctcttctgatctcttagagcctggttacccttactttacacaaaattctacatctggcatttaaacctatcagctatgagaaacaacaaatcaaaaagaggaaataaggtctgaaaactgacaacagtaccacaaaaaacaatgttggagtcagaaacatataaaataactaacactaagagaactttctacagtgacagaaatgtttgatatctgtgctaacacagtagccattagccacatgtggctattgaccacttgaaatgtgactagactgactaagaatctgaatttttaatgtcatttaatttcaattaatttatacgtacatttaaatagccacatgtgggtagaactcacaatgactgcaggctcaggccattgcataggacaaacagatgacagcatctcttctggccctgagggacttgtttcatgaaagtccaataacagatgtgagccatggtgatgacctcctccagcagtcacagacaaggtgggccactgtattcagtagccattgtttgggaaggcagggtgtgtacaaaatactttaggaagatttttgctcaaatggaataaaataaaactagaccacctagaaaattttacccttccatattagtttgtgttttgacaccttataccaaagggaatattcatgcctgcctacaaatcagcaagctcttactctttactctcatctcccttcttcccatcctcccattccaaaagatagttcatgaaaacctctaagaacacaaaacctgtgtcatattcacagtaaggcctaccctaatgtccctattaataattgcaactctctcccaacctcctgtacctcttagcttgtttaattttttttacagcatttatcagtttccagttgtacccctacaataatgtaagttccaagtgcctgaaatagtgcctagcacataatgtgtgaaacacacacacacacacacacatacccataacccactgaatgaatgaagagaaaccgaaaaaataaaagtataatacccca

SEQ ID NO: 40833 - DNA, 2300 bp, Homo sapien
agttttcttatctcgaaaatgggaatgatatcaacacctcctttgtaaattgagataatgcatttaaagcacctagtaaagtgcctggcacaaatgatacaaaatactagttgccattatttttataatttctactatcatcttactgcgtaccaaatcgctttgacgcccggcattatagcatccacctttacgttctctggagttaaggtaccagagcaaatccctcagcaaaggtgttcaaagagagacacacacgcccgagcactttcttcatgacagatgccacaagagataactggaggagctgaagatgtttagtttagaaaacaggtgatgggggacaggtggtgatggctcttagcgttgccttgttcaacgagaccctgagagcacgatgagcccgcgcggaagagatgaaatggcagcacccccgcgagcgcatatcagagaaactcgccgagacctaaagcgagtccgcgcgagatgggggtgggagcgcccgcgggggtcgtctcctgcgcagccgcagcggcggcgccaatcaccgggcgcatcacgtcctctcgcgacggtacagttgtacgttcgtgacgtcggcggttgccgtggagagacccgctcggtcccgaccgagagctggcgtcaggagccgcagggtcacagcgtgtctttgaagctgcctccgccgccaccatgagcggccgaagtcggggtcgaaagtcctcccgcgccaaaaaccggggcaaaggccgcgccaaagcccgagtccgccctgctccggacgacgccccgcgcgacccggacccttcacagtaccagagtctcggggaagacacccaggcggcacaggtgcaggctggcgcggggtggggtggcctggaagccgctgcgtccgcgcagctcctccggctcggggaggaggccgcctgccggctccccctggactgtggcctcgcgctgcgggcccgagctgcgggggaccacgggcaggccgcggccaggcccggcccggggaaggccgcatctctctcggagcgcctggccgcagacactgtcttcgtgggaacagcgggaaccgtgggaaggccgaaaaatgccccccgcgttggaaaccggcgtggccctgccgggaagaaggccccagaaacctgtagcaccgcggggagggggcctcaggtcatagctggtgggaggcagaagaaaggggcggcaggggagaatacctcggtgtcagctggggaggaaaagaaggaagagagggatgcagggtcggggcccccagcgacggaaggcagcatggatacgctggagaacgtgcagctgaagctggagaacatgaacgcccaggcggacagggcctaccttcggctctccaggaagtttgggcagttgcgactgcagcacttggagcgcaggaaccacctcatccaaaatatcccgggcttctgggggcaagcatttcagaaccatccccagctagcatcctttctgaatagccaagagaaagaggtactgagctacttaaacagcttggaagtggaagagctcggccttgccagattgggctacaaaatcaagttctacttcgatcgcaacccgtatttccaaaataaggtgctcatcaaggaatatgggtgtggtccttctggccaggtggtgtctcgttctactccaatccagtggctcccagggcatgatctccagtccctaagccagggaaacccagaaaacaaccgtagtttctttgggtggttttcaaaccacagctccattgagtctgacaagattgtggagataatcaacgaagaattgtggcccaatcccttgcagttctaccttttgagtgaaggggctcgtgtagagaaaggaaaggaaaaagaaggcaggcaaggtccaggaaagcagccaatggagactactcagcctggggtgagccaatccaactgatcctgcacaagtctccctgctacctcctgctgggctgctcctggttgactacatatttggctctctgccttctcttcatgttggcctctgtgtactatagaccctttggactttagttacaagaatatggcatttatgatcatgttcttttgcctcccatagcctcttgcttttctacgttagtgtcacatgttatgtgatcgcacccggactgttcatatgttaagcacacatactttagatgtgtgctccctgttatctacattgcctggaccttgttcttggctctggcctttcctacttgtctttaacatggacactcatgagtcatcctccaggacgaccagtgc

SEQ ID NO: 40834 - DNA, 2300 bp, Homo sapien
gtttagtaggtttccatgagttgatctgagaatacagcatccatagcattgcttctgtgggaaaaggggagctattctgaacttcagacaatcatttacaaacccatttttgaaaactctgctttgattggttctttctttcaacaagtatttattaagtgctcttgatatgtcagacactgttgcaggcactgaggatacatcagtgaacaaaacaaaaatctcttccctcatggagctgacattctagagagaagagatagttaataagcataataaataattggtatagtgtgttggaataaagaaaaagtaccataggataaagggatggggtgggtggcaattctaaataggatggtcattgagaaggtgacatttaagcaaagtgtgaaggcagctggccaaggccaccaaccacattgggaaagagcatttaaggtagaaggaagagccagtgcaaaggctctgaggcaggagtttacctagtgagtttaagaacagcaaggaagccagtgtagctagaggtgggagagaggagagagaagatgaggtcagagaggtaactcatgtagtggcagatagaagacttgccagatcatacagggccttgcaggctattctagagcttttgagaaaatgaggaatcacttgtattaggccggcttaaaatagggccatctgtataaaaataattcctctttaaattgtttccttaaacttaggggtgtatacaaatcacccaggatcttgttaaaattcaaattctgacttagtaggtctggggaaaggcctgagattctgcatctttaacaagctttcaggtgatatcaggctgctggtccacaaccacactttgagtaatgaggtcccggggcttttgggcttatctctccactagctggttacaagggcctttttgttccctttgagcctgaaaagaccacctcaaaaggtttttctttatatttttacattagccacaggtcccctcactgttcatggtcctattacctcactagtaagagcgtggtccagggctgcctccgggactgtgggggaggttgtccggctgtttccatgcacagtgtaagaagtttctagggcttctgcagtgccacgtggaggctctgcttctgaacctcaatctgctccctgaataataatttcacctctcaccacattcttgtcttactccaattacaggagctctaatacaggtcttcacttctggtcctatacctagagtgatagtccagatctgtaaactgaggcagctgggggactcgggtgatgttcccaggcagaagaggtggtcaggtggtccacggaagcctgtttgttaaggagcaaggctgatttcttaagagccagcccagtaattgacagtggaacaagtctggaaggacttgccatttccaaatataaggcataggatacggagtcccatgggcttgagtttgaattgtgcttccatcccttactgtgtaacctggggaatgtgcccgggtgtctctgagatgcagttttcttatctcgaaaatgggaatgatatcaacacctcctttgtaaattgagataatgcatttaaagcacctagtaaagtgcctggcacaaatgatacaaaatactagttgccattatttttataatttctactatcatcttactgcgtaccaaatcgctttgacgcccggcattatagcatccacctttacgttctctggagttaaggtaccagagcaaatccctcagcaaaggtgttcaaagagagacacacacgcccgagcactttcttcatgacagatgccacaagagataactggaggagctgaagatgtttagtttagaaaacaggtgatgggggacaggtggtgatggctcttagcgttgccttgttcaacgagaccctgagagcacgatgagcccgcgcggaagagatgaaatggcagcacccccgcgagcgcatatcagagaaactcgccgagacctaaagcgagtccgcgcgagatgggggtgggagcgcccgcgggggtcgtctcctgcgcagccgcagcggcggcgccaatcaccgggcgcatcacgtcctctcgcgacggtacagttgtacgttcgtgacgtcggcggttgccgtggagagacccgctcggtcccgaccgagagctggcgtcaggagccgcagggtcacagcgtgtctttgaagctgcctccgccgccaccatgagcggccgaagtcggggtcgaaagtcctcccgcgccaaaaaccggggcaaaggccgcgccaaagcccgagtccgccc

SEQ ID NO: 40835 - DNA, 2300 bp, Homo sapien
gcccatgtatcccctgaatctaaaataaaatttttttaaaaaggaaaatcaggattagatgcgtttaagacctggatgctttcaggaagcagggggattttattgttgggtatcttaaacaggcctctataaggtaggagtaaggaatcaggccagagctctgattggtaaagaagcagctgtctggctgggcgcggtggctcacatctgtaatcccaccactttgggaggccgaggcaggcggatcacctgaggtcgggagttcgagaccagcctgaccaacatggagaaaccctgtctctactaaaaatacaaaattagccgggcgtggtggcgcatacctgtaatcacagctactcgagaggctgaggcaggagaatcgcttgaacccgggaggtggaggttgtggtgagccgagatcgcgccattgcaccctagactaggcaacaagagtgaaactctgtctcaaaaaaaaaaaaaaaaaagaaaagaaaaaaggaaaaagcagcagctgtcactcattagcacaacagggggatgtccggtcatttttgtgcgttgaacaatgtttatatttttgtccatgctcaggcatgtttatggagtgttcttgtttttgctttgattcattacagttgtggagtggactggcgtgatattggggttctgtgaaattgtctgtgttcaacaagactatgagtgccaacaccagctcctagcagcaccaagtcctggctgacagaaccaggccatttctgggatgttaggacctgtttttcttgttctcaatttggtacactctgtacagctatattgattgttaaaatatagaaatacttctgtactgcgtagtatttagccatggccatgagccttctgagggctttctcatctccctgcctggtgcctgcttcccccagacctccccacaacccactggttagtggtagagcgggaaaccttctagaccttgctgcagttcaaccgctagtgtctgttctgatgagtcagtgctgtgtggtcccgtttggtaacattttcaacattacctggttttgagtttgtagcttctctctacattaagattgagaagggacaagaagacagaagaaagaagagagaaacaaaaggcaaaagagtgaagtgtaaataagtgagggtgaagataggaaagggtgaaagacgtctagaacatgaagaaggctggacgtggtggctaaggcgggtggatcacctgaggtcaggagttcgagaccagcctggccaacgtggtgaaaccccttctctactaaaaatacaaaattagctgggcatggtggcacatacctgtcatcccagctactcaggaggctgaggcaggagatttgcttgaatctgggaggcagaggttgcagtgagccgagattgtgccactgcactacagcctgggtgacagagtgagagtccatctcaaaaaaaaaaaaaaaaaagaaaatgaagcagaaatgaggcctgaaaagtgaacttaacaaagggtttaaaaaaaaaaaaaaccctgaaaagaaagaggtgagaaggaagggaggaagagaagaaggggactgagaaccagaggaaggaaaggaaaattcaggccaaggcacccccttatgttacactgcggttcagttatactgaatatgtctcagaatgagttcgctaccagctggagcttagaaaacaatcatttcattcaacagaagtttgggttggagttggatcaaatttgacagagtttaacctgtaaagaaaagaaggaaatggaactccgcagtctgacggccacttatggccaagcgttctggaagctgttagaatccgcagcttggcgccttcaccgcttttctttctgtttgcatcccatgatgctcttttcaatcacaacttgcatggttcctgtgcaggtatgaaaaatctcactgtctttgagttgggatgaaaaacagtgagtgtttccctgccaagtctccgatagaaggcagtgcgaacagatggtggaggaagctgcacagagaaccttggttcaccccaccgtgatgtgagcagggaatcacacacgaaggctctttctcttcctcctgtgaataacttttacaaataaccagcaggaaccggggagtcggtggtgggggcacgcatgagtttcctttcctctgaagccttggttctttaaattggcagcataaccactgttcccgtgcacacacggatatttgaaggcatcagtgaaaaggatgcagggtaaacatgaagcagaggacacggtgggttggcagatgtgg

SEQ ID NO: 40836 - DNA, 2300 bp, Homo sapien
ttgtcatttacaagaaattagaattcccactttaggccagacttgattttaacttctttacatatggcaccacttcaatttaaaggtttttttgttttgttttgagacagaatctccttctgtcacccaggctggagtgcagtagcacgatctcagctcactgcagcctccaccttctgggttcaagttattttcatgcctcagccacctgagtagctgggattacaggcgtgagccacagcaccagccattattgtaatagtttaatttgaaaattcacaggtgggccgggagcggtggctcacgcctgtaatcccagcactttgggaggcccatgcgcgcggatcacgaagtcagggcgactgcagcctcggcaacacagcgagactccatctcaaaaaataaaaaataaaaaattcacagatgtttatctagaatggtcagaatagtcagtggaacttcttaggaaaatcatgacccttcacatctctagaaccaaaacacgtgcagaaatcttatttcacaaatataaatggaatttggaaactttgagttaaagcagatcccaataacatttgctaagtttttggcctcctaatttaatttagtctttaatcataagtcttggcaagtgtagtatgcttttattatttattatttacaaaactcccttccacacatgaatcacaatatgcattacgacactgttgcaaaataggtcaaaatacatttttggtatttggtggttattaatattacccctgctgtattccttgagaaagcctgtatttagttcacttaagacagttgcttacacgctaatgatcatttaccgataaaatacagagtttccttatagcaaaatataatcttaaaaccctaaggcagccttcaagcatttcccttataattaaaacctgaaggcctggcgtggtggctcacgcctgtaatcccagcactttgggaggctgaggtgggcggatcacgaggtcaggagatcaagaccatcctggctaacacggtgaaaccccgtctctactaaaaatacaaaaaattagccgggcgtggtggtgggtgcctatagtcccagctgctcgggaggctgaggcaggagaatggcttgaacccaggaggcggaccttgcagtgagcggagatagtgccactgcactccagcccgggcgacagagcgagactcttgtctcaaaaaaaaaaaatttgaaaaggcagttcgtttccttctatagctgcatcccagagatggtcaacatagcatataaaaatggaatttttgcaaaccccttttgcagtgttgtagaaaagcttaaaataaaacgtaacgagaaagctccctccataagtaaatacaatctaatgtgcttccccttatgtgttattaaagctacaaattagtaggaaaagaatagtgccgcccacgggctttccaacttttgaattctggggactaacaacagagagcaagagtgaatgagccaaacgacgcaaacgtgccctcgccaggctggcaactggtaggcacgcagtgtattagttgccctggagagaaacaccctggagagaaatacccaatttgtgaactaaacctaggtcccggaagaacagtgttcggcgtcagactccgttgagctcattctggaaggatccaactggcgccaccagggagaaaaagcgattccacctcaataacactccagaaaaaggcatgaagagccctatacctgccagggcgactttgacctagacccggtgacccggttcctagcgctgcagccctacccgccccccgcccgcccccgccttgcacggagcccctcctctgtactcattcgttgcgccacgtctcctaactctgcgccaccagccaccccgcgaaggcgtccaccaattaacccctcccagcttctggtctacagtaacgggtccccaacgccgcgtcttaaccaggcccgaaccgaccaccgccaaccttccctgacacgcctttgccccacccgaccccgcccgcccccacgtgacgcccacgccccgcccactggcgcccacgtgacccacggtcgtccccgcgcgcggcgtggatcgcggcccaagccgccattgttccgccgagggaggacagcggggcctggcgctggcgccgagacgccgcttagcggccgccactggagacactccctcccgcctcccgggtctcctggcggcggcggagtgaggctgacagcggggaacctgggagacccctccgccctccccgcggtggcagcggccgatccccggctccgg

SEQ ID NO: 40837 - DNA, 2300 bp, Homo sapien
atcataagtcttggcaagtgtagtatgcttttattatttattatttacaaaactcccttccacacatgaatcacaatatgcattacgacactgttgcaaaataggtcaaaatacatttttggtatttggtggttattaatattacccctgctgtattccttgagaaagcctgtatttagttcacttaagacagttgcttacacgctaatgatcatttaccgataaaatacagagtttccttatagcaaaatataatcttaaaaccctaaggcagccttcaagcatttcccttataattaaaacctgaaggcctggcgtggtggctcacgcctgtaatcccagcactttgggaggctgaggtgggcggatcacgaggtcaggagatcaagaccatcctggctaacacggtgaaaccccgtctctactaaaaatacaaaaaattagccgggcgtggtggtgggtgcctatagtcccagctgctcgggaggctgaggcaggagaatggcttgaacccaggaggcggaccttgcagtgagcggagatagtgccactgcactccagcccgggcgacagagcgagactcttgtctcaaaaaaaaaaaatttgaaaaggcagttcgtttccttctatagctgcatcccagagatggtcaacatagcatataaaaatggaatttttgcaaaccccttttgcagtgttgtagaaaagcttaaaataaaacgtaacgagaaagctccctccataagtaaatacaatctaatgtgcttccccttatgtgttattaaagctacaaattagtaggaaaagaatagtgccgcccacgggctttccaacttttgaattctggggactaacaacagagagcaagagtgaatgagccaaacgacgcaaacgtgccctcgccaggctggcaactggtaggcacgcagtgtattagttgccctggagagaaacaccctggagagaaatacccaatttgtgaactaaacctaggtcccggaagaacagtgttcggcgtcagactccgttgagctcattctggaaggatccaactggcgccaccagggagaaaaagcgattccacctcaataacactccagaaaaaggcatgaagagccctatacctgccagggcgactttgacctagacccggtgacccggttcctagcgctgcagccctacccgccccccgcccgcccccgccttgcacggagcccctcctctgtactcattcgttgcgccacgtctcctaactctgcgccaccagccaccccgcgaaggcgtccaccaattaacccctcccagcttctggtctacagtaacgggtccccaacgccgcgtcttaaccaggcccgaaccgaccaccgccaaccttccctgacacgcctttgccccacccgaccccgcccgcccccacgtgacgcccacgccccgcccactggcgcccacgtgacccacggtcgtccccgcgcgcggcgtggatcgcggcccaagccgccattgttccgccgagggaggacagcggggcctggcgctggcgccgagacgccgcttagcggccgccactggagacactccctcccgcctcccgggtctcctggcggcggcggagtgaggctgacagcggggaacctgggagacccctccgccctccccgcggtggcagcggccgatccccggctccggcgcgagggacggccgcgatgcgctcggcctgaggttacccggcccggcccttcctcgcttccctcgactattccactgcgtctccgcgccccggcgtcatcctgcgagtccctctgacgggagggaagatggctgcacggagctggcaggacgagctggcccagcaggccgaggagggctcggcccggctgcgggaaatgctctcggtcggcctaggctttctgcgcaccgagctgggcctcgacctggggctggagccgaaacggtaccccggctgggtgatcctggtgggcactggcgcgctcgggctgctgctgctgtttctgctgggctacggctgggccgcggcttgcgccggcgcccgcaaaaagcggaggagcccgccccgcaagcgggaggaggcggcggccgtgccggccgcggcccccgacgacctggccttgctgaagaatctccggagcgaggaacagaagaagaagaaccggaagaaactgtccgagaagcccaaagtgagtatgggatgagcggcagtagagaacgggcgaagggcgggcgtggagaccctcgagcttgggggaggccgcgccccagccgggaaggaaaagagtgcttag

SEQ ID NO: 40838 - DNA, 2300 bp, Homo sapien
atttctaattaagggcctacacttgacatggtagggatggctcttggttccaggataaagctacatagtaagaaagttgcagctttaaagactcgtaaaactaatcagttctgtaattgaatagttttaacagtatctttcttcctatttagcctcatcttaggaaatttagatcgaatcaatttttttttttactccatgtctgaaataaaactttcacccgtgctaataatctaacctatctcagattcttggctttgacagtagtccgtaggctaaccgcagacaacggtgcttctacacaaaacacgaattgggaggaaataaactcctccaaaacatagaactatctttcactatctctaacactgtgttgtgtcttgcagaggccttgtgtaactggttggatgactgtttctcttttttgttttgagaagtgtctcactgccgtcgcccaggctggagtgtagtggcacaatcacggatcactgcagactcgaactccccggctcaggtgattctcccgctgcagccagcccctggagtagctgggaccacaggcacgtgccaccaagcccggctaattttgtcttgtttttgttttttgggatggagtttcgctcttgttgcccaggctggagtgcaatggcgcgatctaggctcaccgcaacctctgcctcccaggttcaagccattcttctgcctcagccttcccagtagctggaattataggcatgcaccaccacgcccagttaattttatttgtatttttagtagagatggggtttctccatgttggtcaggctggtctcaaactcctgacctcaggtgatccccccgccttggcctcccaaagtgctggtgttactggtgggtctttgttcttagagctcccaagatggtggtgggccactcccaagatggtggcggctgctcccaggatggcagcaagcctttcgttctctgacctggggttcttggcctcacggatttcaaggaatgggaccttgggccatgcagtgagtgttatagctcttttagaagtcgtgggtcacggaagagaaccgtggaacccagcgactagtgttcagcttgattaggaccaacccgggcacttagccgcacaggaacaatggcgagcctctagcccaaacaggagcggcaatgggcacctcgctggatcagaaacgcaggggacaccctgccggatccagaggggtggaagtcaacggcgggtctgcaacagcggcgaacagcagtggtggacggtgagcgaaagctcagctccaggtggaagagtgtgcagctgcaagatttaatagagtgaaaacagctcccatacagtgggcggggacccaaagggggttgcccactcccggctggaatgcctggggtttatatcccaatcattgtccctccccctgtgctctcagatgatagatgatttgactatttctttacctcttgcttttagcttaattggtgttttagtgagccctttttactacctgattggtcaggtgtgagctgagttacaagccccatgtttaagggtgggtgcggtccccttccccaggtaggtttaggaattcttagtcgccccaggaaatccgctactcttgtctctcactgggattacaggcgtgagccaccgcgcccagccaattttggtattttttgtagagccagggtttcgccatgttgcccaggctgggactgaatctttagagctgcactcatgattaaaaacgctgtgccaggcgttgtggctcacgcctgtaatcccagcactttgggaggctgaggcgggcggatcacgaggtcagaagatcgagaccatcctggctaacacggtgaaaccccgtctctactgaaaatacaacaaattagccaggcgtggtggcgggcgcctgtagtcccagctactagggaggctgaggcaggagaatggcgtgaacccgggaggtggagcttgcagtgagccgagatcgcaccactgcactccagcctgggtgacagagcaagactctgtctcaaaaaaaaaaaaaaaaaaaaaaaaaaaaagctaccggaagcacagcgaggatgtccttgacacacatcctattttctgggaaaagattactaccacagtaattgagctgtgaagcggagacaaattgctctcggtggtggttcaaagtactgcaattgactggaatagcaccgcgcagttttccttcctctcgtgcaagataagagtgataggagctgtatcgattacctgcaagatagaagtagaagcgggccgggtgcggtgg

SEQ ID NO: 40839 - DNA, 2300 bp, Homo sapien
cgctgcagccagcccctggagtagctgggaccacaggcacgtgccaccaagcccggctaattttgtcttgtttttgttttttgggatggagtttcgctcttgttgcccaggctggagtgcaatggcgcgatctaggctcaccgcaacctctgcctcccaggttcaagccattcttctgcctcagccttcccagtagctggaattataggcatgcaccaccacgcccagttaattttatttgtatttttagtagagatggggtttctccatgttggtcaggctggtctcaaactcctgacctcaggtgatccccccgccttggcctcccaaagtgctggtgttactggtgggtctttgttcttagagctcccaagatggtggtgggccactcccaagatggtggcggctgctcccaggatggcagcaagcctttcgttctctgacctggggttcttggcctcacggatttcaaggaatgggaccttgggccatgcagtgagtgttatagctcttttagaagtcgtgggtcacggaagagaaccgtggaacccagcgactagtgttcagcttgattaggaccaacccgggcacttagccgcacaggaacaatggcgagcctctagcccaaacaggagcggcaatgggcacctcgctggatcagaaacgcaggggacaccctgccggatccagaggggtggaagtcaacggcgggtctgcaacagcggcgaacagcagtggtggacggtgagcgaaagctcagctccaggtggaagagtgtgcagctgcaagatttaatagagtgaaaacagctcccatacagtgggcggggacccaaagggggttgcccactcccggctggaatgcctggggtttatatcccaatcattgtccctccccctgtgctctcagatgatagatgatttgactatttctttacctcttgcttttagcttaattggtgttttagtgagccctttttactacctgattggtcaggtgtgagctgagttacaagccccatgtttaagggtgggtgcggtccccttccccaggtaggtttaggaattcttagtcgccccaggaaatccgctactcttgtctctcactgggattacaggcgtgagccaccgcgcccagccaattttggtattttttgtagagccagggtttcgccatgttgcccaggctgggactgaatctttagagctgcactcatgattaaaaacgctgtgccaggcgttgtggctcacgcctgtaatcccagcactttgggaggctgaggcgggcggatcacgaggtcagaagatcgagaccatcctggctaacacggtgaaaccccgtctctactgaaaatacaacaaattagccaggcgtggtggcgggcgcctgtagtcccagctactagggaggctgaggcaggagaatggcgtgaacccgggaggtggagcttgcagtgagccgagatcgcaccactgcactccagcctgggtgacagagcaagactctgtctcaaaaaaaaaaaaaaaaaaaaaaaaaaaaagctaccggaagcacagcgaggatgtccttgacacacatcctattttctgggaaaagattactaccacagtaattgagctgtgaagcggagacaaattgctctcggtggtggttcaaagtactgcaattgactggaatagcaccgcgcagttttccttcctctcgtgcaagataagagtgataggagctgtatcgattacctgcaagatagaagtagaagcgggccgggtgcggtggctcacgcctgtaatcccagcactttgggaggctgaggcgggtggatcattcgacgtcaggagttccagaccagcctgaccaacatggtgaaaccccgtctctactaaaaatacaacaaattagccgggtgtggtggcaagcgcctgtaatcccagctactcggttggttgggcaggagaatcgcttgaacccgggaggcggaggttgcagtgagccgagatcgcgccattgcactccagcctgggcgacaagagcgagactctgtctcaaaaaaaaaaaaaaaagaagtagaagggaagaaaatcgcaaggaactagactaaaagaatctcgacccttgaatggagttacacgaacggccagatgaaagaaggaaggcccggacctccactcagggccgactaggggactggcggagggtgcacgctgatggatttactcaccgggtgcttggagctccagcagctggctggagcccgcgatgacgtcacggactcgggtcacatggccaagtccgccccgccc

SEQ ID NO: 40840 - DNA, 2300 bp, Homo sapien
taattatcaacttgcaattcatcctgaaggtaacccagaaatcatttcattgtttgttctgcctttatatttcaggacattgaacttgcttttccttcatttttttctggcagacctgaagatcatcccacaaggtagaacaactcatttaacctatttgacttggccccaagtgtaatttgtacatagattaactattctgaagaattccaatagaactccctggggggaaaacacccattttaattggcatacaccagagtcactggaatcagttactaaattacaatttccttacaatttggaagggtttggggattgttattgttttcctggtaaattactggatcacactggtgtcttggaataagtcaacacattttaaatttaagtttccataaactgtagctcaacttcccaagttcctaggggattttcactggcccagactcaggaagaattttcttctatgggatccaagacttcagagaccaaacatttcctgaagactttcctctgctttctgacctccacctacctcctcccaaagacataacaaaaaaactatttgtgatcagtgcaggcagccaagagtgcccagtgggcctaaggtactgggtaaaggaacaggaatccacaattctttcttggtattaaggtatcattgacttgcctgatggctcgagtatgttaaccccttgcttcatggctggaattttaattacccctcctggagcttttctgaagaattgattttggcgtttattcatatttcagaaatcaactctatcatcaaataggaatgatggttaattacaaaacaaagtccgcccaaagcaccaaattatcagactgtggcacatccagaggttttgaaactagttagtgctgctgcctctgctggtagcttgttaaaacctgaactggggccgggcgcagtggctcacgcctgtaatcccagcactttgggaggccgaggcgggcggatcacgaggtcaggagatcgacaccatcctggctaacacggtgaaaccccgtctctactgaaaatacaaaaaaaattagccggccgtggtggcgggagcctgtagtcccagctactctgaggcaggagaatggcgtgaatccgggaggcagagcttgcagtaagccaagattgcgccactgcactccagcctgggcgactccgtctcaaaaaacaaacaaacaaacaaaaacacaaaacctgaactgggtgcgttggctagtggtttgggaacagaattttggagctttataggagatgtcctggtctgttatacatccactcaccccagcctccaggaactggggagctggtagaggggggtgccggccactttgactgtcgctggccaatcctgtcttctgcatccctccaaggctccatggggacatccaaggtgaggttcctccattctgcaaagttgcaaatgtctctgctcataatttcaaaagtcttgtctgaactagactttccctgctccctcggggtaggaattttgtctcctctccatcctggcatctttacctcctccccatcccggggcctggtccccagccagtggacgctctgttaatatgaactggcactggtggggtgctctgggcactggcaagacagctcttggcgcttgtcatcaattagcccaattctcaccacttttttctccatccccgcgtcagtgggtgcgtcccgcaggtcatgaccccaagttctagatgtaagattcctgccatgtctcctttcccccagaagacccctccccgcactcccaacccgacaggcccctaaagctgcctgtgttccgtgcctgcggctccggacccctggagtctgatgcccgcctgggctcaggcacggacggagtggagccaggtggcagcaggcagggcgcgccgccagagtgcccagctcccggggctgcccacagggtggggccgccctcgccgccgctccctctccgcgccttccccatccccaaagaggacacccctccttccgcccggcccgctccccacccccgccgcggcaccgcctccccagccgcccgcccttgcccagcgcctcccaggcagccagcgagcgaagggagcgctctgggatgggacttggagcaagcggcggcggcggagacagaggcagaggcagaagctggggctccgtcctcgcctcccacgagcgatccccgaggagagccgcggccctcggcgaggcgaagaggccgacgaggaagacccgggtggctgcgcccctgcctcgcttcccaggcgccggcggc

SEQ ID NO: 40841 - DNA, 2300 bp, Homo sapien
tgctcatgcactctgagcatgtccactagtgaccgtgaaaacgctgtgagtattggtttgggcttacaaatacattttagtgagtaggcaaattcacaaatatggaatctgtgaagaatgaggatcaactgaacatgtcttcacagtttgatatctctgaaactggggtgcattttagattccatgaaatacagtacatgtatcaacattgatagaatctgtgattaacgttgagtgaaaactgaggtgaaggtcaatgtatataggatgaacctacagatgtaaaataagacaaaatgccaccataattctcctttgctataaaatggttagcaggtatcttcagcattccccaggcactattctcaacactctaccatctccattaatttaacctttttgaggttcttatgaggtaggtgctatttttattctcatgtcttataaagaagttaagaaaattgcacaaagggctgggtgtggtggctcatgtctgtgatcctaacactttgggaggctgatgtaggagaatcgcttcagctcaggagtttgagaccagcctgggcaacatagtaagacatcatctctatttttaaaaatgagaaaacttctattttatttaaaaataatgataacaataaaagaaacttgtacaaggtcacaaaaaaagctgtttgtttcaccctgaagtaaaaatgactgattggatctacaaactttcctagtgatatttgtatcctaacaggaaccaaaacacagacaatcaaactcagaacagtacattctaaattgtattgttgtgaaatgaaacagctttacttccctagttcatttattgcccaccatatttcttactccaatgtagagacataaacttcagatggatttaatcacagctgagttttcacaagcgctggattaatggaattgttctaagcttttgagagctccttttattttagcttcataaaaatatatttctacatatagacatcttttttgtttatgagaacacttgcataacttgttatgtttgtactgttgcttgttaattttaaatacaatcaagttacattgagtaaagtcataaattaggacattaaaaaaagagaatttttatgagctacagacagacttatgcaggaaccaatgtaccagaaagctgaggtacttcaagaactaaatgcagagggcaggcgtggtggcttatgcctgtaatcccagcactttgggaggccaaactgggaggattgcttgagcccaggagtttgagaccagcctgggcaacatagtgaaaccctgtctctacaaaaaaaattttaaaaattagccgggcatggtggcacacgcccatagtcccagctactcaggaagctgaggtgggaggatggctttagcccaggagtttgaggctgcagtgagccatgattgtgccactgctctccagcctggaagacagagcaagaccttgtctcaaaaaaaaaaaaaaaaaaaaaaaagaaagaaagaaagaaaagatgctaaataggtatcttaaattgagacataaagattacagaaacatgaaacgtgtgagtgcattttttactccaaaattgtgtgtatacttttgcatattaaaaatttacgttactcttgaaacatgattttgagaaactgttggttctttaacacattcttgcttatttaatagcttttcctccagccccattgctgcttcctaaaaatccacacttaagtcaaagtcccctctgatgctggcaaacttttctgattccccagcccaccacatgggtattattaagttgaattggaaatttcttgcttttttttgtagatcaaaaccaatcaagtatcagcaatttcatatagttcagcctaacactgtttctctttgattttccatggccctttatctggccctgtcttgtccaccttggactgtgagcccccttgagggtagggactgcagcttatttctctgagtcctgcccagaggagagagtaggcactgaataaatgcttgctggctggaatggagtgagaaagggcatcactgttgacttaccttcctgtgtcttccctttcagcggcccatatgtgcagcaccctggagcataactgtgcccacttctgcatcaacatccctggctcatacgtctgcaggtgcaaacaaggctacattctcaactcggatcagacgacttgcagaagtaagattgctttgctgatgtatttgtggtttcttcctattccctcatcctctcccttcttttatctgggctcattttattcatctg

SEQ ID NO: 40842 - DNA, 2300 bp, Homo sapien
gtattacaattatattgtttataaagactcccagtgttttaaagctacattatgaagcatttatggacaaaataatacaatgtctgggccaggtgtggtggctcactcctgtaatcccagcactttggaaggctgaggcaggtggatcacgagatcaggagttcaagaccagcctggccaagatggtgaaaccccatctccactaaaaatacaaaaattagctgggcacagtggcaggcgcctgtaatcccaactacttgggaggctgaggcaggaggattgcctgaacctgggcggcagaggttgcagtgagccaagattgcgccactgcactccagcctgggtgttagagtgagactccatctcaaaaaaaaaaaaaaaaaaaaaaaaattactcaggcatggtggcatgcactggtaattccagctactcaggaggctgaagcaggagaattgcttgaacctgggaggtggaggttgcagtgagcctagattgcgacattgcgcttcagcctgggcgatggagcgagactctgtctcaaaacaaacaataataataataataataataataataataacaacaatacaatgtctggggtttgcttcaaagtaatgtgggatcttactatagagagtggggacatagctgaaagccaagcagccatagattgattctcctgaagctgggtgatatgtacatggatttattatactactcagtccatttttgaaattggacattattgtatattttgcttaacatttccataagtttaaattgggaaaaattggcatctcactcaacattttttcctttcaagaatattgtatatctttcccttactcagtttgtttcctctggtatggactgggaactctcatttataccaaattatttgttaggaagattatttatgcagttcaaatgttccttaaaataataaaaaccctcatcaaaacaaagactccttttaagattccatcagtggtcatttatttcaagcaattttaaacaatgtgtccaagttccactatgggaaaatattttgctcagattctgcaataaaagtttctttccatatttaaaaatacttatacaaaaaatacaaaaaaaagaaaaagaacaaaaacaaaaaaataaaaatacacaagtaaaatttcattatgaaaaatttcatgaaatacttttaaaaaaatattttggtttaaattaatgtatccctagagatcacattctctgtgaatcttgaggtaaaaatcctatttatgtgcagctgagcccaatgaggtaaccaggaggtgttttgaactcagagtatttatgcctttcactcctaggccttatttttcccaggatatgattttgtgtcttattgtttggctcattgtttgatgggtttaagtggtttggagtttggctttgggaacgtttaattgttttaattgcttaaattcgataaaacactcagctaaaccattctcagcctgcagtctggcaaataccccatcttcattttagtggctcttacatgaatcaagacaaggaaagcatgttcacaaatttgtttgttgcataaacgttttgtaatatgtcaggaagtttgtctttgcctagcagaagagtccaggtataataataataataatagaagaagaagaaggaaaggaagagagaaagaaagaaagaaagaaaaagaaagaaagaaagaagaaaggaagaaaggaaaggaaggaaggaaggaagggagagagaggaaggaaggaaagaaagaaagaaaagaaaagagggaaagaagaggaggagggaggggggaagagggaagagggggaagggaaagaggaaggagaagggggaggaagggaaagagggaggaggagggaagaaggagaagaaggaaagaaggagaagaagtttctcttaggagaggccatatctctaaacatggaagtagctttattgggagaccccttcatggtgtgactctttgaggtgtgggattttacctgtttgggaaaatgaagactggaaatccctggttttcctatgctagctttattgattggtttgccattcttgtgatttttccttcttgccagagatagactactgtgcctcatctaatcacggatgtcagcacgagtgtgttaacacagatgattcctattcctgccactgcctgaaaggctttaccctgaatccagataagaaaacctgcagaagtaagttacagtgggagttggagaagggcttgttctgctaaatgctcctctagttagttttcctttccgtgcaaatc

SEQ ID NO: 40843 - DNA, 2300 bp, Homo sapien
agatgaattcagcggcattgagaccgtggtcgcagccgccgcagcctcttctcatctaccctcccacctcaccttcagtcggcttttcgaactccctccgggttctaagcgcctcgattagttagaccgcagctcgcagcagaacagcaacacaacgccgcgaagcttaaaggcccgcagagggggaaaagaacacccccgccgtcattcttttttttccttctttgagacagagtctcactctgtcgcccaggctgagtgcagtggcgcgatcatggctcactgcagcctcgacctaccgagctcaagcgacctctccgcctcagcctccggcgtagctgggagtagctaggactactggagcgcgccaccacgcccggctaatttcttttttatttcttttttatttttttgtagagacaggggtggtctatgttgtccaggctggccttgagctggacgcaacagatcttcccgcctcaacctccgaaagtgctgggattaaaggtatgagcagccgcgtacggcccccgcagccattctagctagcggtaccaatagcaaccggcagctgccctccgcttttgctccgccccttctgcttgcgatctgtttccgcttccggtcccgcagttccggctctgccgtgaagagctttgcattgtgggaagtctttcctttctcgttccccggccatcttagcggctgctgttggtgagtgggctcctaccgaccgaggtttaggcagcgcggggagctttgcgggttgccatttgtaactccggatcctaaaattcctgtcctgttctctgtctcttctaggttgggggccgtcccgctcctaaggcaggaagatggtggccgcaaagaagacggtgagtgaggcgggccaggcccggaagacgattcacgtggagagatgtcttggccagggcgggcagatgtgagcccacgggggtgacagcatgcctgctggcatttggagggccccagaaggaatcccagtggccctctcaatgacttggggtcctcgacttcggaagtttaaggggctcggcttcaaaaagctgggtccggttttgaggcggttgcaggcgaggcccttaggtccgtatttaatgtttgctttgtagaaaaagtcgctggagtcgatcaactctaggctccaactcgttatgaaaagtgggaagtacgtcctggggtacaagcagactctgaagatgatcagacaaggcaaagcgaaattggtcattctcgctaacaactgcccagctttgaggtaatcgaagagactgaacgggcttcgcctaccgcgaattcatcgtgaacgaatatacaggagtgtaaacttgtaatctgagtaccatgaactcgaacacttgcaggataattacggtagcgattgtggtgtttggcccttcattcccgtctccccgacccacccccaaatcgtgtgctccccttctgtgagcttatttttggaggagaaatgtgtgtgtgtggcaggagtgaaaacagaacatcgaggtttaatggaaacacagacacattactgttttttccatgtattttgtgtcctgcttttttggttcttttagctttgaggtgctttaatgatgcttcattgtgtgaacttgttttagtgtcaaaaaactaggtaagaaaagttgaggctgggctatggagttgcaggctatcatagaatcacctagtttagcccgctaaatcagttctgagtcaagatttatgcttgactcactgttttgaaattgaacttagggggtgttgtaaataagccaaacaaacttggaccttgcagagtataagctatgtgagcaaattttctgtggtgatgcataagctgcttacagcattttatatagggtgtctgtagttaccgtcaaagcctggagggccctttctgtcttgtcccatgggttcggcttttccctaaccattctttgaaactttctttaaagcctgtcttctatagtagtgcttctgaaacatgactgtgcaaaggagtcacatgggtgatgttaaaatgcaagttctgatttcattggatctgggatggggcccgaggtgccatttattattttattttttttaagacagagttttgctcttgtcaccccggctggagtgcaatggcacaatctaagctcactgcaacctctgcctcccaggttcaagcaattctgcctcaccctcccgagtagatgggattacaggcacctgccaccatgcctggctaatttttgtatttttagtagagatggggtttcgccatgctggcc

SEQ ID NO: 40844 - DNA, 2300 bp, Homo sapien
ctgttagttctaaaattagtaaaaaacaaaaagagtttgtttatacaactagagtaatagaggaaggcagatatctggatttgcagtgttaagtaatttatgactaaatattaaagcaagtactatgataatctaattcaacttggttaatttctcatcaaagaggggcacacacttgaatgaatgttatttttattttattattttaaaatatattttattattaattataataattaatataataataattaaagtataatagtaattatactattttttgagacagagtctcgctctgtcaccaggctggagtgcagtgacgtgatctctgctcactgcaacctccacctcctgggttcaagtgattctcctgcctcaccctcccaagtagctgggactacaggcacgcgccaccaagcccagctaagttttgtatttttagtagacacagggtttcaccatgttggccaagatggtctcgatcttttgacctcgtgatcctcccgcctcggcctcccaaagtgttgggattacaggcgtgagccaccgcgcccggccttattactttttttgagagggagtctcgctttgtcgcccaggctggagtgcagtggcccgatctcagctcactgctacctttgcctcccaggttcaagcgattctcctgcttcagcctcccaagtagttgggattgcaggcaggagccaccacacctggctactttttgtatttttagtagaggtggggtttcaccatgttgaccagactggtctcgaactcctgacttcaggtgatccgctcacctcggacttccaaaatgtttggattacaggcgtgagtcaccgcattcggcctgaatcaactttaattgtgaagagacctaagttacctgggctctggtcctagctctgacaataggcctagatatgtaaaatggacaataaaaaggttactatctcatgggacttttgtgagtattaaataaatatatgtaaatgattcctggtacagcacgcgttttttggtgaggcttaattaaggaggggaagaggtttccctcatatagcttatccactggtctgattgattaggtggggattttcagcgcctaatatcttcagtggtctgtctctggacatttataccaagatccaacgttaacagcaaaaatacttttaaaaaattagacctgtttatcgcgctctcagtgcaaactcggctcacaagttcacgctaacacagtcacaaaaggcgagttttgggaaactcgagcagggcgccaccgttctccaggggacaggtaacttgggtgaccgcaggggtgaggacacagctgcttctaccaagcggagagtaaatgcgggtgctgcggcgcatcggagtcacccacaaggctctccaagagccgcgcctcaggacaaagatgaattcagcggcattgagaccgtggtcgcagccgccgcagcctcttctcatctaccctcccacctcaccttcagtcggcttttcgaactccctccgggttctaagcgcctcgattagttagaccgcagctcgcagcagaacagcaacacaacgccgcgaagcttaaaggcccgcagagggggaaaagaacacccccgccgtcattcttttttttccttctttgagacagagtctcactctgtcgcccaggctgagtgcagtggcgcgatcatggctcactgcagcctcgacctaccgagctcaagcgacctctccgcctcagcctccggcgtagctgggagtagctaggactactggagcgcgccaccacgcccggctaatttcttttttatttcttttttatttttttgtagagacaggggtggtctatgttgtccaggctggccttgagctggacgcaacagatcttcccgcctcaacctccgaaagtgctgggattaaaggtatgagcagccgcgtacggcccccgcagccattctagctagcggtaccaatagcaaccggcagctgccctccgcttttgctccgccccttctgcttgcgatctgtttccgcttccggtcccgcagttccggctctgccgtgaagagctttgcattgtgggaagtctttcctttctcgttccccggccatcttagcggctgctgttggtgagtgggctcctaccgaccgaggtttaggcagcgcggggagctttgcgggttgccatttgtaactccggatcctaaaattcctgtcctgttctctgtctcttctaggttgggggccgtcccgctcctaaggcaggaagatggtggccgcaaagaagacgg

SEQ ID NO: 40845 - DNA, 2300 bp, Homo sapien
acacagacaagcacaagggggagatcaagtgaagacatggagaagatggccatctaccagccaagaagacaagccctcagaagaaaccagttctgctgacatcttgatctttgacttctaatctcaagaactatgaggaaatacatgtctgtacttcaagccatccagtctgtggtactttattatagcacccctagcaaactctcacagatggtaacatactacattggatagtgtgagacttcatgagtgctcactgatgtaagtgaataaatggggggaaggaaaagcacttccttactttgtagtagaatggcagctaatcaatatagaaggaataatgtaattagaaaatcacaggcacactgtctcatgcctgtaatcccagcactttggggaggcaaagggaagaggatcccctgaggtaaggagttcaagaccagcctgggcaacatggcaagactcctgtctctataaaaaaattttttttggatggaatcttgctctgtcacccaggctggagggcaggcttggctcactgaaaactgcacctcccgggttcaagagattctcctgcctcagcctctcaaagtgctggaattacaggcatgagccaccgcgcccagcctctttctctctaaaaaaaggcctggccaggcgcgatggctcatgcctgtaatcccagcactttgggaggctgacgcaggcggatcacctgaggtcgggagttcgagaccagccttaccaacatgaagaaaccccatctctactaaaaatacaagattagcagggtgtggtggcgcatgcatgtaatcccagctactcaggaggcttaggcaggagaattgcttgaacccaggaggcgaaagttgtggtgagctgagattgtgccattgcactccagcctgggcaacaagaatgaaaccgtgtctcaaattaaaaaaaaaaaaagcctgttctcaccgggtgcggtggctgacatgtgtaatcccagcactttgggagtcccacgcgggcggatcacctgcgatcaggagttcaagaccagcctggccaacatggtgaaacgccgtctctactaaaaaatacaaaaaatagccagacgtggtggcgcatgcctgtaattccagctactcaggaggctgaagcagggagagtttcttgaaccagggaggtggaggttgcagtgagctgagatctcgccactacactccagtcttggtgacacagtgagactccatctccggaaaaaaaaaaaaaaaaaaaaaggccgagcgcagtggctcatgcctgtaatcccagcactttgagaggccgaagcgggtggatcacctgaggtcaggagttcgaaaccagcctgaccaatatggtgaaaccccgtctctactaaaattacaaaaattagctgggcacggtggcaggcgcctgtaatcccagctgctctggaggctgaggctggagaatcgcttgaacccgggaggcagaggttgcagtgagccgagattgcgccactacactccagcctgggcaacagagagagactcggtttcaaaaaaaaaaaaaaatctattctcttaataaatgtcaaagtcataacgacaaagcaagactggaggaactacttcagattaaagcaaactaaagagagacacaactaaatgcaacgtgcagtcctggattggacaattggcaaaaagggaacatggagggtggattaaatcgtactgtatcaaagttaaacttccttgtggtaattgtagttatgtaagaaaataagactgtcatcgcacatctagtctaccaatcaatagcccctagtcccaaggccgcctcgcctccctggctatttagtgatgagtcagatgatacctcccagcgcttcgccctcgccccctgacatcctccctatccctgctttaggggcttttcctctcttactgtgccataccctccaccgtctcccctcctgtctcctgggctctactcctccctgccctcctctgcgtcctggccctcccgctctcttccgctttgcgctcccaggctccttccacctcctgccagctcccttcctcctccaggtgcgcaccccctaccattagccccgctgcgcgcttgcgctctacgcccaagggagccgggctgcagagctggagaaacttccgcggctacgggtgcagttgccttcggttcccggttccgggccgacacccgcgcagggctgagacaggtgtctgcgctccccgcaatgggctgctccagcagcgccctcaacaaggccggcgacagcagcaggttcc

SEQ ID NO: 40846 - DNA, 2300 bp, Homo sapien
gcctgaccaacacagtgaaaccctgtctctactaaaaatacaaaaattagccgggtgtggtggcacctgcctgtaatcccagctacttgggaggctgagacatgagaatcacttgaatctgtggggtggaggttgcagtgagctgagattgcaccactgcactctagcctgggcaacagagtgagactctgcctccaaaaaaaaaaaaaaaaaaaaaaaaaaagggatagtgcccaatgctgctgagtaagcatcagtaaatgttagcaatgatgactctaccccgtttgattacattaaggagaaaaaaaatcatctttagaaaacaaattaaaacatcacttgaaagtttttaattaaacttttttttttttttaaatagagatgggggtctcactatgttgcccaggctggtcttgaactcctgacctcaagcaatcctcttacctcggcctcccacagtgctgggattacaggcgtgaaccacagtacccggctaaagaaacatcactcttaacaaagagagagcaggcctcaggttttgagccaactgcaatatctagctaaaatttaataatacctttttttaattgagtttattttttactattactttctattgaattgttttctatttagtgtactgttgtaaagtttcctttttcaattaacttgttaaataaaatgaagtgagccatctcaaagaaataggttaagtaaattataagtgatatacagatttggcaaacaaacaaacaaaaaagacagaagtagcacttgaattatgaaaactttctccccaaaatctttataccatgcattcttctacctccatgccctcactcaagccattccctctacctgacttctacctccatgcccttcactcaatgacttcctgttgaaatccttaataaattaatttaaaaatcaaactttacaacactactataaatgacaaaaccaaccttcaaaaccaaaggactacctctcacaaggaaccttcctaaatcttctttttcctcttccaccccaagttaaaatcaatttgtcttttttctcctttactccctaccccacttgccctctcacttctactgcattttatttatttccaagttttctataataattcctgttctgccacatctcagtgccttttctcacagcagtaggtttaaaggagggagctgttgatggggctcttttcagttgggagagaggcagaccaagtatgaagctaatgaaagaagttggtcataaaggactgcatgttttatgattcaatttataggaaatgtccacaacaagcaaatccatgaagatgcaagtagattgtcaggggccgggggagaggagaatggggagtgaatgctaatggggatgggatttatttttggggtgatgaaaatgttctgaagaaagtggtgatggctgcacaactctgtgagtatggtcaaaaccactgaattgtacatgttaaagggggtgaatcttacggtacgtgaattatatctcaataaagctgttaccaagaaaacaaaaacgaccccctcccccaaaacaaaacacagggtctgaaggcttctaactggggagagctttctggcaggctgtgctccgcagcgaggcagccccagaacgagcaaagtcccatggagtgcaggttcctggtcccatcgtggctcccaactctctgtgggtcttcgggcgcgttgcttactttccaggctcaatttccttgcgtgttagctggggctccggcccggagtggccccaaccccgaatccccgaacccgcacgccctgggtccgacacagcttccaccagccacgttacctgtagggtccaatggcccctggggctttcgcggtgctgatcacccttctgatcaaggacgacatggctaagccttccctcttgcagccccttcaggagaagaagccccagcaccagccctgctggcttcttactggactgaccaaccacagcagcgcctctgccccacagctcccgctgggggcgggctcgtgcggcattctgggaactgtagtttcggcgacgctccaggccacgtggaggaagcgcccggtctggcgcatgcgctctccagcgcgctctccaggagctttggctcggtgggtactgtcgcggaggcttgtcattctgacccggggattcctcacagcgtctggcaggttggtcgtgaggggctggtgccttccaggatgcgagtgtcgggggaactgtatgcggcggcccccctcccggcgcccgtctcccctcttcatcgtttctct

SEQ ID NO: 40847 - DNA, 2300 bp, Homo sapien
caactgcaatatctagctaaaatttaataatacctttttttaattgagtttattttttactattactttctattgaattgttttctatttagtgtactgttgtaaagtttcctttttcaattaacttgttaaataaaatgaagtgagccatctcaaagaaataggttaagtaaattataagtgatatacagatttggcaaacaaacaaacaaaaaagacagaagtagcacttgaattatgaaaactttctccccaaaatctttataccatgcattcttctacctccatgccctcactcaagccattccctctacctgacttctacctccatgcccttcactcaatgacttcctgttgaaatccttaataaattaatttaaaaatcaaactttacaacactactataaatgacaaaaccaaccttcaaaaccaaaggactacctctcacaaggaaccttcctaaatcttctttttcctcttccaccccaagttaaaatcaatttgtcttttttctcctttactccctaccccacttgccctctcacttctactgcattttatttatttccaagttttctataataattcctgttctgccacatctcagtgccttttctcacagcagtaggtttaaaggagggagctgttgatggggctcttttcagttgggagagaggcagaccaagtatgaagctaatgaaagaagttggtcataaaggactgcatgttttatgattcaatttataggaaatgtccacaacaagcaaatccatgaagatgcaagtagattgtcaggggccgggggagaggagaatggggagtgaatgctaatggggatgggatttatttttggggtgatgaaaatgttctgaagaaagtggtgatggctgcacaactctgtgagtatggtcaaaaccactgaattgtacatgttaaagggggtgaatcttacggtacgtgaattatatctcaataaagctgttaccaagaaaacaaaaacgaccccctcccccaaaacaaaacacagggtctgaaggcttctaactggggagagctttctggcaggctgtgctccgcagcgaggcagccccagaacgagcaaagtcccatggagtgcaggttcctggtcccatcgtggctcccaactctctgtgggtcttcgggcgcgttgcttactttccaggctcaatttccttgcgtgttagctggggctccggcccggagtggccccaaccccgaatccccgaacccgcacgccctgggtccgacacagcttccaccagccacgttacctgtagggtccaatggcccctggggctttcgcggtgctgatcacccttctgatcaaggacgacatggctaagccttccctcttgcagccccttcaggagaagaagccccagcaccagccctgctggcttcttactggactgaccaaccacagcagcgcctctgccccacagctcccgctgggggcgggctcgtgcggcattctgggaactgtagtttcggcgacgctccaggccacgtggaggaagcgcccggtctggcgcatgcgctctccagcgcgctctccaggagctttggctcggtgggtactgtcgcggaggcttgtcattctgacccggggattcctcacagcgtctggcaggttggtcgtgaggggctggtgccttccaggatgcgagtgtcgggggaactgtatgcggcggcccccctcccggcgcccgtctcccctcttcatcgtttctctctcagactccgctgacctctttccttgctgcctgtgcccggggcccctctccctggtgtcgcatctccttcggcccctgcgctggagccccctacgtcagtcatttcccttcattgccccgccgggtggaggccgtcctgggaatgggcttgcatcccctcttctgcaaccccaaatgactaatatgggtcattctggcgaccacgctgagatctgggcgttggtcctcccgtgttccctttcctgctcctcctgtgttcccttctctagggtgctcctcgggctttacaaggtcactgtctgaacagagccctagtgattgggatatcatttcagaaagaaagatggtgatctggaatggcccagatcccttgtaagtattctgctgtgtcagaaggggtggtacttggctaaatatttcttatcctgttaatatttgcattgtaagtacgcttcgtttcttcatttatgcgggcactcatagatatatgagtccctactttgtgtaaggcactctgctagatgctaggaggaatgcaacagttaa

SEQ ID NO: 40848 - DNA, 2300 bp, Homo sapien
taccttgtttcacaagaaatattttacacaagttgaatcatttgtaatgctccaaaatagcttcttatttaaaaacttaaatggtgaattattttgtaaataaaaatatgtcttaattatctagtttaatcagatttaataaacttttgggcacctactatgtgcccaatagtttcaggctgtgtataattccaaagtagaataagaattttgtcatcttaggcagcattgagaacttgatgtggcaggcactattctacatgacttattcatttaattctcacaactctgtggtcactagtattattctcatcttataaatgaagaaatcgaagcacagagattttatataccagtccaaggctactaagcttgtgattgtgctgagattcaaaccaggcagtctgactctatccactattcttttttttttttccaccccttccctctccaatccactattcttgaaacacataacaattagaaaataggatctcatataataaaatactaaattatgcggtacagcacaataggaaacaggacaagggaaagaaaaaaaatgaggccgggcataatggttacacctgtaatccctgcactttgggaggctgaggtgggagaattgcttgagcccaagagttggagaccagcctggccaatatgaagaagccccgtctccacagaaaatacaaaaattagccgggcgtgctggtgtgcacttgtaatcccaactacttgagatgctcaggctggaggattgcttcagcccaggaggtcaaggtttcagtgagccaagatcatgccactgtactccagccagggtgacagagtgagatcctgtcttgaaagaaagaaaacaaagaaaaagaaaaggaaaggaaggaaagaagaaaaagaaaaaaatgtgaattggtaggaaaagtcaaagagaaaatagaatttcagttagctggaatttgcacagataaggaagaaagagtattcaggaatccacagtgtgaatacaggaggactctagtgggaaaagggagtagatgacaatgaaacttgaataggcaaggggaggccagactgaaaggtcttttattccaggccccaaaccaatgaaaaagatcagaaggttcctgagccggaagtaggaaggccaaaaccttagcagtatgtaggacaaaatgagagggaataaagcagattttcttgtattatctttaggaagcagggaaggcagagattttattattattttttttaactgttgcattcctcctagcatctagcagagtgccttacacaaagtagggactcatatatctatgagtgcccgcataaatgaagaaacgaagcgtacttacaatgcaaatattaacaggataagaaatatttagccaagtaccaccccttctgacacagcagaatacttacaagggatctgggccattccagatcaccatctttctttctgaaatgatatcccaatcactagggctctgttcagacagtgaccttgtaaagcccgaggagcaccctagagaagggaacacaggaggagcaggaaagggaacacgggaggaccaacgcccagatctcagcgtggtcgccagaatgacccatattagtcatttggggttgcagaagaggggatgcaagcccattcccaggacggcctccacccggcggggcaatgaagggaaatgactgacgtagggggctccagcgcaggggccgaaggagatgcgacaccagggagaggggccccgggcacaggcagcaaggaaagaggtcagcggagtctgagagagaaacgatgaagaggggagacgggcgccgggaggggggccgccgcatacagttcccccgacactcgcatcctggaaggcaccagcccctcacgaccaacctgccagacgctgtgaggaatccccgggtcagaatgacaagcctccgcgacagtacccaccgagccaaagctcctggagagcgcgctggagagcgcatgcgccagaccgggcgcttcctccacgtggcctggagcgtcgccgaaactacagttcccagaatgccgcacgagcccgcccccagcgggagctgtggggcagaggcgctgctgtggttggtcagtccagtaagaagccagcagggctggtgctggggcttcttctcctgaaggggctgcaagagggaaggcttagccatgtcgtccttgatcagaagggtgatcagcaccgcgaaagccccaggggccattggaccctacaggtaacgtggctggtggaagctgtgtcggacccagggcgtgc

SEQ ID NO: 40849 - DNA, 2300 bp, Homo sapien
gtgagtgatcatattgattgacatgcgttgtcagaatcatagctataatttcccttttagttctagttactgagtgcactgaaattgcttaaagatgctatagcagaagggttggtttggcagatcactgagcctgattagaatgctggcttctccacttaatgactgtgtctttgttcaagtaacaatctctgtgtcacagtgtccttgtctgtcagataagataaccatactaggtacatctggttgtcaggaagactaaatgactgttcatgtaaggagttaactcattgctggcactcagtaacccttcaatgactattaactattataggccaggcatggcagctcatgcttagaatcacagcattttgggaggctgaggcaggaggattgcttgagccctggggttcaagaccagtctgggcaacatagtgagactctgtctctgcaaaaaaaaaaaaaaaaaaaaaaaaatctgggtgtggtggctcgtgcctgtagtcccagctacctgggaggctgaggcaggaggattgcttgagctctggggttcaagaccagtctgggcaacatagtgagactctgtctctgcaaaaaaaaaaaaaaaaaaaaagctgggtgtggtggctcgtgcctgtagtcccagctacctgggaggctgaggcaggaggattgcttgagcccaggaagttgagacttctgtgagctgtgattgcgcctctgtactctagcactggcaacagagtgagaccctgtctcaaaaacaaaacaaactgttagaattattattataattattattatggatactataactattgaaacttttaacattgatttcattagcttagtctgatctctcttcatcttacttgaaattgtatgttattacttttactttctttgtactgtgcttaaagttgcatatcatggtcaagactgagtatgggagaaatatgggatggattaattgcaatattgtatctctaggcttagtgttaagtaatcttgaggtcctgaattagctaaccaaattgagcaacctgagcataattttgcagaattcattactgttttgcttattttactctggtttcttaccttaggtagactttgggggtgaatggttctctacttagaggcaacagttatgtaccctccgtagaacctgtctatgaatatgggataaaacatagattacctaaaaagtaggataccgtaacttacattttaaatggagattcatttttattttggttcgggttggtttaaaaatatttgttaaggtgacaggaatggacaggtttagatattttttccactaaaccatcgggcaggagaaggtttagattttgacttatgagaacatagctttagcaatttgttttgtgtcttaggcctctaaaggttttgtgatacggcttttggcttcttagcagttttgcctgtgtaaattcctaagtacttaattgtgtctcccgctttgtgcaggatttatcctattactgttgtttggagttgaaaggcaaagaggaagaaatactaaaggcgctttctggaatgtgtaacatagacacaggtaaacttgttttaaagctgagttctattttagtctatgtatatttattcatttcataaagaagtgtctactgtaagcattttggaattcaaacatatagaaaagtgtgtgagacactaatcattcccaatgaaaatgttaacttaaaaacagttgggttggcttttaaataatttctaacattgtcaagtgtaaagtgatagagtcatttttctggtggagtgaacttgacagaaagaaacttgaagctctcattactcatttaacacatatttgttgagaacttattgtgtgccaggctttgatctgagcaatcctcacaaccaaaacttcacctctcatggaggcagacagtaaatgacagtgtggttatcaggaaataggactgcagtctcaacacccggaattatggaattttgcttttgttgatgtcagggctgacgtttgcagcagttcactgcttgtctggaaagcgccaagggagccttgtgctttatcgggtgaataaatatcccagagaaatgcttgggcctgttacgtttatctggaagtcccagaggaccccgggtgacccttctgagagcaggcagctgtggatctggctgcatccaacccttaaacaggtataatccttcaggttatctcccgtcattctgaaactgcatttttaattactgctggaagtcaatactgtagaaatgtaaatagtgtaaaggtt

SEQ ID NO: 40850 - DNA, 2300 bp, Homo sapien
tttgcttgttagcaactgtacaactacttacaatctggctgatagaaaaatactagagtggttgtaccagggttgactggttcccctcccccataaccccatggcattcccactcatcctggttggtagagcttacctctcactaggttggaaatacccaagaatcactttcccagcctcccttgctggtagaacatgggcatgtgacccagtcccagccaatgggatctgaggtgaaaggatgccaggaggattctggaaaaggctttcctccctcaatggacaagaccagtacctcagggatagcagagcagaaaggtggaagtgacgacataatagaaccacatagagacacattcctctggagatagcagataattattgtttaagccacttttatttggatactctgttacttgcaccctaaagcatgtgaagagaaagaagcattaatgaagtcaccaatatcaatgaatgtgatgttatagaaaacttatcagacaaggcatggcagctcacacctgtaatcccaccactttgggaggccgaggtgggacaactgtttgaggccaggagttctagaccagcctaggaaaaattgcgagaccctgtccctacaaaaaaatagaaaaatattagccagggccaggtgtggtggctcacacctgtaatcccagcactttgggaggccaagacagggggatcactggaggttaggagcttgaggccagcctgaccaacaccgtgaaaccctgtctctactaaaaatacaaaaattagccgggcttggtggtgtgcacgtgtagtcccagctactcaggaggctgaggcaggagcattgtttgaacccaggaggcagaggttgcagtgagctgagattgtgccactgcactgcagcctgggcaagagagagagactctatctaaaaaaaaaaaaaattagctgggcatggtggcatgcacctgtatgtagtcccaggtgggaggatcacttgggcccaggaatatgaggctaaagtgagtcaagatcacaccactgcactccagcctgggcaacagagcaagaccctgtctcaaaaaataaaataaaatgtaatataacaaatagagacctttttccttcagatatttatttgaagtaaatcagcctcttaaaattgggaatagttacctacaattgttagctgttcactgaacatctcgagtgcttaagcaagaaactacacaatttctgagacgacatgtcttgttttttctgtatgtgaaatgactttttctcactcttttctctcatttgcacatttcccctaagaaacactgaaaactgtccctgctcccttctaggcagcaattctcttttcttgaaggtctctctttcatgaactcatggaagtcaaagcacattatctaagaaaaacctcagcattgtgtaaacaaaagaaggcaactatcagccttcaggcaacagtatagaatcatggtttttttaaagtgagaaataccctacagatcatttgtggtcacacattagaatttgaatacaggtaaaaccagaacatctcgttagagttcttaagattaataacaacatttatctttcatcctaaattcatatatacagtagctggcaacttttcagcaactccacctgatcccatctgaagcaaacccaatccagtcatcgcacactggggtcctatggctaccacattcctcattcaaggaatatttactaaggatctatcaagcactggcactgagattcaatcgctcggatctttttttctcatattgcttacaatatttctgggaactcatgactttttcatatgcaatcaatttttaaaatatcggtgagaaacactacatatgtgatagaggactggaattgccaggtagagatgggagatgatagctgctttgggttagtcagtgtctcctcctcttccattgacttggacaaatgtttacaacggagatgatctgattctggccccgacaggcgcggggacccgttgcggacggccgcggggattgcccccttgggcagtgcggccccgaggatgcagacactggcccagcggaaggagggcgcggtgcgagctggacggccccgggaggccgcagaccgccgggctccccgaggacacctcgcaccggaggaggagaggaggcagcgcccggccaggctgggagcacctacggccgcgcgggggcgggagccaggtggcctcggcgcgcccgcctcgcccgggcaccgagcaggaagtggctgcggcgcggcctcctcgcggtgcaaca

SEQ ID NO: 40851 - DNA, 2300 bp, Homo sapien
aggataggggtgagagctagggagagccacagggcccatgaaggctgtcccgtaggtgctgctgctcaggcccctgcagcagagacaccttgcagccaccatcaccccgccgaaggtgtggaaggggggattggaaaagggtgaaagaggcactgacacagggattataaatgcactgaagcacacaccccctcagcaagggtggcactctctccacagcacccccatggggatgaaggagatccaggggctcccagactgcagccaggtgtgtgggagccacagacctccaatgatggacccagcagacctagatagaggctgctgtccacacacagaccctgaaagaaagggagatgaagacaaggataaccaagatcagatttttctccgtctctccctctcagacacacacacacacacacacacacaaacacactgggaaataaagggtggcttgtgtgtgtttgagggtagggcagaatggaggactggattcctcttttagggacctgaagaaaagtttcccaaagcctggggaaaggtcatacacaagaaagaggaagtgtgtgtggccctcactaccctactatccctctcccatgtggctgcctctgtggaatccaccacatttgcagaggcctgcaggggcatgggtgtgaagccctctcagcaggaaacacacctgcattcacacccacacacatgtccagaagccagtgggtcacagggatgggtcagacttggatgcaggagcccccattcgaagccagattaacggtcctctacaggtcctccaaggaggccccaagccctccagagctacacagagcaccttttcagctgggacggcattgccaggattgcgtaaagaaagaatgtacttcccactgtggcagtggtggttgcaccatgaatccagagccaccctgcaagggcattcccaggacttctgaccgagacatgtagacgctagctccctgctaagctcacacaaccacggtgctccagtctttgcaagtggacaccacagagaaacaccaaagggagggggctccccagggactgggtccatttctcagctcagcccagtaggcagggccttaaggacaatcccagcagaccaagagctcagatctgggccacgagtcttcttaggaatagggacacagatcctgagcacatctaccagtccccactccagcttgaaccccccagtccccactgtcggcaagcacaccgctctcaacatattccacacacatgagcccgtcacagtcccaagagtactacactgtacacagcacatgtacacacagcacacggttccccatgccacacactgcgctgacacacgtcccaggtcccccctgtgccgacgcatcttcccatccgacagaggacccattttaatgaacgcggtacacacagacactgaaaagtcctgctgtcctcagcctacatacacacacagcgccctgcagtcccgcacagccagcacaccacaccggcctggacacaaactgtgcccacacagagctcccgaccagaactcagcgactcccgcccccgccgtgcggcctgcgctcccgccccccgcgtactaagccgatctccaccttggacttcccggccccctcttttcccctccagctcctgttccccaacaaccccacccccgggcttcgggaaacttttcttcaggtccctaaaaggggacacctggagttcctccggtcccgccctgtccccggacacgcgcaagccgccctttatttcccagcccagctcccgccagacccagcggggaaaggtcaccgtaggcagccccctgcctgcgccctgggggtggtgataataacagctgtcaccgggggatggtcggggggaagggagaggtgtcggccccgcgccgagccgggggcgcaaggtggtcgcggtgacgcgccggggaagcgcagagaagcagcggcggcggcggctgcgccttccgagcccgggcggcggccgaggcacgcggagctgtccgttcagcaccaccgcgccgcgccccgcgcagggcgggcgccccgtcacacccgctctgctcccgccccggctcacggggcgaatgcggcgcgggttcctgcctctctgggtgggtgaggggcgcgcggatccggagagggggctccgggagcggcgggaccacgcagccacctgtgagccttcggcagctgcgggcggcggcggcgtacccggcccgagacgggaggagacgctcggcggcccccgcccgccggcccgccgggcgcacacac

SEQ ID NO: 40852 - DNA, 2300 bp, Homo sapien
ttgggaggcagaggtgggaagattgcttgagcccgggaggttgaggctgcagtgaggcatgatcacaccactgcactccagcctggggaacagtgagaacctgtctcaaaaaaacaaaacaaaaaaaaccctttttcttgttctcagaattagagtttcaaaaatgaatggtcttaaaataactaaatttaggaaagaatataatggtttgaaaatagtgtaagtttattacatagtgaaacttaaaataatgcaaaaagaggactaaactaaacttgtattagctgctaatagtcaagtttaatttgggcaaatattcacattattcaacattctcttcaaattggtttcctttatttaacattctcttcatatttattgttctaacctccaagaaaattctatgtaactctacatcttgacaatttctttctttctttttcttttttgagacaaggtctgctctgtcacccaggctggagtgcagtggcgcgatctcggatcactgcaacctctgcctcccgggttcaagtgattctcttgcctcagcctcccaagcagctgggagtacaggcgcatcaccaggcccggctaacttttgtatttttagtagagacgaggtttcaccatgttggccaggctggtcttgaactcctgagctcaagtgatccgcccgccttggcctcccaaagtattgggattacaggcgtgagccaccgcgcccggcccatcttgacaatttctgacaaaaacaagtaaactcatgtagcagctgtatattgttatgtgaaaggtatatatggaatttaaggttaaaagcaacctctgcctcccgggttcaagtgattctcttgcctcagcctcccaagcagctgggagtacaggcgcatcaccaggcccggctaacttttgtatttttagtagagacgaggtttcaccatgttggccaggctggtcttgaactcctgagctcaagtgatccgcccgccttggcctcccaaagtattgggattacaggcgtgagccaccgcgcccggcccatcttgacaatttctgacaaaaacaagtaaactcatgtagcagctgtatattgttatgtgaaaggtatatatggaatttaaggttaaaagtatacccacaatatggatgcatgcagtggtcagattacaatgggatgagggctgctggaatcaggttgggggagaggaccaaagaggggaggaaacaaacttttcttgagtattcttcctggcagcataatttgtgacaggcttgccaggttacccaatgggacagctgcaagggcccagtgcaactgaatttggtgtaccgagagatctcactgtacgaattattttctcggtaattagatgtaattattgtgaaatgtagcgaggagcttgtccacaataaaaatcaaacaagaatttccagaagtatccctagtactgtggcctacacatgtcaaatggctgggggaaaacataaccgataattataaacagaactagagagggaagcgtgggcagtgagaaagtaatacttcaaacggattcacacgatgttaggatgtgtcgttgggaaagccaaagaaatgagtcaaattggatcagggcaaaccgtagtgagggcaggctaggggcggagctctgggccagctcagagggacttgcccttccccagcctagagcggctccggcctcgccccctagctctagcggaaccttctccttttcccggtcacggggctctggggccagccaggccttcgtccccggccccgcccacccgccgcggcaccggccccgcccgccaacccaggccgcggcaggctccgccccccgccgcggtgcccggctccgtccaccttctctgggccgccgccgcaggctggcggccggcgcggccgggggcggggcggggcggccgggggcggggcggggcggccgggggcggggcggggcggccgggggcggggcggggcggccgggggcggggcggggcggccgggggcggggcggggcggccgggggcggggcggggcggccgggggcggggcggggcgggaggagccgcgctcctaagcgggagggagatccgccgcggagttacgggaaagttggtccgagttcccagagtttccctctgtggtgccctaggctcggccggccggtgccccggctcctttcctcctttcggccttcgccgtccaccaggtccctctctctgtccccggccgccatggagcagccgccggcgcctaagaggtaacgaatcggggagcgggaagaaggagggaa

SEQ ID NO: 40853 - DNA, 2300 bp, Homo sapien
atcccccaaagctggagctcgccgactcttccctaccttttcaagagaccgtagtcgtgcccagaacgccggcgtggcccagactccattttggaacttcgcaggctggcgtggacgaagtaaacacatttatggaaaaaccccggggttaggaggtttgcggaaagagggagcagctcgtggggttggaaattctgcctacccctcgggaaaaccaaacggttctgcacccaacgtacacatacttaagggcgggaaaggtgtgaagcccgctgctggggagttgcctcccctttgatgaaaaggaagtgcgaagcgtaggaacgctcttcaggtcaccaccccgtgagtgggaggcttggggagtctgaaggaagagaaagctccctccaaatctcccaaactgagaaaagctgcaggaggaatgaggcagttggagagagaggaccgcaggcatcccgcagctgaggctcaggactgagctctaaaatgaaagcacccctatgggacccaccaggcaaaacgttaaaaaaaaaaaaaatctgaatgcttaggcattctgctgcttccattctgtgtgtcaaatctactttgaagcagttaagtactgcaggatattaaacactcgaatctccgtttcaagctcactttttaatctttgcgaacttaaaattggaaagacagaaaaaaaatctgcgacccctgttatgttttaccaaaggaacgaaaaattctctccacctcggcataaataaaatagaaagaattttatcttaataaaataatatctgggagcttctgcttgactccccaattactgcttaaccttttgacagtttttagcctctgcttgtatttatctacttccccgcacgattgagattttttgaattgtcctttggggcgtctcattcaaaaccatctttcgacggaacacttttgaattgtacagcctcttggttgaagatctacgtcctcaaagtgcgggcttgccgtggagtaacacagatcccctctggcaactcgtctgggacgaagggcgtttttgcttagtgttgatcacgcaaatcacatctgaaaagaagctgcttaaaatgggtgtgtatcattcccttcctgtcactcggtcacccctattccagagaggttgaagtgctttttgcagttacactcacacaagaccaaacctttagaaggacctgaaaaatgtatcactgcactttgaattctattaactttcctggagactgaacattgaactcaatttttgctgggaatgaagatgtaaatgttttgaaaaactagaatcgcattttcctaaattttaaaaatgattgttcttcaccaattccagatggattctttattctttgccaatgggttgcagatgcccactgttttaaccaagttggtttactgcgtatgaaatgaacatttgccgattaaagcttaaatattggaagaaatttctcctggggcattccacgcgtctttgcaataattactaaattagtcaattgccacctctgtaaacaaacttcgtttagaaaacagcaggcgaaagcagactacacatgtagtcataattgaccaaaagtatgtacaaaactgtttaaaattggggaaagagtgatttatgctggagaatgcagtctagacctgaattattttactttacggtgaaggtagttgtattgaatgtgttaagatgtgcaaattaagccggcgagcgaaccaaataaaaatactaaatgccctttgggattctctgtggagtctttgagaggcagagaagcagttgttgagtttctaatggtataaggaaaagtggcaacgagaagaaagggggtgggtattgtgtttgtgtgtgagttttgaactgagtcacctacggctgcgtctctataacagggaaacctcgagcaaacctgtgcctttaagactcagttgctatccaaacagaagtaaacagagtggaccattagcagacgccgggcgcggaggcggagccagggcgctgagggccccgcgcggcggcgggacgcccgcccgaaggggaggcggggccgctactaaagcccaagactcccggcctggggcagcctggggagggacgcgggcggggacggagctcggcgtgcttgctgctggagggtgatggccctgcaaggctgtgggctccgacctcaccgggagtcgacagcgagaggttcgccgaagagcgaggttctgggcgagcgctgaacgccggccccaagcaccccgggtctttacacagtccgcgtccacagactctgacg

SEQ ID NO: 40854 - DNA, 2300 bp, Homo sapien
tgagtccacgcctggcaaacttttttttccgcgcggagtcgcaggagtcgcggacatgatctggaggaccgcgagcagctaaagcgagagcagatccacgtcttcgtcagagtctgtggacgcggactgtgtaaagacccggggtgcttggggccggcgttcagcgctcgcccagaacctcgctcttcggcgaacctctcgctgtcgactcccggtgaggtcggagcccacagccttgcagggccatcaccctccagcagcaagcacgccgagctccgtccccgcccgcgtccctccccaggctgccccaggccgggagtcttgggctttagtagcggccccgcctccccttcgggcgggcgtcccgccgccgcgcggggccctcagcgccctggctccgcctccgcgcccggcgtctgctaatggtccactctgtttacttctgtttggatagcaactgagtcttaaaggcacaggtttgctcgaggtttccctgttatagagacgcagccgtaggtgactcagttcaaaactcacacacaaacacaatacccaccccctttcttctcgttgccacttttccttataccattagaaactcaacaactgcttctctgcctctcaaagactccacagagaatcccaaagggcatttagtatttttatttggttcgctcgccggcttaatttgcacatcttaacacattcaatacaactaccttcaccgtaaagtaaaataattcaggtctagactgcattctccagcataaatcactctttccccaattttaaacagttttgtacatacttttggtcaattatgactacatgtgtagtctgctttcgcctgctgttttctaaacgaagtttgtttacagaggtggcaattgactaatttagtaattattgcaaagacgcgtggaatgccccaggagaaatttcttccaatatttaagctttaatcggcaaatgttcatttcatacgcagtaaaccaacttggttaaaacagtgggcatctgcaacccattggcaaagaataaagaatccatctggaattggtgaagaacaatcatttttaaaatttaggaaaatgcgattctagtttttcaaaacatttacatcttcattcccagcaaaaattgagttcaatgttcagtctccaggaaagttaatagaattcaaagtgcagtgatacatttttcaggtccttctaaaggtttggtcttgtgtgagtgtaactgcaaaaagcacttcaacctctctggaataggggtgaccgagtgacaggaagggaatgatacacacccattttaagcagcttcttttcagatgtgatttgcgtgatcaacactaagcaaaaacgcccttcgtcccagacgagttgccagaggggatctgtgttactccacggcaagcccgcactttgaggacgtagatcttcaaccaagaggctgtacaattcaaaagtgttccgtcgaaagatggttttgaatgagacgccccaaaggacaattcaaaaaatctcaatcgtgcggggaagtagataaatacaagcagaggctaaaaactgtcaaaaggttaagcagtaattggggagtcaagcagaagctcccagatattattttattaagataaaattctttctattttatttatgccgaggtggagagaatttttcgttcctttggtaaaacataacaggggtcgcagattttttttctgtctttccaattttaagttcgcaaagattaaaaagtgagcttgaaacggagattcgagtgtttaatatcctgcagtacttaactgcttcaaagtagatttgacacacagaatggaagcagcagaatgcctaagcattcagattttttttttttttaacgttttgcctggtgggtcccataggggtgctttcattttagagctcagtcctgagcctcagctgcgggatgcctgcggtcctctctctccaactgcctcattcctcctgcagcttttctcagtttgggagatttggagggagctttctcttccttcagactccccaagcctcccactcacggggtggtgacctgaagagcgttcctacgcttcgcacttccttttcatcaaaggggaggcaactccccagcagcgggcttcacacctttcccgcccttaagtatgtgtacgttgggtgcagaaccgtttggttttcccgaggggtaggcagaatttccaaccccacgagctgctccctctttccgcaaacctcctaaccccggggtttttccataaatgtgtttacttcgtccacgccagc

SEQ ID NO: 40855 - DNA, 2300 bp, Homo sapien
tcttcactgcttatggtaaagggcacagtggaacacagattgaaaactacaaattttttgatacttaaaccaaaacacagtgcccagataattttcccaagccaggaatttgtctattttttgttggttccaggagaaaaatggcatacgtttagcattccatatgtttagcattccatatgttatttgttcaaacatcttagtcacatttctactcctatatttggccaatttatcttaatatagtgtttttatttaatagatcaccacagaagaaaactaggccctttttctctagaaaaacgacaagacctggagctactgttgtagactgctgagaggttctatacaattagcggaaccattttctttacgttaaaacctctaagtcatggctttgacctgtgtttcagatgaagcagataacagaaaaacaaattaattcatttgtataatttggcaagttttgataatactcaaatatttgagttattatggcatttttgtgaaggaacagctgctctgaattggcaattagctgctgcttcttttggtgaaacttatttccttattttcaatcacaaaataaacctaaacaccttggcatcctcaggcctcttttctgttgcagttactgaagctctttcaagaaatggtaattttgaattccaggaaagagctttaggcatgggtgggtatttaataaccttttaagaaatctagtttctgattttttgttttgtttttcgacagagtctcattctgtcgcccaggctggagtgcagtggtgtgatcacggctcactgcagcttccacctctggggctcaagtgatcctcccacctcagcctcctgagtagcagggactactggcaccatgcccagcttatttttgtattactattatctttgtagagacgggttttttccatgttggccagactggtctcaaacttctgcgctcaagcaatttggaggccttggcctaccaaagtgctgggattacaggcatgcatcaccgcgcctggccaggagtctagtttcaaaatgcagttgtaggtgttttcttcagcgataaccaaaaataagacaatctgggcaaaacttggggagcatgtcctatgcgattccttgaagcccagtgtatattttccgagttaatgtttgagtttcttgactttgttagcttgtaagctattatacggaaaggtaatattttatactcattacagcctaataaaaccaacaccgacccttacaactctgaattcattacttatcagttattttcactttgtctctagaactctcaattctgtcttcattttggttattcccgcagcttccctaaatcccacgtcagactgcaatcctatggttccccgcaatattctctttgaccatcccttcccccgcccctcatcagcaaactagggagtactttaccattgctttgtgaaagtaccagaatgcgagaacttgtctacacgtttggccaaaacgcatcctccaacggtgtatgtcctaatcccttcaattttcttcccacatccaccctccttccagcaaataaaccttggaactaagttgaaatctgtcacttatttcgctcctcctaccagcggcctattgcttctgccctccccagtgaacccaaccaagttcctcttcccagtcctcccatttctcaagaaaaacaaccacctctattttttcagggctttacgtgctaggtgtggtttcttcctctgcatcgaaccagcgacctgggtgcctccccacccaagacggacctccacatcgggaaccgccgccggcgcagcggccccagcagccgcagccaccttctccccggagcgccacttccggatctcgagtgtttcccctttacggttccccccacccccttagacacctcctagagctttgtcctaactagcagggtcggagctgggaccctggctagcagaacgcaagagttctccttcacgaagacgcgcagagtagcttctccagcctgagaaatccggtccggctgcgtagagtggcagccgtggagggacagtttgttttgagcaccaagtgggacacacccggaagtggcgcggtacaggagcagcactgccggcgggggcgggtgccagggacttggaggtggaggggacgcggcggtactctggcgtgtgagccgagggtggagtgcagagggagcgggagcgggacgggaggtcttctagctttggttctatggtggcagatccggctgggttccgggaagcgagggcctcgcggggtggctgg

SEQ ID NO: 40856 - DNA, 2300 bp, Homo sapien
tcatcataatgacaatttattgctctttaatactaaatttgatttacttaatattcttatatttcttagctcacagaaatgcaagttgagagtagttattacagtccacagaaagtaaaatctaaagaagtattgtgttgggaacaagaaggaactacagttgaggtaatctttcaatattgaacctgtatttttaaatattttgttctttaatattttataaatacctgtttttatcagatgtagtgtatttaaaaatacaagtaagatgtttgtttcttattttaatagagtttactatctcatggatagtataaataaatagtatagaataaatttaaaaatgacataattctaaagatgtttaactaatttagagattctacaaggaaagcctctaacatttttattaaattcaattcttagttctaatgtttcctttcgtcttataggcccttatgatgggagaacctttctttgattgccagattgggtttgttggttgcagagccatgtgccttaaaggaattatgggtgttaaagattttgaagagaatatgaatagaagtgaaactgtaagtccgtttcctccatccttttttggataggatataggaataattaagtgcttactgaagtgtttaaccatataatatctgttagactatatatatctcaggcttgagagaggagctttactatttctccctgtgtttcacctgccagaaattatagatctcagggaagtttagaaagttggtagcgcctaacacctggacagtagttccaactactttcttattcatgaatctttcttcttttttgttcatggcagttatttggagtttccttttggtttgtaaaaatgatctttggcaaaatagtcaatgaaggtggagcagcagcattccttatctttctgttttagtgatttcttttgactagtaaatgggcatcataaaatcaaggttttattttgtttaacaggctaatggtttttcttcccatttataaattttgcatttgttttcaggaagcctgtttcttcatttgtggtgacaatttgagtacgaaaggtttcacataccttacaaattcattgtttgattaccgaagcccagaaaataatggtactcgcgcagaatttatcttggattcaactcatcataaggttagagaatatatatttgaaccaaattctaggctgtgtttgggtggacacattgtatgaatacttgtgatttctagctttcttttcaaataatgccttctgaatgctaattgtttattaaaacatttagaatgcatttatacagtatacatgtagaaatgtttgaggagtgcacagagatcttttattgaatatgtaaacatattttgcttatttatgccctgcttcaaaaataatcgtggaggaaacatgttgaattacctctgttaatttttgttacttttaatgtgtgggattgatgtaaagaaatgaggaatttacctttttactatctatacttcttagtgttttttaaatgtaagaatatattaatatgtttatggaatattaatacatttatgaaatcagttaaaaattcagataattacctgaagattaatgcaataggataatttacattttactctttttttatcaagatttacttccattgttaaaatatttaatgttgacttgcataattaacatacatttagaatatttcagtatatctttagtgtttgaattgtttcatgatatgaagtatttaaggattaattctatttgagagtatacattattagacagttttgtgatagtgataaaggtcaggagtgtactatctcctccattgtaggtatttattaactagacatgattaataaagtggtcaaaatgtctcataaaagtatggatgtcttttttgtgtggtctgtaatagatggaatattacctttcttagaagtaaattcttggaataacctctgttcttttggtcatcctttgtgttgttatacattctatataaagatatgtgtctaacctatcaagctttaaactcaaaagtttcttttatacaatgtttattctgtttgcattgctttgttggcaggagacatacactgagatagctggaatgcaacggtttggggctttttatatggattacctgtatacaatggagaacactagtggcaaaggtattggcttctttcctttatgtgtgccatttcttgaacaactgaaacaaagccttcctcagaatcaattggtccttgactggttgtactctgctacataagatttatct

SEQ ID NO: 40857 - DNA, 2300 bp, Homo sapien
tctggtcttccagtatgcctgtcaaagggaaaaatgctaacaaggaggtcttactcagaaggcagcccaaaaatttgtataaaatttcctttagattgttggctaattcctaagctgcccatgtgtaatgcaagacttcaggaaacccagcagaaagcaaagtataaatttgactatttgcatggtgctgtgtatctacaattagagttcaggccctgccacattagcacctggggccttcctttgagaccttataagggccacaccctaggaataagtacagattgaaatagattagtctgagcaatcctaattccagtcctggataggaccatgatgatgtacttgtattctgtctgcttgccaaagaatggttaacttactttaggggaagatagcattatcaaagcctctataattttttacccatgatgtcatctgcttgatacaaaattatgaggtatactaaaaatagaagcaattgaattaaatataataaaaaatcaataatataaatagacttagagatgattaaggtattagagttgttagacatggagtttatgattaattgcttaaggaaaaagacaaaaaggtggaagatttccaaagagacctcaatccattaaaaaaaagcaccaaattaaattgtgaaactggaaaatgtaaggatacaggtttgaaggaaaaggatggaaaaaatataccatttgaacactaaccaaaagaaagatagcatggctattttactaagagataaagtagattttaagctaagaaatattactgaaataaagaaagccacttcataatgataaaagtgtgaactgaaagaaagaacaacacagataattctcacaggtgtaatattgagtaaaaaattatatactatatgatttcatttatatgaagttccagaagagagaaaactaatctatggcaattgaagtgattggctacgtctgttgaggatttagtattgccttgaaagggacatgggacagtctcatagggtgcttcagatgggtggtggttacagatgtaaaaattcattcagctctacccttcagatttgtgtgctttattctgtgttattttttagtaatcccaaagaaagtcacttaaaaaagcaacataattcctaaataaatggtggttttaaaattattagtaatgagtaaaaaatcagcattgtattttcgacttagttttaagcacagtgattctcagtaatggcacttttggttttttggattggagaattattatgtagcatttaccatctttggccaatacccgctaaaggccaatattattgtgacaatgaaagacagacaaagcaatgaaactgctcttcttgcattttgtcatattcttctggatgggaagtcatggcattcctcattgagaaccacaggtagagcattttaagggagtgagtgagtgagttctaggacagggatcatttgccactcagggtacatacgctggacatcttgaaacttacctgtatttatttgaaagctcagaaagattctgtaaaactgagaatactgtgccgtcctcaagattcttaggactttatgagcccttaacatgtgtattgttagtagatacgatacagataaggaatttttcttacctgcaaacattgcttattgtgaatgtttttgacattgtgtggtgtagtccatttagttctttagtcagctaaatgtgaataaaagagattaaaataaaagatgctgactcttggatatctaggaaacattttggaataattaagcttaataaaatatcttcatcatactgaggcatgtcgtgatactattccagttgattgaaaaagaaaaaaagcttgagctgaaagggcaatgataattttgcaaaaaatatgcattctttgaagtctgggacatatttaaaatacatggaaagacatttgttatttggttatggcaagagagttctgtagaaaggcatcatttctagattgatttgatatcactgcaaatgtgcagatctgaagcttgcatagagggaactgcaactcagtcactgctccacttttaaaatataaagcgaacactattattttctagaactcaagtaacttcatgaatactacaaacttccagtctcttcggcctttgccatccattcgaatattggtggataaaattaatctggaacattcagtgccaatgtatgctgaacagttggtgcatgtggtcagcagccttactcaaccttctgataacctgcttcattattgttatgtacactgctatcttaaggta

SEQ ID NO: 40858 - DNA, 2300 bp, Homo sapien
aaaataccgcccctctatcaaaacgtcctcagctttgccaggtagagaattgcttctgcagtagctgggccacgtctctgtggtagtgcccactgcatgggatcggtattaatctgtttgtctttttcatcttctgggctgtgagctcctagaagtcagctttttcacttttacccaagccaaacggttattcgcgtaaggttggttataattaaaatgtcggtttgtgcacatggtttgggactctgtgtatgagtacgactaatatcttcaatttactaagaagataaagaggtcgataaataaggaggtcaagcccgttttgcaaggtcacacaggaaagaagcagaccacgaaatgaacttcggctgtcacctgcggtgggcgcactagaggtcttttgaactccttcggctaccgtcgccgcgttctcgctgtgcactcttattctgcgcctgcgcgcggctacagcacggttcgtttttcctttagtcaggaaggacgttggtgttgaggtgagtccggtcccttttgcatccctaccccgacactgcgggttgtcacaacggcaccctcccgctttctctctgcctcggatttagtcgtgactgtgtgtctccgccgtggtgcagcttcaggcctctcccgcatctactctctcacgcttccgctgcggcctgagggagggcggcgggcggaccacggaccggggtgggttgcgacggccccaccgaagccgggtgggctgcgggaccctcgagaacccagctggcttcggagtgagctggcccggggctggtacccgctgcgctttttcacagccattgtgaccttggtgaggtcatttgacctatctggccccggtgtttctcccgtgagaaaaggggtggtggtttctaatgcagctggtcgtgaggcgcaagggttagtgtaggcgaagcagctggcagcgtcgctcgctgtgtggcagcgttttaaattagagctggaaaactggaggagggtcaccgtacctgccgcaggaggggaaggatgggcttcctgcaacctcccttgccccacggcttcccatcctacccccggccgcgttagctgaaggccagcagggacgcaaaagtttttaggccccttaggtctttaggtgaggctgggcaaaggagcagttagggaatttgggccctcatggtatttgccgcgttcccgtccaggttttaatggtataccgtgtgaccgtggaaaacacctgcctcatgatctgacagggttgtcgcgaaggtttaacgagtggacagaaaatttttagaagagaaagtgttgcataaatgggtttgcaatcgttaattaccaatgcggagctactgcttatttttcttgttgttggaaagatttttgttgcctttgctcgtccattactagtgtgccgcagtttgtcgcgtttatttagggtggtcgctcagtatatggggggcggggggaagatgaaacaggctaagccaagagacagcttaggctttgtgggaggaatccatccactgtcgtgctgtgcctctctaggtagtaaaatgtactatgcatgagaattccttttgatatcttttctgagtttttcttttattattttacccgagaaagggaaaaaaagctcagagtagtgagagctacatgaggtatgcaggacgcagagacctgagtattggacttcagtgccgcccctcacccatgtctcaacccaaatcttattcctgaatttgtgatataaaggacagcgtttagtcagtcaatagcttatgttattttaatgtaaatttttgataaacagtttaggaattgcctctcattttttcttaactcacttgtaggccggaatcccagcactttgggaggacgaggtaggatgatcacttgagggcaggagtttaagaccagcctggggagcatagctagaccctgtttctgccaaaaaagaaaaacattcatttgtaactgctgctaatcggagtgtatattcagggcagctccaatcaatgcttccaggtggccattctcaagtttgtggcttaaataaactctgtacttaatcatattttctgaatctcttaaggttagcatacgtatcaaggacagtaactaccatggctcccgaagttttgccaaaacctcggatgcgtggccttctggccaggcgtctgcgaaatcatatggctgtagcattcgtgctatccctgggggttgcagctttgtataaggtatgtatgttttttactttgtgccgaaggtcataaagtatgtgtttttggttg

SEQ ID NO: 40859 - DNA, 2300 bp, Homo sapien
tggagtacagtggtgcagtcatagctcactacagcctgcaactcttgggctcaagtgatcctccagcctcagcctcctgagtagctgggactataggcataaatcacactatgcccggctaagttttaaagttttttatggagatggtggtctatgttgctcaggttggtctccaacacctgggctcaagtaatctgccttccttggcctcccaaagtgctgggattacaggtgtgagccaccacacccagtctggaataagatttgactgttgtagaatcacatggctagaagtgatgaaggattgattaagcactgctactaaaagaaagattgaaggaatgcaggacaggcaaaagaacacagggaggaatgcatattcagaatgtctgtttgtcaagcactgtataggttgaacacccttaatctgaaaatccaaaatccaaaacgctccaaaatccaaaactttttgagcactgatgtgatgctcaaggaaatgctcagtggagcattttggatttcagattttcagattgggatgctcaactggcatgtattctgcaaatactcaaaaatctgaaaaaatccaaaatctgaaacacttctggtctcaaatatttcagataagggatactcaagctgcatatacattatcccatttaatttacatcacaacccaacaaaatgggtactatttttagaggagaaagcagacttagaaagatgaagaaatttgccgctacaagttgatgagctgggactcaaatccaggtctgttcggctctagaacagaacctatatgtaacatgtctctcttcatctatcgctcaggttttattcacgtgtcaccctcagtcattcactatggttcactggatagctagggaagcacagaacaaacactcagtatttcactcaggtcaggctctgtgccctgagtgtgcctgtctttgccatgttctcccagccaatgttttctctccaatttctccagttttccaggctttccattagactgaaactcagctctgcttccatctcttccacgtattgtctgaagctttccctgatggtttcacatacactaatccctgtgaactcttaagttcaccacttcttctctgggggtggggatggaaagagaatagaaacaaattactctctggacaaattccatgcaaagattttcagctgggtagacccttgataagaggcctgaaaaacgttggtaaagtccaaacctacttttgaacctcaattgagcacctttctttgtggccaggtttcaccctccagagtgttggttaataggttgaggacaaagactccctgatcagaatgagactccccgaagatctgtcctcttgtttagcagaatctggcacatagtaggtactcagtgtatatatcgactcaatatcatgcatctgttgtgtcccagctaccttccacagggcttgatgggttgacttaaataatgcttttaaaattcaggttatttcaatacaaacagcctggcatcattaaggcacaagagcctcacccttctacaccactttccacgaacttccagttgccttccttcaaaatccttgttttcttaagaaacccacaaaaataccgcccctctatcaaaacgtcctcagctttgccaggtagagaattgcttctgcagtagctgggccacgtctctgtggtagtgcccactgcatgggatcggtattaatctgtttgtctttttcatcttctgggctgtgagctcctagaagtcagctttttcacttttacccaagccaaacggttattcgcgtaaggttggttataattaaaatgtcggtttgtgcacatggtttgggactctgtgtatgagtacgactaatatcttcaatttactaagaagataaagaggtcgataaataaggaggtcaagcccgttttgcaaggtcacacaggaaagaagcagaccacgaaatgaacttcggctgtcacctgcggtgggcgcactagaggtcttttgaactccttcggctaccgtcgccgcgttctcgctgtgcactcttattctgcgcctgcgcgcggctacagcacggttcgtttttcctttagtcaggaaggacgttggtgttgaggtgagtccggtcccttttgcatccctaccccgacactgcgggttgtcacaacggcaccctcccgctttctctctgcctcggatttagtcgtgactgtgtgtctccgccgtggtgcagcttcaggcctctcccgcatctactctctcacgcttccgctgcggcctgagggag

SEQ ID NO: 40860 - DNA, 2300 bp, Homo sapien
ctctacttgttatagatctattcaggttttctttctttttgagtaatttttggtaatttgtgtctctctaggaatttgttcatttcatcaaattacctaatttgtttgcatatagttcttcattcctaagtattccttcataatccttttaatttctgtaaggttggtattgaggtatcctcttttattcctgatttaagtaatttgagtcttctctttttcttggttagtctagctaaagatttttgttgtttttgtggttttttttgttttgttttgttttttgtttttttttgagacagagtctcactctgcccggcctggagtgcagtggcgcaatcttggctcactgcagcctccacctcatgagttcaagcgattctcctgcctcagccgcccaagcagctgggattacaggtgcctgccaccacgcccagctcatttttgtatttttagtagagacggggtttcaccatgtggaccaggctggtctcaaactcctgacctcacgtgatccacctacctcagcctcccaagtgctgggattataggcgtgagccaccgtgcccagccactaaaggtttctcttggttagtctagctaaaggtttttgttctcatcagaaagagtatttttaatgtgaagacttgagtctgttgatatgcctagaatagaatccagaggaaatggagaagctgaagatatatgagaaaaaacaaaggtcttcatattcaaaggagaatagagggacaggttcaagagccaagggaattagattaaccacgggcaggaggtggggcgcttcttcctgagacaacatggaaagaagtaaggatgggtacaggtggatatgtttgttgttcataccaagaatgatttcagctgtaaataccagaaacctaactagcaatggcttagatgaattgacctaatttttcttacataacaagaaatccgataataggcaactgccagtgttggtacaatagatcagaaagattagggcctgaatctttgtgaggctcttggcctttccctcatggtcagcagtgttgcggctcctaatatcaggctttcaagtcagaatggaggaggaagggcaatttccattaaccctctccctcttgtcaggaaagcaagcttcctcagaagctccctagcacatttcattttgtatctcattagtcacaactgtgtctcatggctatgtctcgctgcaagggagtcttagaaggttaatgtttagctttttcaggatctcagtggtactgtatatagaagcatgccattcggctacatgaggaaatggaaactgaagcatgttgtacatacattttgtgtgagaagaacctgcaaggtaatctgctggtggattggaatggaggaatattggcaaggtagaataggcatgttttatggagcaagaaaataaggctttagaataattgcagtgtgggtgtgggagagggagctggataaaaaaatagaaaaagataatatccaaagtcattagtctaactccaaagtcttccattatgtcaccccaaactaatctatataattccctatgaatctcacctctgtgaggattaaatattataatatgaattatatctagcacagtgtttggtatgtagtatataatgttcactttttaatgttagtgtcttcctgccctaagcaaattatgtttgctgccttttaaacaaggatttccatacctaccttcatttattgctcactattttcctatctaaagagcccctctaaaacacattaaaatttttttaattttattaaaacacaaataaatattttattttaaaattactaatataggttgaaggaatttctcattcttgccctctcaaaatatttattatccatcccagtcatttggcatctataataaaccatcttgaattcatctaaccagcagttattttgagaattgtctttctgtataactatgactcattttctgaaccaccactttagggctagaacgatgtttatcctttttttcctgagtcacattgctcagaagtactcttgagattcggtgctatgtataccaaaagtgctcaaaatttgtttgttgatcagttagttctcattcttataattttagttctcatccttataatttaggtcaaagtacatgtcagaaagcagcaaagtcattcatttaacatcttttactgacatttctgaatgtctcaagccccagctggatagaagatacgcttatacagaagaacctagggtgagtgttttgaggactgaataaacctgattct

SEQ ID NO: 40861 - DNA, 2300 bp, Homo sapien
gtgtcactggtctgtgtgcttcatttggtgtttcttgtttgtttttttactggctactaatggtttttcctttccatatttagtgtttccttcagctcttgcaaggcaggtttggcggtgacaaattccctcagcatttgcttgtctgaagaggatcttattacttcttcacttatgaagcttactttggctggatatgaaattctgggttggaaattcggttgagaatgccggatattggcccccaatttcttctgacttgtaaagtttccaccgagacgtccgctgatagtctgaggggcttccctttgtaggtgacctggcctttctctctggctgccctgaacattttttctaacattttgaccttggagcatctgacgattatgtgtcttggggttgatctttttatggagtatcttcctggggttctctgcatttcctgaatttcaatgttggcctgtcttgctaggttggtgatgttctcctggatgatatcctgaagcatgtttttcaacttggttttggctaatagacttcttaaactctccctctcaatgtggtccactcacagctttccccaactctgttgatggcagctaaacttttctggctgttcagaccaaatctggagtcattctcaactactctgttttactcccatgtccaacttgtcaggaaatcctcttgggtctactgttaaaatgtctgcagaatctatctgaaacctgtactgcttgttctgaaccacccggtctgagctacgattagctcttgcccgcttcgagtcatgctaatattaatatattctctagacagcacccagagcgattctttcaaatagaagtaaagtcatgtcatttctctgttcaaactctgctatggtttgcatttcactcagaatgaaacctggagtccttaccaagggcccacaaagccctttgtgatttgtcccccaaccccccacctcccacctctccattatcttctgccagtatcccgtcacttcatttggtcctctaattttgtctggccaagatagtggtttatttttgtctttttctatgtaatagggaaaaggcaatgaatacaactagatgggagttacgtttccttgcaatacaagcactaattgtcttattcttttgttaagcattcatatacctgtggggcccctgccagccttggagtattcctacaatgtaggaggcaaatgtaaagccaccgaaggttttaaacaggtcagatttgcgttcagatggatgattttgcattcatcatggagaatgggcttaagctgaactccactggaagcaaagactgaaaaaccattaaaaagtttttacaactgttcagcaggagcgcaaaggagactccagatttcagaaacactaaggcagaataaagaggacctagtgcttgactgaataagaccgtttgggggtcgggcagtaagtttcagggaaaagctcctaggtttctggcttgagtcttgagtaacctaacagacgaaggtaccacgttaggtgaacatgaggcctcctcgggtaatttttaagcctagctatcttgaaaatgcagcagtcctgatgggcacacacgtgttggggaagtttgcggttcctataggccgcgaattatttaactttttacacaagcatttcatacaactgtgatggagatcaagagctacgtgttgccggcctcctgaggaatgaggaaaactggaggcctgacttccctgcttcctccgcttcccgggaccagccgtcctggccgcctggcgccccgcatgcccgcggcctctccctcccgtggagcaccgcgtttccctggccgttgctggcgggctgtagtggaggaataacggacctgagcagcggtcaccacagtaacgaattcgctgccagtggagtctcgagggacacaggcgtctccagggcgccccttccgggtgaccgcgctgggggtccacacgcgcgtccgcccccagccttcgttcgccgcgctggtccctgcccagaggaggaggaagggagggtagggggcggcgggggtgttcccgtcgcagcttgggaaccccgaaaggcacctgagtggccggcctcggcctccctgggcggccgtattgtctaagctccatagcaaccccggcgcggcgccggccacgctagccagcgtagctccggagcccgcgcgccgtcgccgcgtcgctcaggccctgacccgcgctggacccgcgcgctagggccctgacggcccgcgcgggctccaggcgcgggcagcggggacggcatgcc

SEQ ID NO: 40862 - DNA, 2300 bp, Homo sapien
gggtaggcttcagagaggtgctgtcttgaagaatgtgtaattcattaattctttacagtcctacaggtacctcaaacttaacaacctcacactaaatgcatcttattttctcccaagcctatactcttcattccctcactccttgccccatgcagttgattctgccaactgaacatgtcacatcttggttctgctccaccccccactgccttctggagaaatgcagtagcttcctactggtctcctagcagccacccttgcctctcttcattctgtcctccattctgccaccagagtggactttctaaaatgctcttcaaactctgaaggtgcaaccagaacttcccaagacttagcttcttcacttctcaggaattttctctaatcctttcctctaacaactcttagtttctgcctataacaaattatttgcagcttctccatgtgcccaactgctcttgcacattttgttttgagtttgaaattttcctgcccttatacattttaagtttggaatttcctgctgtctgccttttaaattgccacttgtacatcaaaatctatctcatgcactctgttctccagtagagttagctggttcttctttcctttgtgctgctactgttcctctgttacagcacttgctctataccaatgagctccttaacagcagtaactgtggctgtgtcagctctgtattcccagtacctagcacagtaattggcacatagttggaatttaataactgttagtggacgggcacagtggctcatgcctgtaatctcagcactttgggaggctgaggcaggtggatcacctgaggtcaggagttcgagaccagcctggccaacctggcaaaactccgtctctactgaaaatacaaaaattagctaggcgtggtggcgggtgcctgtcatcccagctactcgggaggctgaggcaggagaatcgtttgaacctgggaggtggaggttgcagtgagccaagattgcaccacggcactccagcgtgcgtgacagagcgagaccctgtctcataataattttagtgagtttggttttggatgactgagggacatccagttggagaaatgtccagtcagagaagagtggtggtagtgcctgttattggcttaaaagtgatggttgaagttctgaataagaattacataagcatgggatgataaactaataaaaatgctgaggtaggacctctcatttagggagtaggccaaggaaaagaagccagaaaaaggagactaggaagaagctgccaagagcagcaggagtgtccctggcatataatagacgcccagtaaatatttattgaatgaaaaaattagggtttaaaaaatttatttggctttgagggtacttgggagttcatgatgcccaaaaatggatgtttgtaaacaatgaacacatttcactctggtttttatgaatagattttttaaaaatcttttttttgagatgggggtctcactatgttgcccaggctggtctcaaattccttggctcaagtgatcctcccacctctgtgctgggattacagatgtgagccaccaggcccggctcagcttttttatcacaaaatctgtatatattcattgttgaaacatgagaagaaaacacagataaaaagaactaaaaagcaaacataatcctgtacaaatttaccgtatccaagttattcatacctttcagacctcatcctgtgtatatccatatttttaacctaaaaggggtcagtttgtaacttgctttttgcacttgacagtttggagaatcatttccaagggaacattctcatacatgatttctaatggcatcccactgtaggccacgttagcattcctaaatacggtaatgcttcccaaagtgggaatggggagaagcagagcctttctgacccgcctcgggacgggtgcaggggtgagcgagagagggggcgctcctcccgctcaagcgaggacccaggcctgcgggcggccgggcgggagcgctgcagagccggaggaaggggcgggacagcgcggcgcggggcggggctgcgcttagcggttaccccgggcgggccgttcaaacctaaggaggtaaaggcagcggccccacgcgaagctggcgtgggggttgccatagcccgcatcccagggggcgaggccgaggcttctccccggcccatccagcggctgctgcccggctcctctcccacctgtccgcttcggcgcctcgcccggccccgcggcctccaggcaggcggcgggaccccaggcgagtgcccgttagcgggtctcccgg

SEQ ID NO: 40863 - DNA, 2300 bp, Homo sapien
aagcgattcttgcacctcagccttccaagtagctgagattacaggtgcatgccaccatgtctggctaattttttgtatttttagtagagacggggtttcatcatgttagccaggatggtcttgaactcctgacctcaagcaatctgcccgcctcagcctcccaaaatgctgggattacaggcgtgagccacggtgcccagccctttgctttcctttcttgcattgggtgtcatcccatcactaatttcagaactctaaaacccacctgcttgccacaaaatctgatgcttctttttgggaccatccaataaaacgtaatgggagatttcccaaattaccatgatattcaagctatctggatatatttaagtgaatataatcaaggaaaaaggaaagacagagattcagggaaaaaatagcaacttgcatctccataaccttcttaataaagagttaaaagcattgttttccaggatggcaagacaactacccccattaaaacagagcaatgcaatgatgtctggcatgtagtacatgctcagaaaaagttaatgctatcattgataatagtgtagcttacactgaccaaactcccaagtgatcctagaactaccagtctctgttgataggaaagagcgtgttggattgggaactagcaccaacatgaattcttgttgaaattctggatcttcttgctatgacttgtcattactttgcccttttgtagggccccaggacccatttgtattctacatatgttgatccattctgatctccataaattgttctgcacgagaattatcttgatatttcaactggagagttaatatacaagagagcttgtaaatatgaaagtttgacttttgggatcactctgtcatctttcgcttaggataacaatggttccatctaatagttcttacagggaagcctattgtgcctcttgtattagatcacctctttggttaagaggagaggtactttgtaacagggctaatggttaaaatatttatgctctgttagcctgtctgtgaagaaagaagccaggaactgctgcgttttcctgaagggtttttaaatggcatcttcctggaaagatcaacttaaatctctcaagctggtctggggagatgcaacagaaggagtttgaacttctggaagtgaaaggtgaagctcaaagttctcagatttctggatggagggcccgaaaggagtataacctgcttaataaaatatcagacatagtgcgtgttgggagaaagaacgcctacttctttcactaactttaaaatagttattaacaattaagttatttttaaattttttaaaatagcttcattttcttcaccctactaagtaaaatatcttctggaaaaaaaggaaacaaatgtaaacgttctgaacccaactgatccatcatactgaaattctgatacttgaaagaacgcacctccactgagcagggcgttttgttcttctatggtggaatacatagaacggagggcgggtgagtagacagcgaaagctaccaaaatctcttagatttaagagggagttgttcatgtagctaccgtcacactaacctttgctttaaaacaagtaaacggattgggcgagggatgtgacagtagcctatcagagaaggggccagaaagcaaaaacaaaatcaagagaaaggtaggaggcagctgccccactgccccagtacagatatcaaacaatttttaaaaacaatctggaaaagtgtttttctacgtgaaaatcattggtgtagtcgattcttctatgttcgtccgagtaacggctatcctagtacttctcggacactgtcatctcggtttttcttctaaccctctacccttctggaaaagtgttactttgtaccactacattagtcagaaacacacaccgccttgtacttgcataactgttaaaatgctctgctttcctgcaaaattaaaatagctggggaccaggcacttaaacccgtagaatctaatagacagaaagcccctgctttaccgcctttgcgccatccgggttgtctggccacgcctggggcggaaggggcggggagtaagagagagagaaagagagacagcactgtgcgtcatgtaccagcgccggaagttggtctcgacacctggactagccgggttgtatttggaaacgcggagtgagtttttccgtgctgtgtaggtaagcgaattggcgggttggggtttgtggtggatatttgggccaaaactggaaagacacttggggtaaaaaggtccggtatgggggtagagttgagagtg

SEQ ID NO: 40864 - DNA, 2300 bp, Homo sapien
actccagcctgggcgacaagttgcctcataatacataatacacacatgtcctcacccttccttagaataagctttgtgtaataagtttaggtggcgtggttatttgaacagagaggactgaaggatgagaaagaacattaccgaaacagaaaacactccatgtaaaagtcatggggtggaaagtgagcttaatcttgttcccacttcagaatcaagcccatgtgactcaaactttatgacaggagggatagtgggaggagatgaggttgcagaggtgggcagaggccagctcacttagggtgttgtgatgcaaagccattgggacagtaagcaggagagtgacctggtctgatgtgaagaattaccaggctgttgtgtgagaatagactatgtaggacaggtagcaacaaagaaacaacagaccgtctgtaatagttagtggtaatggtggctgggccagggctgtagttgtggaggtggtgagaagtatctggctgtgggacttactgatggattggttagtaattaagtgctcagtaaacaacatgggctttggtgtaaggctttgggtccaaatacgtgcaccaccccttgttacctggctaagtgaccttaccaggcctcactttatctccttgtttcttggatgatatcttcttttatctctatgaagactaaagtgatttaaaaaaattttttttttattttatagagccagcctctcactatattgcacaggctggtctgaactcctgggctcaagcagtctgcctgccttggcctcccaaagtgctgggattacaggcatgagccactgtgtcctgccaagcattagaatttttgccactaacagtgcttggtagcagaccgcaggtctgtaatttaagtgcaaaagggaaagagaaatacatttacagaactgccagacactgtaaattaactttgatcttcatcatctattttaactagtttgaaattataaaactgaaataaatttcctgacaagtaacctctattgttttattcatctgaattgtattagtattttgtcttattcaccttttcatccctgtgctgagtatggtgcctgactcataaccagcactcagaaaacgtggaattcatgaaaaggaagagggaattttgtctttcatttactctttttttttaaagaggaagaggtaagtaaatcttggttgcaatgcactctgaaattttaattacattttttatagttaaataggagtaatcaatttacttagcagggaatacagcagtccgggataacagaacagtagcagcgttttaaaaaaatattttatttatgggccaggtgtggtgtctcatgcctgtaatcccagcactttgggaggccgaggcgggcagatcacttgaggtcaggagttcaagaccagcctggcaaacacggtgaaacccatctctactaaaaatgcaaaaaaattagccgggtgtggtggcgggcgcctgtaatcctagctactcaggaacctgaggcaagagaatcgcttgaacctgggaggcagaggttgcaatgagccaagatcacgccaccgcactccagcctgggcgacagagcgagactctgtctccaaaaacaaaaaacaaaaaacataaatacaataaaaatttaaagtatttaaatatatatatacatatatatatgtgtgtgtgtgtgtgtgtgtgtatatatatatatatatatacacacacacacacacacatatatatatgtatagtgtagaggcagggtctcactgtgttgcccaggctggtctccaactcctggcctcaagccatcctcccgcctcggcctcccaaagtgctaggattacaggcgtgagctcccgcgcccggctgatgccagcgttttaactctacaacaaactgaaactcaaacgagaggaagtggacctctcacaccaactcttatgcccaattggtcctctgccagtgaaggcggggaaggtgaacctgtggccgtcggcagatctgcagatctgccggactgcgggtcggggcgtggcaggggcctagtccccgccccggccgtcagcctgtcgcctctggctcgggccgggcgacgagaccctccctcagcacctgcagtgcagccagagccggtgcggcggccgcgacttccccgacgcggggcgctgagaagcagtgagtgcctgtgtgtacctgccggccgggaatataggacttgtcgcatctcagcccttccctcccggagcgggggcgagaggtcgaggcggggaggcgaaggggcggtgggccgc

SEQ ID NO: 40865 - DNA, 2300 bp, Homo sapien
aggacaggtagcaacaaagaaacaacagaccgtctgtaatagttagtggtaatggtggctgggccagggctgtagttgtggaggtggtgagaagtatctggctgtgggacttactgatggattggttagtaattaagtgctcagtaaacaacatgggctttggtgtaaggctttgggtccaaatacgtgcaccaccccttgttacctggctaagtgaccttaccaggcctcactttatctccttgtttcttggatgatatcttcttttatctctatgaagactaaagtgatttaaaaaaattttttttttattttatagagccagcctctcactatattgcacaggctggtctgaactcctgggctcaagcagtctgcctgccttggcctcccaaagtgctgggattacaggcatgagccactgtgtcctgccaagcattagaatttttgccactaacagtgcttggtagcagaccgcaggtctgtaatttaagtgcaaaagggaaagagaaatacatttacagaactgccagacactgtaaattaactttgatcttcatcatctattttaactagtttgaaattataaaactgaaataaatttcctgacaagtaacctctattgttttattcatctgaattgtattagtattttgtcttattcaccttttcatccctgtgctgagtatggtgcctgactcataaccagcactcagaaaacgtggaattcatgaaaaggaagagggaattttgtctttcatttactctttttttttaaagaggaagaggtaagtaaatcttggttgcaatgcactctgaaattttaattacattttttatagttaaataggagtaatcaatttacttagcagggaatacagcagtccgggataacagaacagtagcagcgttttaaaaaaatattttatttatgggccaggtgtggtgtctcatgcctgtaatcccagcactttgggaggccgaggcgggcagatcacttgaggtcaggagttcaagaccagcctggcaaacacggtgaaacccatctctactaaaaatgcaaaaaaattagccgggtgtggtggcgggcgcctgtaatcctagctactcaggaacctgaggcaagagaatcgcttgaacctgggaggcagaggttgcaatgagccaagatcacgccaccgcactccagcctgggcgacagagcgagactctgtctccaaaaacaaaaaacaaaaaacataaatacaataaaaatttaaagtatttaaatatatatatacatatatatatgtgtgtgtgtgtgtgtgtgtgtatatatatatatatatatacacacacacacacacacatatatatatgtatagtgtagaggcagggtctcactgtgttgcccaggctggtctccaactcctggcctcaagccatcctcccgcctcggcctcccaaagtgctaggattacaggcgtgagctcccgcgcccggctgatgccagcgttttaactctacaacaaactgaaactcaaacgagaggaagtggacctctcacaccaactcttatgcccaattggtcctctgccagtgaaggcggggaaggtgaacctgtggccgtcggcagatctgcagatctgccggactgcgggtcggggcgtggcaggggcctagtccccgccccggccgtcagcctgtcgcctctggctcgggccgggcgacgagaccctccctcagcacctgcagtgcagccagagccggtgcggcggccgcgacttccccgacgcggggcgctgagaagcagtgagtgcctgtgtgtacctgccggccgggaatataggacttgtcgcatctcagcccttccctcccggagcgggggcgagaggtcgaggcggggaggcgaaggggcggtgggccgcgagggagaaggagcgatggggtggacgtccttcaaggccggggaacacgcggggctttccaggccgcgggggacggtggcgggtgtcggggcgcggtggcaacgctggagttcccgggtccaccggcgcggtcagccctggtgacccaagccaggggctggggagcaatctgagaccattgcggctgggctgtggggctccccagtcccggcaggtcctggcgccgctgtacatagaaaccgttgccacggcgggaggatgccgtttcttttcggtctccgactgcagggggcggtcggccctgtggatgcaggaaagagggtgcctcggtgggagagacccagcttttcgcgttagtaggcccgagcagtttgaactggaggtattactaag

SEQ ID NO: 40866 - DNA, 2300 bp, Homo sapien
gccatgtgtggtggctcatgcctgtaatcctaacacttggggagggtgaggagggaggattgcattaatccaggagtttgagaccagcctgggcaacacagtgtgacaccttgtctctacaaaaaactaaataatcagctgggagtggtggtgcatgcctgtagcccccgctattaaggaagctgggatgggaggattgattgagcccgtgaggttgaggctacagtgagctgtgatcgtgccactgcactctagtctgagcgacacagagagaccctatttccaaaaaagagagaaaaaataaaaaatttcaaaatatattagctgatcgtaatttttcatgtagttattcaaagcaaggctttgctgaaaacaaaactattcagatacttagaagggaaagagagactgttgtaccacatgtacctataaatcatttatagagaagagattatttacctcattgttcaggtcatagggtacagttacagatctccttttttcaaacatgtacccaaagggttgtaaatgaatgaattagttttccattgaaataatattctgtggtgctttgggatcccaaccagcctaggaaaacctgctaagtcaataaagtacccaaaagctgagccttcacttaacaataaaaagtagagaatgtggcaaaaaatagtaaacagaaaaattaagttgaaccagaaatagtgggataatgtgatcactaatcaaacattggtgcttgaggctgaaaaattttctagaagactcctttctcttggcagcctgcctttgcaagtctgctccatcagttgtgccttttctcttcttcagtgctaagtttcccaggaatgggagtggggaggagcaggaattagctgcagtgctgaaggataatgaaaggtaccttgggaaggtctaccatctctgcctgcatggactgtgtagggaagtgaggaggctcattgacaaggaacctctagtcaatgctgggaaatgggattctgactaggaaatagaaaggtttcttgtcccatacatgcatcacccacctcccaccccaacctttctactgttttccacaacactcatcgtactttacagccttccaaaggccaaaggtgttattataccatgtaataatagattattttataagtcccatctgtagtattgtttataagtcattttattttagagagtccccatacttttgaggctgttttgaatttgttttggaacagagggggaaaatgtgccatattagcccttgcaaaccatgaaaataaagatctcaaagttcatataatttcacaagccagtttttaatcaccgcttctatgatgatatcaaattctacttattaacacctgtcctgtacagagattgctgagtgaattcaatcctgtcttctggtagccattatttatcatcttttttctttctctgccatttactttgagctataaatgagagccctggaatttgagtcatttgtcaatattgtcttcataaaaaggatctgagaaaaaaataatactgtttattcatacttgtttattagaactgctttttaaggtcaatttttaaaaagaaaccttccctagaagccaatttttaccatttagagaatattctttagaaagaaacctttagaatgctggaagtatcctgttggtgaaccatgtaactcataactgtgttgaaaataataatcttaatttcttcctctttgctcgatacataattacactacttttgattaagattataaagatgacttttactcagaacttttaagcacaaagtaaaatccattaaatcactgtcttaagcaaattaataaggagcaaattatttgtgagaatatataatagtttaaggacactagtaggtttaccttgaactaagatactcagctacgaacttctatgaaaaatcactttagcaagtatagatctttttcaactaagttaaattgtaatgtattttctctttaatcccccacccctatttttattaattcaagattcacaatcgctatgaaggcaaggatgtttcaaagcacaaacggaatttggccatagcaggtggtgtaacgttgtctgtaatcgtgtctccagtagtagctgcagtgactgtaggtaagaaaatgctgaaaagtactaattacctacaattttatggagttaaagttttgtggaaggattttttttaattgttttttaatttgaggacaatttaaattgagcctgcagtaagtcttggttgaaagtattacagattcaagagcctagccttaa

SEQ ID NO: 40867 - DNA, 2300 bp, Homo sapien
tattgtgagcattgttaagtatgtcttttaatgtatgtgtacattcatttttcttatgcattcctttctaggagtgaaattgttgggtaatagggcatctctgtgttccaatttgatattgttaaacagttttccaaagtaattgtgccattttacactcccacgagtagtgtaagagagttcctattcttccacatccttgctaacacttggaaatgtcagtcttttaattttagccatcctattaggtgtgttgtctctgaatgtggcattaatgtgttttttcctgatgactgatgatgttgagcacttttcatatccttttgtgaaatgcctgttaagtcccctgcccgtttttctattggattgtctatgttttcttattgatttgtaagcattctttacatagtctgggcactgtgcctttattagttatatgtggcaaaagtctcctcccatacccttaatactgtctgttgattttattctagtccagtttatcagtcttttattttatggttggtattcttgtatgttctgtttaagaattttttcatagaaatagtctcttttgtctcctagaagctttatatttagatctgtaaaccatctgtaattgattttcacacatgggtgagccatccatccatcaagtttcttttctcaggtggataaccagtagacatagtatttttctttttttaaaggccatttattctcagttctcagcaacatcacctttgtcagaaatcaagtctcatatacatatatatgacttttttttttttttttttgagatggagtctcgcactgttgctcagggtggagtgcagcggcgcaatctcggctcactgcaagctccacttcccgggttcacgccattctcctgcctcagcctcccgaatagctgggactacaggggcccgccaccacacccggctagttttttgtatttttaaaagagacagggtttcactgtgttatccaggatggtgtcaatctcctgaacttgtgatccgcccatcctggcctcccaaagtgctgggattacaggcgtgagccaccgcgcctggcctatatgggactttttcttgactactttttgttccactggtctttgtattcatccttgtggcatagcacactatgttaattactgtaactttataagaagtcattatatctggcggtgttagagccctttccctactttgttctgcaagattgtgtaagctattcttagccctttgtatttgcatgtatacttgatggtcagttataaacaacaacaaaaagacctgctaaaggcagtgagaaatcattgaagtcagagtgataatgaccagaagttttttctggtcagctcaaatctagaatcttttattaagattaaagaatgcccttgttgttatttcagcattagtcttgtagtttcttatagactatttaataaattggccttgttaaaaaaaacaactactactaatggttaagaaacatacttgtttgaaatttcatatttataaaaatatacaaactaagaatacaattaaatgatcttgatttttttattttttatttttcagaacatccatgatagcagtcttctgtaaatcgaacttttcaagaattctctgaaggaaccaagtaggatattcttacatcatgacttaatgtgaatgcaagaacaagaaataggttttatctctaaatataatgaagggctgtgtgtaaacactgaccctgtctcaattctaacaagcattttagacatgagtttacatcggcaaatgggttcagatcgagatcttcagtcctctgcttcatctgtgagcttgccttcagtcaaaaaggcacccaaaaaaagaagaatttcaataggctccctgtttcggaggaaaaaagataacaaacgtaaatcaagggagctaaatggcggggtggatggaattgcaagtattgaaagtatacattctgaaatgtgtactgataagaactccattttctctacaaatacctcttctgacaatggattaacttccatcagcaaacaaattggagacttcatagagtgccctttgtgccttttgcggcattctaaagacagatttcctgatataatgacttgtcatcacagatcttgtgtggattgcttacgacaatatttaaggatagaaatctctgaaagcagagttaatattagttgcccagaatgtactgaacggtttaatccccatgatattcgcttgatattaagtgatgatgtcttgatggaaaaatacgaagaatttatgcttaga

SEQ ID NO: 40868 - DNA, 2300 bp, Homo sapien
ttgggaggccaaggcgggcggatcacttgaggtcaggagttcgaggccagcctgaccaacatggtgaaaccttgtctctactaaaaatacaaaaattagccagcatggtggcgcatgcctgtaatcccagctgaggcaggagaattgcttgaacccaaaagatggaggctgcagtgagccgagattgcttcactgcactccagcctgggcaacagacacagactgtgtctcaaaaaaacaaaaaaagttccctttgtgcctcaccacaaaatgtagccacaatcctgactcctaacattgtacattaattctctctgtttggaactttttataaatagaattataccacatactcttttgtatgagagtcctgtcttgtgtgtagcagtattttattccttttcattgcttcattgctttagagtgtgaatataccacaaattatgtattcattctacagttgataaaattatgggttgtttccaatattttgaatattattactaatgctattgtgagcattgttaagtatgtcttttaatgtatgtgtacattcatttttcttatgcattcctttctaggagtgaaattgttgggtaatagggcatctctgtgttccaatttgatattgttaaacagttttccaaagtaattgtgccattttacactcccacgagtagtgtaagagagttcctattcttccacatccttgctaacacttggaaatgtcagtcttttaattttagccatcctattaggtgtgttgtctctgaatgtggcattaatgtgttttttcctgatgactgatgatgttgagcacttttcatatccttttgtgaaatgcctgttaagtcccctgcccgtttttctattggattgtctatgttttcttattgatttgtaagcattctttacatagtctgggcactgtgcctttattagttatatgtggcaaaagtctcctcccatacccttaatactgtctgttgattttattctagtccagtttatcagtcttttattttatggttggtattcttgtatgttctgtttaagaattttttcatagaaatagtctcttttgtctcctagaagctttatatttagatctgtaaaccatctgtaattgattttcacacatgggtgagccatccatccatcaagtttcttttctcaggtggataaccagtagacatagtatttttctttttttaaaggccatttattctcagttctcagcaacatcacctttgtcagaaatcaagtctcatatacatatatatgacttttttttttttttttttgagatggagtctcgcactgttgctcagggtggagtgcagcggcgcaatctcggctcactgcaagctccacttcccgggttcacgccattctcctgcctcagcctcccgaatagctgggactacaggggcccgccaccacacccggctagttttttgtatttttaaaagagacagggtttcactgtgttatccaggatggtgtcaatctcctgaacttgtgatccgcccatcctggcctcccaaagtgctgggattacaggcgtgagccaccgcgcctggcctatatgggactttttcttgactactttttgttccactggtctttgtattcatccttgtggcatagcacactatgttaattactgtaactttataagaagtcattatatctggcggtgttagagccctttccctactttgttctgcaagattgtgtaagctattcttagccctttgtatttgcatgtatacttgatggtcagttataaacaacaacaaaaagacctgctaaaggcagtgagaaatcattgaagtcagagtgataatgaccagaagttttttctggtcagctcaaatctagaatcttttattaagattaaagaatgcccttgttgttatttcagcattagtcttgtagtttcttatagactatttaataaattggccttgttaaaaaaaacaactactactaatggttaagaaacatacttgtttgaaatttcatatttataaaaatatacaaactaagaatacaattaaatgatcttgatttttttattttttatttttcagaacatccatgatagcagtcttctgtaaatcgaacttttcaagaattctctgaaggaaccaagtaggatattcttacatcatgacttaatgtgaatgcaagaacaagaaataggttttatctctaaatataatgaagggctgtgtgtaaacactgaccctgtctcaattctaacaagcattttagacatgagtttacatcggcaa

SEQ ID NO: 40869 - DNA, 2300 bp, Homo sapien
tgtgtcttttgaggccaaatacagaattgcatacaccttcgaattggagttattgagttggattgaaagtcaggctacctgtcttctctcagttttacatctccgcacaaaatgactttgcgcgttactgtctttcccaatgtataatcctgtaatcccagcagtatggggagctgaggcaggcagatcatttgaggtcgggcaagactagcctgaccaacatggtgaaaccctgcctctactaaaaaatacaaaaatttgctgggcttggtggcaggcacctgtcatgccagctactagggaggctgaggcaggagaattgcttgaacttgggaggtagaggttgcagtgagctgagattgtgccactgtactccagcctgagcaacagagcaagacaccatctctaaaataaaataaggaaggatattcatcatctttttcattggattagtataagttaattatgcctttgaaacactctgggctactcagacaagactgttataaaagagatcctctaattattagtaactagtcagagcaaggctcagtgtaaaaaacaggatagaagttcccatgagactggtgcatatagaatgtactgttacctcccacattggaatcagtaacaataaatcaatacaagatgctcttaaatagaatcaggagaggcgactaggttggtttgagcaccagattttaaacctctcatctatttaatattgcctgaacaaatctgtttttcagtttttgtatggaataaatgggactttttatataggcatccttaaataaaatcatgaaataaggtcatttggaaagtggaggtgggaactggtaagtaatgtgagtgcgtaagtgggggtgggaactggtaagtagtgtgagtgcgtaagtggggaaaataaagtaaccatttagaaaagcctgttatcttagggtatatgatgtatatagtacaatgactgtaattcttttatccaaagcaagggtggcagtggttacctggtaggcagttgtgacttctggttgtatacatagccatatcaaatagatttctccttatagccataccctttaatataaaaccaacttttgtcaggcatggtgactcatgcttgtaattccagcactttgggaggccaaggtgggcaaatcacctgaggttaggagttcgagaccagcctggccaacatggtgaaaccctgtctctactaaaaatacaaaaaaaaatttacctaggtatggtggtgggcacctgcagttccagctacttgggaggctgaggcaggagaattgctccaacctgagaggtggaggttatagtgagccgagattgcgacattgcactccaggcagggtgacaagcaaatctgtgtctcaaaaataaaaataaataaataaataaaaacttttttttggagacagagtttcactctgtcacccaggctggagtgcagtgacgcaatcttggcttactgcaccctccgcctcccaggctgaaacgattctcattcctcagcctgccagtagctgggattacaggcacctgccaccacacccagctaatcattttttttttttttttttttttttacaagcggcgaggttttgccatgttggccaggctgatttcgaactcctggactcaagtgatccgcccacgtcagccttccaaagtgctgggattacaggcgtgagccactgcacctggcccatttttaaaattatgcacaaacgttaaatatcctttagatttttgcataatttagcataccttactgatgtccttagcaaaaatttccagaaccatattttagtgtgttgcatggtaaccccacaaaagatatgttcatgtcctaatccccagaatctgcaaatgttatttggaaaaaggggttttgcagatgtaattaagttaagaatcttgagataagatcatcctggattatccaggtagcctcaaaatcaagtgacaagtgtctttgtaagggacaagtagacccattacagagaagacgacgcgcagaaaaggaggaagcagtgtgctcatggaggcggagattggagtgatgtaaccgcaagccgaggaatgcttatagtcaccagaagctggaagagtcaaaggacacattctcccctcaagccccagtgggagcacggcccagctggattttggacttctggcctccagaactgtaagagaaatgtccattgtcttaagccaaccagtttgtggtagtttgttacagcagccccaggaaactactatgcagtcaaaagtcttcagtaaaccaa

SEQ ID NO: 40870 - DNA, 2300 bp, Homo sapien
cagagggagatatagaacagagagcacagggatatttccggggtataataaacaggacttggtggttagttatgaattggaagggacaaaaagaatggggcctgggaacaatcctaggtttctggcttgtgtctgggtgaatgaaagaagcatgctttgaggaaagaacaaactacatcttggacagcctgaatctgaggtgcctctaggaattcaagttggggatgttcaataggtatttgttttttaatagatttatttggcctagtgaagaatagaaagtccttctaatttttaggaagacaagaaagccagaagcagcatctctggaaaatattaccgttgtacagagtgtaagaccattttcattccgcacagcttctttattcaaaatcccctttcaagccagtgccccatctgtgctgaaatgttgtttaacatgttgatctattttcttttcttttttttttttttttttttttgagacggagtctcgctctgtcgcccaggctggagtgcagtggcgagatctctgctcactacaagctccgccgcccgggttcacgccatcctcctgcctcagcctcccgagtagctgggactacaggcgcccgccaccacgcccagctaattttttgtatttttagtagagacggggtttcactatgttagccaggatggtctcgatctcctgacctcgtgatccgcccgcctcggcctcccaaagtgctaggattacaggcgtgagccaccaattccggccaacatattgatatattttcaagaaggatattatatatgggtacttaacttactattcttgtgctatctgtaggcttaaagcatcccatatgtaaagtcgctggcagccttcaagtagcatttaaaggtataacagctttaaaacttcccataaatgaaaataaacatacccataattacttcctttaagattcgaggccaaagacacttaaacctaaactgcctagcttgttcaattttctaattggtaaacatttactgggttaccaaagataccaagtacattcggaaagaccatggctccttggtttgtttctaatttaaattacacagacacactaaacaaggactgggagagtgatatatttagttaagtaacagatggcaaatggacattctgtccagcctctatcacattcgtttctcagtattctatgttagagtgatctaaatcttgaagagaataaaccaggaggaaatgcaccaggcccagacggaatttgtttattcaactaagaataccaagactagtgtagattgaaacattcaaaggggatatgactggctgaaaagatatgagacgaaggaacaaataaagctggattaaagtaattaggaatgtattagagatgaaataggaattctgattacttgactgcaaaatagtaaaaaaaaaatgaaataaaagagatgaatggaagatactctccaaaccctcacgtaggcttgctattgtggctaagtactgttcctaacagcctctgcaaagacaggtgcactaagagggcggctgcagacgcacagggtgctgccgtcctctgggaaaggacatttcctcgccgagagctgcaacatcccggcacttctctccctcggcctgccaatctagcaggtgaaccctgagaacacaaaggaatgaataatgccgggcaaactgccaagagccagagtcgccgagtctggcaactcccttcaaccgggcgcagctccagccaccccgacctgtccttggaggagacgctctctgggccacggagaaccggccagggagacaccggccccactgcccggcgcgctcgaggcgaagtcccctccgccagggacaggcgtgggggccgcagtcggggccacccgggtgcagcggggcggctcctgcgcgggcgcggaacgaacgtgcgcaagggaacagccgcgtccagagccgcccgcagcgggcccggtgggcgtgacgccatgacgcacagcacgcgggcggcgcgctggggcggggcggccgggggcgggaggaagaagtgggaggaggaggaggggaaagcgggggctgcgggagggggaggtggtagttgcggcgctggttcccgggagcagccgtcgagccacaactgcggaggaggagttcgggaaagcggccgtcgggactcctcccctccgtcgtctccgccccggttgagaggcgcctcggcgcatcggagggaccctcccccgcgcttcctcaggctgctgtcgccgctgctgggagatgggcctactcgcccgcc

SEQ ID NO: 40871 - DNA, 2300 bp, Homo sapien
aggatcactctgtgttatttcttacaactgcatatgaatttataattatctcaaaaagtttaatttaaaaaagtctttagtcctcttcacccattggacaatcgttaaatatgtgctctgatttgtattcactttatgacttcttagggaagctattaacagagtctagtgagtaaggtctaactgaggtcttggaagttttcttggcaggtttctagtaatttagtctaatgaatttgtataatattattatgaaatcatacaaatctgtaatttgttcaagtgtattttcttatgggccattgtaatatccaaagaaaatggcaggctggttgcggtggctcacgcctgtaatcccagcactttgggaggccaaggtgggtggatcacctgaggtcaggagttcaagacctgcctagccaacatggtgaaacctcatctccactaaaaatacaaaaattacccaggcatggtggcacatggctgtagtcccagctactggggaggctgaggcaggataattgcttgaacgcggaggcctctgcaggtgagtcgagattgcaccactgcactccggcaccagcgacagagtgagactctgtctcaaaaataaaaaaagaaaaaattgcagaagcattgtccttcttgtggatttaagagaacattaggattatttgggggcatgaccatatgaactataattccatctctagatgaaaaacaaaattttttctttttccctaatgtgagctctaccacatccagaataacccacttgcaccattttaattaacattgaaaattaaagccaaatcatacattagagacaggctctagtcgttaaagactcagctctagaggtcaggacaagagaggaaaaatattaggctttgggtgaatacataatatttgtttaaggaaatcaaggtaagtggctccgtgatatgaagttcgtctaaattgatactgtggtatcacaaaagaagtaggaaatgaggagcgtagatgttttgtgtgttatcatgtcttcgtgatatttactgaccctcgtgtgggactggtcctcaggtacagtttgtcagctattgtcatcagttccagcctagcactgatagcctttatgatacaacctgacttacatattgtaaatggagctttgtaaaataccattaattatttccctatataaatttgttcacagggatttgataacaatgaacaaggatgatcggtaaaaagttaacctgtatttcaccctgaccaggaatttgggatttggacttgatagcatggtatctggcacattgcaggcacacagtgaatgtttgtttcatgaactaatattgctatttttgtggtccttactgcctgcccatgaccctgcttccacggtccttccagagaagagctgagtgggcagacagggtgccctcgtagtctctctcagtgcagagaagtgcagcctgggtgggggagcagcgtcaggctatgtaaagaagactacagatagacttgggccagcttttatttcacactgaaaagacaaggaagggaacagatttaaagagatttaagtaccagcattcaaggtagattagaaatactttttcttaaatgtatcctgtttggtttaaatataagtattggctttttaaacttattttttcccactatgaatagtattttatttataaaaatgcttttgtggactaatctgggatctagcctccatttataatgtgaaaaatatgcattctgaattccaagtaatgactgagagtgaattttcggagcccaatttgttctttagtgatggcacataatttgattcttattcttttatctttctgtcttgctttcttgtttgtgggccacagagcagcttctattaagcccttctttgcttccttttcactactttgttactcgtcagatatttttctggcctcacaagttgatgcctcacctacagattttctagagaatttcttcaggctcagtaacctgtctgtatttaatagaacagtgagttctttttctcaccacacttctattataacttaattttctatttactgtagatccttgccagcacattacagaatatttttgttgaaccttcttgagaattcagagaaactgctgagtgaccactgaacgaaaagatctaatcttaaggcttacgtgagtatttactactgtggacttcctcacaagatgtgaaaccttcagtgaactgctttaggacagattcagttctgtgatcaagatgaaaaataactatcattgggcttattaaa

SEQ ID NO: 40872 - DNA, 2300 bp, Homo sapien
tatgagtggtgtggggattatttttatgttctagtaatagctattttcagtgcttattttatgtcagacacggtgccattgctttaaatacctggtacctttaatccttgaagcaaccctatcaggtaccatttccattatacagataaggaaactgaggcaccgagagtctgacttctccaaggtcagaaagctagcaaaggctgagcgagatttggtctcatctcccttacttcagtatccctgcgtctgttatctagccaaacatgtagcgctgtctaagagttttatcaattagatttgtagcctgaactgatttctctcaggcttagttttcatggttatatgcaggagtcctacatgaactcctttttagtttaaaaggagtttagtaagaaaactgttagctcattaaggactatagtgataataaagttaaacttggactggggttctcactgtgccagtacaatttgatttgaaatagagatgaatttgtttggttgttaacacactttattacatttcttcattatttatgtttccataccattttttagtgagttcactttgcctttgcattattatggtagcagtaccagagggaaatcaaagattttttgatgatagtaagttaatattttacagaatacaggaaaggcactggagagaggatgtgaagtgataaggaatttttggcatgttatataaattgtgttactatggaaaacaaaggattctcacagttctttatcaaaagggaaattgtatttcccattgtggaaataagttgggctttatagtcccaaacttcttagccttacctattatagatttaagaatttgcatattcggcattcatatagcaagcgtatattgagtgccttctatggccaggctctgttctaagcactgggggatgtgagagtgaacaaaatgaagtccttgtcttccaggagctaacatgtcactggaggaaggtggggttggggacgataagcgggatttgtgaaagttaacgtatctggagtcagatggtaacagttactaggaataaaaataaagtagcaaagggggataggaagcaccaaggaaggaacaggtgcagttttaaaataaggactggtgccatggaaaagactcaagcaaaactgaaggcgttggggaccgccatgcagctgtctagggaaagagcataccaagcaagggcaaaagcccagaacccttcagtcttgttagagggacagcaagagaggaacagcaaggaggccagtagatttgagcacctggagggaaggagggtgagacaaggtcagagagctaatgggcccaggtaaggacttttgcttttactctgagtgagaagggaggtgtttggagggttttgagcagaggaatgaggggatctggcttaaggtttttaaaggatcactctggctgctgtgttcagtgttgactgtaagggcaaggatggaagcagggagacctgttaggttgatgcagtaattgaagccagagagaatggtggcttagaccaggtgggtagtaagagaggcagtaagaagccgtcgtattctgagtattgctgataggatttgcttatggtttggatgtgcttatgagagaaagggtgaagcacgaccctgtggcctttggcctgagctattggaaggctttagttaaacagtgtactgagatggagaagactgagtgtgaaggtaggtggagccagttttagtcaggtttgagatgcctgttcaagtggggttatagagacgggagttgaagagaaaggtccaactggaaatagaaatttgggaagtcactaatgcaagcttgtgcaacccaaatttgtaaacttacttaaaacattatgagattgattgtatttttttttaagctcatcagctatcgttatatgtgtgccccaagacagttattccactgtggcccaggaaagccaaaagattggctacccctgcacagaagggtagtatttaaagccatgagcctatgagatctagtgtaaggaaatgagaattgagctctagggctttccacattcagatattggagagatgaataattacaaaggagaggcttttgaaggtaggaggaaaaagaagcgagtatggagtactgaaggccaagtaaagagtttttcagggagaaagtgaccaactgtgtctcctcctgctgattgacaagtcaagtaagatgaagactaggagatgaccattggatttagtaataggaaggtccttggtgaccttgcaagagcactttcaggagaatagtga

SEQ ID NO: 40873 - DNA, 2300 bp, Homo sapien
tgagcaaaaggagaagccccttataaaaccatcagatctcatgagaactcacgcgctctcatgagaacagcataggggaaactgcccccatgattcaattatcttcacctggtcctgcccttgacatatgggtattattataattcaagatgagattttgggcagggacacagccaaaccatatcagctcctaacagccactgtgtcaaagtgcccaggtgtggtaacatgaaggagccatagaatatgtgcagcatgcagttcactttaatctcatcagagaaaaaagctgtcttcaccatccctacattttttcatatcaatcaaaagcagtaattcatgaagaggaagagataaatttgaatagaagtaatggagaggctctcagattgttggatgagtcaactaatgaagagtaaatcttattaatacattgggaaaagctttaatttccttgctaatttgtcatagtttataggcatcagtgaagatattataaactcaatacacaaccagaaggaggacatcaataacaaactgattaataaatgtcatcaatttaacaagtaatattgctgattagtcatagcacaataaaatgtgaaatgccctaagatcttataacttttttttttttgagatggagtcttgttctgtcacccaggctggagtgcagtggtgagatctcggctcattgtgacctccgccttttggggttcaaggattcttgtgcctcagcctcctgagtagctgggattacaggtgtgcaacaccgtgcctggctaatttttgtatttttgtagagccaaggtttcaccatgttggtccggctggtctcgaactcctgacctcaagtgatctgtccaccccagcatcccaaagtgctgggattacaggtgtgagccaccgtgcatggccagatcttataattcttacatgaaagaaatgtaatagtgatttcctctaatatgacaatagtcctaaacctttacatgacactttcaagaacaaattattagatggtgtaggtggtccttgaatgaatgaaccatgagataccctagagcaggggtgtccaatcttttggcttccctgggccacattggaagaagaattgtcttgggccacacataaaatacactaacaccagcaattgttgatgagctaaaaaaaaattgcaaaaaaaaaaaaactcataatgttttaagagagtttattaatttgtgttgggctgcattctaaactgtcttggctgcatgcagcctgcaggtgtgggccaggggttggacaagtttgccatagagcgtggcttggttggatgagggtgctagaattcagaggacggtcactgtgcagtgagagttgtcttggctgtaggactggagttggtaaaatgaaaaaaagaaaaaactagttttgcatgaaagaatgtttccagcatatgaatgtcccaccacacttttagttagtcttggctgtacatgttgcaataagtcaaggaaccctacaaagtaggatggaaggattcaaactgcgaatcgcttgaacccggaaggcggagttggagtttgcagtgagccgaggttgagcaactgcactccagcctgggcgacagagtgagactccgtctaaaaaaaaaaaaaaaaaaaaagattcaaactgcttttgaaaaaagtaaaaatgcagggttatattttagaaatagtgcagccaatcattagtggctattcctaatatgtcaatttcgggtctatagaagacctacctagaggccagcaactattaattgatgcttatagcacctaatgaaactgcccttgcctttgaagcccccatttagctaaggggatgggatgtgaatttagaataggacgtgaaaagtgcaaaatgctcccggactcagatcggataaacctcttctaggctgtctttctcttctgaagccacagttttgatgctttccctaattcagagcaggctttcccggagtctctgactcagagcagcccgagccaccgtgaggaccgcccacctgcagggggcgcgccgggggctgcagcgcgagaccgctctggcccagcggggactccgactacccctgtctggcccctcccctccgcccgtcaccgcctccttgaagctgccgctgtcgctgctgctcgttcgagtcgcaggtacttggcccggggcctgtgggcagcgcctgggctagagccacttgatatctcctgcaccgtccctgtagcactggaggtccagtaggcctggccggggccctgaggggcgagggtgcccgggct

SEQ ID NO: 40874 - DNA, 2300 bp, Homo sapien
agaaatttagtaattgtaagcatgtggtggggaggaattaaaatgtaaagtcaaaacttgccctttgataatgaaatgacgaaaaataagcctgttgctaatgtgatcagccttttggggtcaccgagcaatgtgattgagttgctggggctccccaggtccctgtgaagactgcagcatctgttgtgtctgaaaggtcagggggcctgaggaaaggggagctgttgcccatggtggagacagggtctcacctggtcagctgacctgagccccaactttgtggtcccccagtaatctcctgattggtcatttggatcttcccttttacatgctgacacctggaaggtgatgcgatcaattgtaccccaaacctcagcatcacgcaataaacccgtgtaacaaaactgcaagtgtaccccttgaatctaaaataaaagttgaaattattttaaacatgatacagaatgtgtgcaatgggtatcagatttccgcaacacaaattcaggtgtataccataaatgtattagtcttaaaaaaaaaggaggttacttcccggccgctcccacctgcactgtgtgactagtattctggcttacatagcagtctccaaacacagaagatgatgtgactcctttctccattttcctgaggatgttacatggccagtaccattctgaatgcctaggagagaagttaatttattgtatactgtggatgccttggggcattagagtttaatcctctcagggaatctgggatgagaaaggctgtgacctcaatcagccagagatgaagcaggtctgtggactgacagcatcgcctttaggagatgccaaggaacaatccacccccagatcgctgccctgcaaggccccatgtgggcagccgctggcctctctggatcctgcttcctcctggtgtcctccctctccctatagcagctggagtaacaattcagcctgtgcttccctgaactctgatggcctaacaatgtctccagctccatcccaagaatgtcacagatccccagatttgttcctgcttctagcacacatccttccccttgcaggatgcttatgcttaagcctgcagagttgtgtccagcaggagctgctccttcagctggaaactcactcactagatggcaactcacttcccttcactggcctcacagtttgtgcagctcagatttttgctatagcaaaatcataaattactgcatatttagtgtggcataatacaaaaccaatttgatctttgtccccagttcctggcacagagttcctaggaatttccttagcgttaggactgccttttgttatccataacaagcacctttcaacattgcctgagtttatgctgatgagatgattcttggctgggggactccgagatagtatcaggatgcggactggtcacctgaaagaccacggcatgattagaggattgggactttcagcccccaccccacaactctcggcctcttgggaagggggagtggctggagattgagtttcgtcaccagtggccaatgatttaatcaattatgcctgtgtcgtagacctccataagaaacccctaagcaatggggtttgaggagcttccataacggcacctccataaacaacccccctaagcaatggggtttgaagagcttccaggttggcgagcaagtggcggtgctgggagggtggggcacccaaacagagcatggaaaccccacccacaccttgctctgtgcatctcctccgtttggctgtttctgagttgtagcctttataataagccagtaatagtaagtacaccattttccttcactttgtgagttgttctagcaaactatcaaacctgagagggggtcatggaaaccagaatttgtagtcagctgggcagaaatgtgggtaacttgggccccatatttgctgctggcatgtgaagggggtagtcttgtggagctgagcccttaaacgtgagggatctgatgccaactccaagcaaagcatgtcataattgaattgaattgttggacagccattgtgatgttcaagaactggagaattggttgctacatggaaacaccttccccctgcccccacccacaattagtgtcagaaaaaatcagggatatgggctttagggatgcttggaaatactgaaaactgggcaagttaattatgagactgttaaggatgcagactttatcaaaagctgttttctccaatatagatactcagttgtttacttggaagttctttaagcttcatgttactcctttgccttgcctccactataccccacaa

SEQ ID NO: 40875 - DNA, 2300 bp, Homo sapien
tcaggcaattgtgagaattaaatgacttcattcatgtaaagtgttcagagcagcgcctccaatcgctgctaccattattatacttctctcttggtcatgtttgaagattgtcttgcacagtgtggagtacacagaaggagctcaataatgttcactgactgaatgactgaataagagctgactggctacagcagaggtcagggatgcaagaggacggtgacttgcacagaggcctgtcctgttccagttcaactccaggggggcacttagtgaaaggaaggaaatggccctgtttggacatgccatggggtgaaaccagggtccaggccattcactggagcaggaaagttccaggaaagctggggccacttctgggtctgaccaaaatgctctgctttgccctgaagatcagaccagattccagagctgccgtgatcaggctttgtcccaagaggcactcaggaatacccctggccttggtatagggaggccttccagatcagagatggcctatgggcaggggaaataccctaaggcccatctatcctggactgaaaattcccttgaagtaagtagagttattaacatgatttcataagaaggaactgcagcttaaagagtgcactaatttcacacttgtaatctcagcactttgggaggccgaggtggacagatcacctgaggtcaagagtttgagaccagcctgaccaacatggagaaaccctgtctctactaaaaatacaaaattagccgggtgtggtggcgtatgcctgtaatcccagctactcaggaggctgaggcaggaaaatcacttgaacccgggaggcagaggttgtggtgagctgagatcgcaccattgcactccagcctgggcaaccagagcaaaactctgtctcaaaacaaaaaaaaaaaaaacaaaaaaacacaaaaaacactaatttgcccaaggcctctcaactagaagccactaagctgggacatgaattcctgttgccattctcttaactactatatgatactgcttccctcacttaatggccctagcctcaatttccttttctataagaccagaactgtcaatggctcctagcccacaggtgtttgtgaaaattaaatggcatagcatatgtcaggtcctggcacccagcaagcacgcaggaggcaccggtgtttggcaggcgtcgcttctccttccttagtctcggattcccgtttcaggcatgcagctcttaccccagggatgactggcatttgaaaggactttcaatgatcctgatgaaatcctgcagtaaacgactcagacccatgaaaaaaatgccctgtgagcttggacaagttcctccaccccctgggcctgttttgtccgtggtaggatgtcctctgtttacctggaagagttacgggtagattaaaggagagagggaagaacggagccagcccaggcttgctacagaacaggctggtgagagctgcagcatctctgtgctctgtgatcacggcaaggtgggaggaattctagtttcatttaactaaaatagagaattaggaagattattttccacagcaactaaaaatgagagactgttgaaagaacttgcactgggtagtccagagaaccaagtgtttatgtgaatgcacctgtctaaaaatgagggcttctcagggatcaagagaaacccaagccatttccatttggggggggcttctggtattttaaggggaaaaaacaagattgaaagaataatacgaaagcaaggttgcatatattgctgcatgtcttgtgttacatttaacaaatgtcagtacaaaaaaactgaccaaacataactctgctaatcataaggcagttactagatctatgtaattacagaaatcttaattagtgcactgcaggcagcgttggcaggtaatgggacacaaactgttttcaagcccctcacgggccttcttggagaaaatgccaacagtggccgatgtccggggtgggggtggccgtggatgcgccccagccccaggcgccacctatcccgggaccagagcggcggggctggatggggcggggactgggaggcggcgcggcccggccccggccccacctgtagatgtccccggccggcgagagcgggcgccggggttcgctctgagtcgcgtggcaggccgcgctgcgtccaccgctgccgagttcagagccgcgcaccgcccgccgccgcaggtcgggttcccagcgctactcccaagacaccgctcagccatgaagatgcatttctgtatcccggtgtcccagcagcggtccgacgcgc

SEQ ID NO: 40876 - DNA, 2300 bp, Homo sapien
atgggaatgaattctagagaccacaaaatgaaaacttgaaagtgttactctttctcagcttaacgtttttaaatccaaaaaacaatttttacatttcttgggattcgaagagttgaacttcaggttgccgtggttacagtgtacagtatatattatcagtctgtaccagtagaccagtaccctaactactgaaaagaatatggcagttttccatttgtctagtttctgtatgtacaatttactatccaattaattacttaagtggatttcttgttcttttttaaaaacttattgctacattgataggcagaatagcttctgaaagtgaccagttttcaatttcataggaagaggtgactcattgaaaaatagctcaagcaaagtcagctaaaaaaaaaaaaaaactagggaagctgagtaggtgtggtcaattgataatgagctaacagctgattatcactatattctagaaactggaactttcatttataaaaaaagaggtggccggaaaattcatcctgtcaataacttttaaatttacattggcatggaatttgtaggaattgtttcagggcttaaaagggaccgttttccctctcttcggggactagtctttttatttaaggatgtgttatttcatttagagcctttaatggtacaggtatacataattcaatcctttatagatcctgaaattaattgtagattttgaaattttctagcagtattcagaaataactaaatcagttgttaagaaaatcagcgatctaaagtgaaattgattgtatgtgtcaagagagcgttaatggtgatttctgaatattgcagacctggtgtttttaaaattctgtgattatgaaaccaaatatgtctaacttcacattagcttttgaaagcatgattcaaatcttggtctagcctttcattttcttaaatggaagttgtgccatgaatcactgaaaccctccctccccccaataattaagaaactttcattttttaggaaatggactagttttcatataatattgttagttattagcaatgaaatgaccaattttagcaagtagttgggaagaagttaaaatatttaaatctataaactacttccagcttgtagataaatctgttgcgtaatgtcttttatactgcttattaaacagattgtatgtgaaggaatttggattttgataactaggaaaaaaagtgctttagatttaatggcaattaaggcgagagattgcgtcaagaatttattaattattagcaatatggaattcttttatatgtgagaaatttcgggggcttctggtatttgtctttgctttatacaacttaggtcccacactagtgtgtgatacttgaaaggtctagccatcttgaagcttaaagaggaagcgttcaactgtgagaccatgtgtcctcccactccagtcaccatagtttatataatcttaagtagccagcaaaaattttgaagtaatattgactctgaaaatgtccttcctgcagcggagcgtgctttggacaccatgaattttgatgttataaagggcaagccagtacgcatcatgtggtctcagcgtgatccatcacttcgcaaaagtggagtaggcaacatattcattaaaaatctggacaaatccattgataataaagcactgtatgatacattttctgcttttggtaacatcctttcatgtaaggtaagccaaaaatgtccgatacacatgtttacattgttgagctacatttagtttagtgcttgaaataggaactgtgcagtaatggatatctttatttcacaaatatccaggttagatggctaacagattgtctctcaacactgaacaaatgttaaatcaatagcaaataaagaaaaatgggtatatgtttttccctaggtggtttgtgatgaaaatggttccaagggctatggatttgtacactttgagacgcaggaagcagctgaaagagctattgaaaaaatgaatggaatgctcctaaatgatcgcaaagtgtaagttataaatatctagctaatcatattttgaatcttatttttaataattccaaatccattcattttaagttaatatttgtcagggagaagttagatgcacataagataaaagaataaaaacattttaaagatgaataacaaaaattcatgtagttgtactggagtgaaaattaataagctaatcttgatttttacaattgaattttctacacagtaagtgtaacatacaaataacaggtttaatataattaacattcatgccaaaaggaaaacagaa

SEQ ID NO: 40877 - DNA, 2300 bp, Homo sapien
actaatatacttttctagtgatgagaatgcttccatttaccatccagggcatcactgcctgtcaagctgccctggaagcctaacaactgtttattttttatttatttgagtctcgttctgtcaccaggctggagtgcagtgacgcaatcctggctcactgcaacctccgcctcccgggttcaagcgattctcctgcctcaggctcccgagtagctgggactataggcgcgcgccaccacgcccagctaatttttgtatttttagtagagacggggtttcaccatgttggccaggatggtctcgatctcttgacctcgtgatctgccccccttggcttctcaaagtgctgggattacaggcgtgagccaccgcgcctggctactttttgtatttttagtagagacggggtttcaccatgttggccaggctggtctcgaactcctgacctcaagtgatcagcgtgcgtcagcctcccaaagtgctggaattacaggagtgagccaccgcgcccggtcacattttatcctctttttaataggagcaaaatagtatttatgtgggattccactggtttaaattctaattaaatgagacaagatataaagtacttaattccacacctagcaatacagttgacatccattaaagtttattgaattaaggaataaattgggcaatcatttaacttctttgagactgttcctgtaacagtaaagtaaaattattactacttgctccacctcccacaccagattgctctcaggaacaaatgatagtatgtttacgcgagtgctttaaaaactgtaaaagcactttactactttcgagtggaatttgtatgttgatttaatgtcattcctagagccggtttttattactatcaattcgttaaatttagcattcctattaaaacccactactaatgtgcagaattgttttagttatttataaggacgttgttttagactattcctaattttgtctggttgcagggctgtggtgccatatagtagtgattgtgacaaacccgtactttcaggaaaaacattcacttttctccactcctggtttctatcgccaagaaatgtctggcagaagcagcacaaatcaatgattccagcctagcaccttaaggtaagaagtgaccaaagacccccaacacagctatcccaaattaaagccactttgaccaacgacaacgtccagtgaagacacggaggagggtcgggctggaaaagaagaggacgaggaacccgaggggccctcccctctctctccctgccccccaaccccgcgccgggagctccagcggtgccggggtccagcgcgcaggacggttggggggtcccggagcgggcggccaggacccgcgcagccagttggtgtcagcgagcgccgcggccgttggggactccagctcccagcaggcaccgcttctgcggccgacgcgcgtggcggcggtgccggctgggactcgtagtgcggtccgggtaggagagagcagggggccacgctggctccatctacgcacgtttcggaaaccgggcccggaggggaccacgcccgctcacccgtgcccggcgtcccccggagctggggctagaggagccgggccggccgcagcgggaagaggccacaggcggccgcgcacgtggggggtggttagcgcggaggaacccggaagccctttgcaccgcccaccgccgcggtgacgggttaacgctcctcctggtggaggcaggggcgggcggggcggaaggcggggacgcctcagccaacacccccgaggaccgcccgcgagccgtcctccccacccccacggacgcgacgcagcgcgggctccgcttccccggccgcggcgcctgcgcaaaagccccgccccttcgcccgagccccacccccacaccgcagcctccaccgccgccacctctcccttcctctctgctctttcctcctgttttctcttccctcctccccctggcctccgcgtctcctcctactccggcgctgacgctcgcgtaggggccctggcgtcagacgcgcgggggcggggcgagtgcggcgcggggtataagtagagggtgcaggaggcggtgcttccccttctccccggcggttagtgctgagagtgcggagtgtgtgctccgggctcggaacacacatttattattaaaaaatccaaaaaaaatctaaaaaaatcttttaaaaaaccccaaaaaaatttacaaaaaatccgcgtctcccccgccggagacttttattttttttcttcctcttttataaaataacccggtgaagca

SEQ ID NO: 40878 - DNA, 2300 bp, Homo sapien
gcagaaccaggaaagtgtagcccagacgccaagagagtgtgtgacaaaagagagggaggaaaacagtgtcaaactctgcagatgtccagtaaaatggacctgaagaaagtccattggatttgtcaaatagaacagggatcattggcaactgttgatggggcaatttgagtgcagctggaagtcatacggtagtgttgaggaactaaggagagagaaagcagaaatgaaaagcttggctatgaaaaaaaagtgaatgagagaggaatatgtcattaagagaagattggtttgttttctttttgatctgaattgaccagtttctgatctgagcgaaagcagctggctggaaataaaaagaggtgattgatggatcaagggaacaggttcttggtttcagttccagatcccactcctgtttcctcctgggctctgactctctctcctattctattaaatagcagctccttgtcctcaggtatggactttgcttctactttcccttgcacatactcaactgtacctccataaaatatgacaatgacatctactaagtgcaagagccacagctgcatagacgtcctgatgactggctcccttcccaaactatgtattcacctacaaagcactaatatacttttctagtgatgagaatgcttccatttaccatccagggcatcactgcctgtcaagctgccctggaagcctaacaactgtttattttttatttatttgagtctcgttctgtcaccaggctggagtgcagtgacgcaatcctggctcactgcaacctccgcctcccgggttcaagcgattctcctgcctcaggctcccgagtagctgggactataggcgcgcgccaccacgcccagctaatttttgtatttttagtagagacggggtttcaccatgttggccaggatggtctcgatctcttgacctcgtgatctgccccccttggcttctcaaagtgctgggattacaggcgtgagccaccgcgcctggctactttttgtatttttagtagagacggggtttcaccatgttggccaggctggtctcgaactcctgacctcaagtgatcagcgtgcgtcagcctcccaaagtgctggaattacaggagtgagccaccgcgcccggtcacattttatcctctttttaataggagcaaaatagtatttatgtgggattccactggtttaaattctaattaaatgagacaagatataaagtacttaattccacacctagcaatacagttgacatccattaaagtttattgaattaaggaataaattgggcaatcatttaacttctttgagactgttcctgtaacagtaaagtaaaattattactacttgctccacctcccacaccagattgctctcaggaacaaatgatagtatgtttacgcgagtgctttaaaaactgtaaaagcactttactactttcgagtggaatttgtatgttgatttaatgtcattcctagagccggtttttattactatcaattcgttaaatttagcattcctattaaaacccactactaatgtgcagaattgttttagttatttataaggacgttgttttagactattcctaattttgtctggttgcagggctgtggtgccatatagtagtgattgtgacaaacccgtactttcaggaaaaacattcacttttctccactcctggtttctatcgccaagaaatgtctggcagaagcagcacaaatcaatgattccagcctagcaccttaaggtaagaagtgaccaaagacccccaacacagctatcccaaattaaagccactttgaccaacgacaacgtccagtgaagacacggaggagggtcgggctggaaaagaagaggacgaggaacccgaggggccctcccctctctctccctgccccccaaccccgcgccgggagctccagcggtgccggggtccagcgcgcaggacggttggggggtcccggagcgggcggccaggacccgcgcagccagttggtgtcagcgagcgccgcggccgttggggactccagctcccagcaggcaccgcttctgcggccgacgcgcgtggcggcggtgccggctgggactcgtagtgcggtccgggtaggagagagcagggggccacgctggctccatctacgcacgtttcggaaaccgggcccggaggggaccacgcccgctcacccgtgcccggcgtcccccggagctggggctagaggagccgggccggccgcagcgggaagaggccacaggcggccgcgcacgtggggggtggttagcgcggaggaa

SEQ ID NO: 40879 - DNA, 2300 bp, Homo sapien
tggtttgtcctggcggggaataaaagggatcattggttccagtcacaggtgtagtaattgtgggtactttaaggtttggagcacttacaaggctgtggtagaatcataccccatggataccacatattaaaccatgtatatctgtggaatactcaatgtgtacacctttgactacagctgcagaagtgttcctttagacaaagttgtgacccattttactctggataagggcagaaacggttcacattccattatttgtaaagttacctgctgttagctttcattatttttgctacactcattttatttgtatttaaatgttttaggcaacctaagaacaaatgtaaaagtaaagatgcaggaaaaatgaattgcttggtattcattacttcatgtatatcaagcacagcagtaaaacaaaaacccatgtatttaacttttttttaggatttttgcttttgtgatttttttttttttgatacttgcctaacatgcatgtgctgtaaaaatagttaacagggaaataacttgagatgatggctagctttgtttaatgtcttatgaaattttcatgaacaatccaagcataattgttaagaacacgtgtattaaattcatgtaagtggaataaaagttttatgaatggacttttcaactactttctctacagcttttcatgtaaattagtcttggttctgaaacttctctaaaggaaattgtacattttttgaaatttattccttattccctcttggcagctaatgggctcttaccaagtttaaacacaaaatttatcataacaaaaatactactaatataactactgtttccatgtcccatgatcccctctcttcctccccaccctgaaaaaaatgagttcctattttttctgggagagggggggattgattagaaaaaaatgtagtgtgttccatttaaaattttggcatatggcattttctaacttaggaagccacaatgttcttggcccatcatgacattgggtagcattaactgtaagttttgtgcttccaaatcactttttggtttttaagaatttcttgatactcttatagcctgccttcaattttgatcctttattctttctatttgtcaggtgcacaagattaccttcctgttttagccttctgtcttgtcaccaaccattcttacttggtggccatgtacttggaaaaaggccgcatgatctttctggctccactcagtgtctaaggcaccctgcttcctttgcttgcatcccacagactatttccctcatcctatttactgcagcaaatctctccttagttgatgagactgtgtttatctccctttaaaaccctacctatcctgaatggtctgtcattgtctgcctttaaaatccttcctctttcttcctcctctattctctaaataatgatggggctaagttatacccaaagctcactttacaaaatatttcctcagtactttgcagaaaacaccaaacaaaaatgccattttaaaaaaggtgtattttttcttttagaatgtaagctcctcaagagcagggacaatgttttctgtatgttctattgtgcctagtacactgtaaatgctcaataaatattgatgatgggaggcagtgagtcttgatgataagggtgagaaactgaaatcccaaacactgttttgttgcttgttttattatgacctcagattaaattgggaaatattggcccttttgaataattgtcccaaatattacattcaaataaaagtgcaatggagaccttggggtctttatttccaggagaaaagataccttctgcatctagggcaacaatccttttccctcgcagctctttcttttacctcacttactgatttctcctgacccccaagccaaggaggtaaaataattatatatatatatatatatatatatatatatatataaagtaattatattttatagctagactgaagaggtgggaatttttttgttgttttttttttttttggagacaagagtcttgctctgtcacccaggcttgagtgcagtggtgcgatctcggctgagtgcaacctccgcctgctgggttcaagcgattctcctgcctcagcctcccaagtagctgggattacaggtgcccgccaccacacctggctaatttttgtgtttttagtagagacagggtttcaccatgttgtccaggctggtcttgaattcccgacctcaggcaatccgcccatctcaacctcccaaagtgctgggattacaggcataagccaccgcgcccagtagagatgtgatatta

SEQ ID NO: 40880 - DNA, 2300 bp, Homo sapien
gggtaaatatcagggagcagctactcttttaacaggaattatattaataaagttttaggctggctttaacagttcttgaacatcaggaacatcttgctttgccagatttcttgttgattaaaagtgcagatttgccatctattaatggaaaatgcgttaagtgattaggcacaagcctgcttatagatgaccttatttatagaacatatgttcacagcttaaaatcttattctgttaggccacattgcatagaaaggtaataatttaaagtcaaaatgtctaaaagacttaataaattagttcttgacacctcctaatcattagcatttctggtggagcacttttctaattggttgaaagcaagtgaggaaattgcaaatcaaagaatggaagccactccggccacaagggggagtaagagattaaatctatgggcccctaatgtgtgacagattatgggcttcttgcatgatttctttttaaaattttaagagatctaggatttatacaaggcccagtgtctctacagaataaaaattataggaaaattatctctgcataagagaattgtacaagaccagaaatttgaactacactatgctgaagagttggaattaaatctattaatgaggatgttattaaaatgacatttgtggggtatttttgtgagtttttaaattgaataatataaactgggagttttacataatttatagatttgtagaaatatgtttaagtatacagaaatttcattgagtcattgaattttagggttaaagggacatctgatctagcctttttattttaacagatcaagacactgcagctcaggggttcagctatttacatgaggtcatacagtaagcattaatatttgtagtctcttaatgtagtatcatcttattgtagattgaaacatgacatttaatctgctatcaagatactgggtttgtagggggggatgaggagttgtcagaataacaaaataagtggctttaattttattgaaaacagtggggtttttttgttgtttgagatggagtttgactcttgttgcccaggctggagtacaatggcatgatcttggctcaccgcaacctctgcctcccgggttcaagtgattctcccgcctcagcttcctggatagctgggattacaggcatgcgccaccacgcccagctaattctgtatttttagtagagatgggatttctccatgttggtcaggctggtctcgaactcctgacctcaggtcatcctcctgcctcggcctcccaaagtgctgggattaccggcatgagtcactgcacccggccgatttttgtttcagactataattagggtgctgtacttactgagaatcacttttgagggctcttatgcctcagttacttgctacctcaaccttttaacttctggtgtgtgtatgctttgtatgaaagcaggcatgtctgtgtcctaatgtctctctcttcatttgttgttttggaagagagccatgacagtacaatctaaaacagaagaatgggttatggaggcttgatctttctcccactcacatatttggtgaggtcatgtcaaagttagcccagctgtattcgcaaatttcaattcataaatgtctcaatagaggttgattgttttgctttgatattctggggggatttgctatttgctaatgacactcgatgtctaattatctttgtgcgaattaaatttaatattaggaccagttggtgaaatactgttttaagacaagatgagaactttctctccaccccacatatttttctttacaaatgtatcattgtttttgtaccatttctgtgttaaatacaaaagtagtatcagccacataaggaaatttgaaaaaaaaaaagcatataaagggtatgaaaaagggtatctttcagaaataaagacaattaaaagggacttctttaaaatgtattaacttttcattttgaaataatttcagatttagaaagaggttggaaaaatatgaagagtttttcatatattttgccagattgtccacatgttaataactacagtataattattaaaatcaggaaaatgattaaagtaaatgataaactattatgtaacctataatcttaattaaatttagcaaattgttttactgtaatttcctgtttctgctccagaattccatccagaattacactttgcattttgcttacatgtctccttactctcctttaatgtggatcagtcttgttttagtctttgcctctaatgattttggaacttttttcaagagtactggctggttatttt

SEQ ID NO: 40881 - DNA, 2300 bp, Homo sapien
ttttgcaggtcatccaagcactaatcttttcttagcccgaacacatttaaagagggaaggggcagagatcattcacactgtgaatgtttctctctgaacttcctgaagtcaactgggcggaggccctaccggttcaggcacctgcaatttccgcctttctccttccccttcttccgggctcccgtcccggctcatcacccggcctgtggcccactcccaccgccagctggaaccctggggactacgacgtccctcaaaccttgcttctaggagataaaaaggtaatgatcgtcatgtgcagtatgaggtcttcacgtgaaagctttatttgggtaggaaaacctagcctacgagaaacgggtccgtgcggtcacgcctgactgcctgtctccgggtcaaggctgccaggaccagctccagccctccgcccgagaaggctgtcctttcccctcggaactctggcttccctaaagcggccgcgcctccttccaggcctcacctcctgccggctccgcccggcccggcccacctcgcccccacctcggcgcccacccattgtcccctcgcgcagtcaccgagcgcagatcccgcgctctcgattggaacgcctccccatcactcagccacactcaggggctggacgcctcactcccgtttccgagccataaaaggtctaggaccgcttcccccgagccagcaggtaaagccgcggcggcgggagggaggccgggaggggccgcgcgccccggtcggcccagccggggaaggggagcggcgggcggggcggggggcagcgcaccacacacaaccctcccttgccgtgcgaccgcgccctgcccccgccccggggcccccgccccgcaagtcctgatcacaatgccggagccgccgagccacccttgtcatcctgcccggggacggccctggggcagttactaccgcgaagcacggagggtggggcgggccgggcctcggggaggggtggggggatgtgaaaggtcccggatgttgctgaacgggagccccttccagagggagtgactggggcaagcgcagacgggctgagcgaaagctaaggtgggggtagggagagaacgccttcccgccggctgagaggaagagtgggccggcagaggctgcaggggagagggagagagagggcgttggggacccaaagggaaggcgaggagtgggggatttgcgttggggaggaaaaggaaaaaagcagcctcctgccctaggtgcactcgggacaagcgtagaggagctggaagccgagcggggtgggaggagtggcggctgcgggcgaggacgcgcgcgcctccgctcgccctccagcgcgggcgggcaggacgagcgccggggagcggcggttacgcggggccccgatcgctgtgggcaccaatcaacggttgccatagcagcgtttgacgtcatcgtgcgtgtggtgcccctgctgccggggctggtgattggaggaaaccccgtgtctgcggagcggctgtagcctgtgagcagcgagatccagggacagagtctcagcctcgccgctgctgccgccgccgccgcccagagactgctgagcccgtccgtccgccgccaccacccactccggacacaggtgaggaacccggccgccgccgcgcctcgcttcctgtcccaggccagccttccgaacgcgtgggagccgtcctcgctccgtcccctcatccccactcgccccgcggtggcggcgccgggctgaggcggagtctcctcagcggacacgggcggcggctcctcttccgctgggctcgggagggcggctagcggccgcctccggctccttgcttccgcatcgacgccccggcgccgatcggtgctcgctcccccgtcctgcccccgggggtgggtagggcgcccacacgcgagatccctggggatctccctgtcgccggctcccgaaggtggacgaggcatggccggggcgccgccggccgcgatccatccccacccttgtctctgcgggcttccaccccctccctcgccgcccttctcgcttccgcccgagataatgactcggcggcggcggcggcgggcatcgcagtggcgcaggtgaggccgccccctcccctctccctcggccgccccctcctttccctccccctcgcgcagcctccgcgctgggcgctgcggcggcgggacccggccctcccccaccccgggaggcggtggcgcggcggggaggggccgggggcctcggggacccaagcgcgagggaaaggcctggccgagagcgggccggagcccaggcctggcgc

SEQ ID NO: 40882 - DNA, 2300 bp, Homo sapien
aagaaacatcaatttccattttaaaaaaacgtttaacttagtatcctctgtcaaatttctggtgcctacgaaaaaactgtaaaaaaaatagcttttgaaatattactcattttaagtgagtcacgccctaaaagaatttacttgggagtcaaagctagttgaccctaacatctcagaaataaaactccaatttgtttatccatttaacctaccatgagtctgtgatttggcaacttgtgaaaagcaacaacaaaaaaacccactaaaatataactggtcactggaaaccctctttctggtctgtactatctaaatgccagctgtcatgtcaggcaaaaagtaatttgtagagcagccttgtggtccactgtattatgtaggaaagacaatgtactggaagagcgaggactcaatcatttcgtgtctactactgagaaactaaattctgtagagaacatgaggctaaacggaggctctggtcagctcaataaagatacgttggaagaatcaatggggagtttacacaagagtaaaatgaagagttccaagctctctcattgctaaccgtacactctccatggctgttgcaagtggttttgcaggtcatccaagcactaatcttttcttagcccgaacacatttaaagagggaaggggcagagatcattcacactgtgaatgtttctctctgaacttcctgaagtcaactgggcggaggccctaccggttcaggcacctgcaatttccgcctttctccttccccttcttccgggctcccgtcccggctcatcacccggcctgtggcccactcccaccgccagctggaaccctggggactacgacgtccctcaaaccttgcttctaggagataaaaaggtaatgatcgtcatgtgcagtatgaggtcttcacgtgaaagctttatttgggtaggaaaacctagcctacgagaaacgggtccgtgcggtcacgcctgactgcctgtctccgggtcaaggctgccaggaccagctccagccctccgcccgagaaggctgtcctttcccctcggaactctggcttccctaaagcggccgcgcctccttccaggcctcacctcctgccggctccgcccggcccggcccacctcgcccccacctcggcgcccacccattgtcccctcgcgcagtcaccgagcgcagatcccgcgctctcgattggaacgcctccccatcactcagccacactcaggggctggacgcctcactcccgtttccgagccataaaaggtctaggaccgcttcccccgagccagcaggtaaagccgcggcggcgggagggaggccgggaggggccgcgcgccccggtcggcccagccggggaaggggagcggcgggcggggcggggggcagcgcaccacacacaaccctcccttgccgtgcgaccgcgccctgcccccgccccggggcccccgccccgcaagtcctgatcacaatgccggagccgccgagccacccttgtcatcctgcccggggacggccctggggcagttactaccgcgaagcacggagggtggggcgggccgggcctcggggaggggtggggggatgtgaaaggtcccggatgttgctgaacgggagccccttccagagggagtgactggggcaagcgcagacgggctgagcgaaagctaaggtgggggtagggagagaacgccttcccgccggctgagaggaagagtgggccggcagaggctgcaggggagagggagagagagggcgttggggacccaaagggaaggcgaggagtgggggatttgcgttggggaggaaaaggaaaaaagcagcctcctgccctaggtgcactcgggacaagcgtagaggagctggaagccgagcggggtgggaggagtggcggctgcgggcgaggacgcgcgcgcctccgctcgccctccagcgcgggcgggcaggacgagcgccggggagcggcggttacgcggggccccgatcgctgtgggcaccaatcaacggttgccatagcagcgtttgacgtcatcgtgcgtgtggtgcccctgctgccggggctggtgattggaggaaaccccgtgtctgcggagcggctgtagcctgtgagcagcgagatccagggacagagtctcagcctcgccgctgctgccgccgccgccgcccagagactgctgagcccgtccgtccgccgccaccacccactccggacacaggtgaggaacccggccgccgccgcgcctcgcttcctgtcccaggccagccttccgaacgcgtgggagccgtcctcgctccgtcccc

SEQ ID NO: 40883 - DNA, 2300 bp, Homo sapien
ctgctgcaaaaccttctgcaatatgttggatttctccaaataaaacacagtgaagtgaaattatagcctgacagaattgtgattacacttaaaatatcatataactgccacatcatcaacagagtccatccttggagatgttttcccaattggagggatggacttgtgctaattcacttaaactctttcccattttagtgtttcatttttgagacagggtctcgctttgttgcccaggctgtagtgtagtgacacaatcacagctaactgcagcctctaccttccgggctcaaatgatcctcccacctcagcctccccagtagctgggaccgcaggcacatgccaccatgtccagctactttttgtattttttgtagagaaggggtcttgccatgttgcccaggctggtcttgaacccgtggactcaagctatctgcctgcctcccaaagtgctgagataatgagagtgaaccactgtgcctgggctttttctcattttaatgtatagcattatatattgatgtatagctttgaagagatcattgcagtcccctatagaggaatgaatcaatattcaccctcatcactcatgtctcagcactaagaaacacaaataggcatttctatttctaaaagatactttaaaaatatggtttctttctgctactgaagtttcctaaaaatcaaaaagaaaatagtttcattttatctttacaatcttttgaacactagagatatcaatcagatatatccatttacaaatgaataatagctaggttactctaagaaatatatgtatgtgtatattcgtttaatcctcagcatcacctgatgagttaagtgtttttgttgccagtattttattgccgtggctatcaaagcacatagaggttaaccaacttgagtgaggtaagagttgcgcattgaagaaaatacaggtcagggtattagtgaaagtctccagcaaagttcccagggttcataggttctatttattctgctctgtatgccacaggttattccttatttcttaaaagatcttttcctcagggctttcataacatcccgttcctttcttgcagcttcattatatctttattgtgcagacacattgacttgagtatgtaaaacctaacagtgcctattgttgcactaaaaaatgccttgctattaaagcatgaggcaaaagcctaacttagctgtttcctgaagtaaatccatatttatacagaaaaaccccttaacttcctctaaaacaaaaggcatatactctacatagacatatatttgagacattaaagaaacatcaatttccattttaaaaaaacgtttaacttagtatcctctgtcaaatttctggtgcctacgaaaaaactgtaaaaaaaatagcttttgaaatattactcattttaagtgagtcacgccctaaaagaatttacttgggagtcaaagctagttgaccctaacatctcagaaataaaactccaatttgtttatccatttaacctaccatgagtctgtgatttggcaacttgtgaaaagcaacaacaaaaaaacccactaaaatataactggtcactggaaaccctctttctggtctgtactatctaaatgccagctgtcatgtcaggcaaaaagtaatttgtagagcagccttgtggtccactgtattatgtaggaaagacaatgtactggaagagcgaggactcaatcatttcgtgtctactactgagaaactaaattctgtagagaacatgaggctaaacggaggctctggtcagctcaataaagatacgttggaagaatcaatggggagtttacacaagagtaaaatgaagagttccaagctctctcattgctaaccgtacactctccatggctgttgcaagtggttttgcaggtcatccaagcactaatcttttcttagcccgaacacatttaaagagggaaggggcagagatcattcacactgtgaatgtttctctctgaacttcctgaagtcaactgggcggaggccctaccggttcaggcacctgcaatttccgcctttctccttccccttcttccgggctcccgtcccggctcatcacccggcctgtggcccactcccaccgccagctggaaccctggggactacgacgtccctcaaaccttgcttctaggagataaaaaggtaatgatcgtcatgtgcagtatgaggtcttcacgtgaaagctttatttgggtaggaaaacctagcctacgagaaacgggtccgtgcggtcacgcctgactgcctgtctccgggtcaaggctgccag

SEQ ID NO: 40884 - DNA, 2300 bp, Homo sapien
gaaatatatggccaggccagtttacctggagtaagatacaagtagaataacaggagttgtaattacaaagcttggtgggaaggctatgttagatctaaccttcagtgcaaatgcctaatagagctaacacacagtaagtgccttaaaaagttaataatctttcctcctcttcatttctcaaataaagttcgaactctggagtgtagtggtgagatcacagctccctgcagcctcaacctcccaggctcaagcgatcctcccacctcagcttcccgagtagatgggactacaggtatgccacgcccagctaattaaaaaaaacgtttttttgtagagatggggtcttactctgttgcacaggtgggtctcgaattcctgggttcaagcaatcctcccacattggccacccccttccccaaatcttggtattacaggcatgagacaccacacctggccaaaggtaggtattttatttatttatttatttttgagacggagtctcattctatcgctcaggctggagtgcagtggtgcaatctcagcttacttgcaaactccgcctcccgggttcacaccattctcctgcctcagccttccgagtagctgggactacaggcgcctgccaccacgcccagctaattttttgtatttttagtagagatggggtttcatcatgttagccaggatggtctccatctcctgacattgtgatccgcccgccttggcctcccaaagtcctgggattacaggtgtgagccaccgcgtctcaccaaaggtaggtatttttaaaaatagatgatgaagccagccacagtggcgttcatatgtagtcctagctactcaggaggttgaggcaagaggattgcttagactaggagtttaaatccagcctaggcaacatagtgagaccctatctctaaaaaattttttttaaattagacaatgagacaggattgaggagatttagaaactggaccaattagttgcgtacaactaattattgagccttatggcagtcaaatgaggtgaatagtgacactaagacgtggctgggagaatagagaatggcagtgccatctgtagaaatatgcaagaattcagagttggctcgctgagtctgaatacacacatggggcaattcctggaagcaaaggtggaatttgggagagaagctggggctcgcagtgtggtttgcaggtcactacccaggtctggtaagcacaagcatctcttgcatttattttgatttattgggctttaggggcctggttgacactctttgcttctatctgcagcgatctcagggatcacagatcagctccagctcactaaaagtactaagaattccgtggactgtgcagaatgtccatagagattcaggccaatctctagaagctggggccttctcgggagtctcaaacctccccaggctcttgaactttcagttatgatttcagttctcagtgtgcagggactctgaagttcactttggtttctttctggctctcagaaccgggaaaacctggcctttggtcaagggaatgaggcaaatttcctgaatgcatctcagttgaggcctgaccatctgataagagctggtgggatggtgtgcaacctgcccttcgtctccctgtagctggcctgtggcagacagtcaaccccagcagagcttaaggaatagatgtgagggttagaatagttcattttagaaatagctactctgtccactctcattgctgacagatgtactgacctgaggattctcctaccacatcttgcctctccgtttttttgttttgttctgtttttgtttttttgtttttttttaaaccaaacccttgcacgctctgaggaacatcttttaattctagactgcattaaaaaatttctgagtacagattgttccaattaaattcttaaatgtcaaaagtttcttaaaataaaactccttaaaataaaccaaatcagctgttctggatcacagccaacataaatcaaagtatctaaccagatggggattctgtaaactaaaggtaagagcagttgttcacagcatagggcccaatgagaaaagctaaaggcatcagaggccattttgcctttcaaattgtttttcaaaacacagggtaacatcctaataaacaaatgaatcatgcttcctgcaacaccttttcacaaacagaaaccccaaaatatgcctgcaatgttctgacaaaaaaagaggccattgtccaattagcaaaacacctgaatttattcagagtgagggaggaatccagcaactgcttggatgttacctg

SEQ ID NO: 40885 - DNA, 2300 bp, Homo sapien
ttttagtagagatggggtttcaccatgttagcaagtatggtctcgatctcttgacctcatgatccgcccacctcagcctcccaaagtgctgggattacaggtgtcagccgccacgcccggccccaagaataaatatttcaaggcaaaagttacaataaagttatgtgcaaaagctatgaaaatgtgaagatgggagcactagagacattccagggagggcaacatttgagatggccctttaggaatgagtagcaatttactagctagacaaggagataaaggcaattccaggtaggggaatggctatgcaaagacacaaacatatgcggtggtaggacgtgatttgagaatgggtgtggttgcctaggatattccaggtagtcaagagatgacaatggaagggagggaagccagggtttgaacagcagcaacagttacagaggtgagcatttctggtactttctagacacctgatacggaaactatgttacttatatatgttatctcatttaatccccgttattattatttttataggtaaataatgtaatttaagtttttcattttgcatgtcaaatgtgaaaatctgtaagagtaagtaactttgattgtacaacacgtaaagatccttgaaattagttgtaattaaaaatattttgctcttttaaaaatgggaattaaactttgattttttgttctaattaaaaatgaccattttcttttttaagaataaagatattagacactagtgaactcatataattgctttgcagtttccatggttgaatattttgaaagtgaaataagttttccagttttaaagtacggtgtgaaatagaagtattttataagaaattagattatttagaatatatagaataaattatattgtgtctaatattaatcgtcattcctgttgataatctcagtttataggttaagtgacttggccaaggtcatggaattgcaagtgataaaacttatattaaaaatatggggcaatgattgtttgcttggctgattctctccctcatccttgctttaagatcaaggatattgtagttttgctcatttgatacctgtctgtgactaacatgctaaagagtttagacttgatcctcaagttaataaaaccaatgaaagctggacaataatatggatatgagtagatcattgtggccaaaggattggagaaggggagcttgattggaagggcatgttaagagtctaggggagatgatatcaacttcaacaagtcagggatagtgaggatagggaggattgaatgtaactgattaatatcttagaggcgcaatagacaaaacttggagactgtgcacatgttgcagggttaagggtgaggccaaggcaggggcttgggcagctgaacagattgtgacaccagtggtgaaaatagagaaaacaggtgaaggagccagctgggtgttaacgaatgattttggttttagataccttaagatatgatcccttcagaacaatagcttggagatcaccgtcatcaaaatatccacttgcccaaatctgtagtccccaggcccctggagcaaggcctgctgccctgggtgtcttggcagttgttcaagcacgactggaatctggcttagcattaggccaagtgagcacagagacttgcactgctgcatatttaaaattacttgtcaggaaaaggagctacagagaagaggggctgtgacaggggaaggcaaacatccgcaccgttcaataattcagcgcagagccggtcttggctgctaagttaccaccacaaggagcatttttaaagtcaaaccgaatttccatgagaagtcatgcctgagcaagctggatcgttgccaaaagacaagagaagactccagacctttctgtaaacaggccctgagagatacggggtactgcatgataaagctgtcagtctggtcgcagcagcctggcatgtgactcatttgcatatgtcacttcctttagcgtaatccagtccatgggcctctaacttccaatcctgtgggcaaataaagctgtccagcacaacctgtgacgatcagattcaggctgtatttagtgggggagggatctggcctcatatccttcatctttatgctgctccactccagctcacagcccctccaactggatggagctcttcgaagggaggggcatttcagaggagggtctcagggatagcccctttgtggggctgggccaccaggttggggagagtggagctgctggaactctggagggactggctgagccagctttcccagtgcacccctctggga

SEQ ID NO: 40886 - DNA, 2300 bp, Homo sapien
agtgtggatctttcttatataatctctaggtcttatattttagtttcctacctgaaaatttgtgatgccacttttaatctacgacggtaaaggaaaacaatttctcttatatgctatttaagagttaggtatttaagattaaaggaactatgtataaatatcacttatccagaagtcttctgaatatttcatttctcatggaaatgctggatgtttttaagcaacattatccattataaaacaattcaaaaagggggaagaaaatcctacaaagataacaaaaactgtgaggttttttttgtatgaagtagccaattttcacaaaaagtgctgttagcggtttataacactgctaggaaatgtattttatattaaaaatcgctaacagcacagtcattgttttcaagatgctttagaatgggaagaaatgttcaatctttttaacgtgtatcggcatgtatagggtgtactcttttaaagaaaaatttcaactattataaaatctaagaaactttaaaactgtgtcatttataatgtaaaattaatgcagctgagattcagtggttgactcatagctcccacattcatcttcagttctctttagctcatatggttttctttaaaaattagtgatatcagctaaatggaactattttccactcctacccacagagaaaagtgcttttgtgaacatgtcagctctgttccatcattacatgccatcatgcagtgcaacagaagcaggctggctgtgcatacttgataaccaatattagtacagatttgagagcaaaatccaaagaagataatactgtatttccatctatttattttatgcacataagccacctttttagaaccaaggaattttatagctagacaagatcttggaagtcttccaatctagcctctttattttgtacatatggaaactgaggcacaaagaggttcagcaacttccccaaggtcacatagctggtagaggtaggctgggactagaacccaggtctgtgtgactccaaagtctgtgctcctcccactatactgcttcacagataggagctgatctgcctcaaatcttctgccccttggcctttccacaactctgcattgctgccatctaacagtgccttccactggtgccatgctaaagctcgttaggaggcaacttaacattgttctgtaaaagctctacagatgtaggatgctagctatctgttctccccggaaatcttttcaattcaattctgcaaataacttaggctttcccagactaagcagttccttctctcattcctgcaatttgctttccagttaccttcttctggacacattcatttccagtgccccttctgttaaaatgggccccactagaatctctgttgctgggcacggtggctcacgcctgtaatcccggcactttgggaggctgaggcgggtggatcacctgaggtggggagttcaagaccagcctgaccaacatgaagaaaccccatctctactaaaaatacaaaattaggcagacatggtggcacgtgcttgtaatcccacctacttgggaggctaaggcaggagaatcgcttgagcccgggaagctgaggttgtggtgagccaagatcgcttcattgcactctagcctggacaacaagagcgaaactccgtctcaaaaagaaaaaaaaaattggccccactcaaaatggtactcctccaagttgctttttcatccttgtattccccatggtcattcatcccactgctgtccttctgtctccaagtcctctttgccttgcttccttccctctcaacccacagcatcagagcagtttctcccccagctgaccctctttccactttcagtgctcaatattttttactttgcctgtggaaatgatctcttaactggtttccttaagtccctccagaaatgtttttctaaactccaacaactgtgcaaggtctaattgccattggtttatcacccactggacccagaagcaccatcctggattctgcttctgcatacccctgtcagctctgtgtctttagggacatcatttaaaccttcagcttcactttctccacttatagaatgaagatgaggaacaagaacatcaatctttgaaatgatgccaagtataagcctctgtgtgtgtgtctccccactccaatttgtccaacagactgcttccaaagaaatcttcctaaaacactgaccatcttttttttttttttttttggctgcaaaatctttcatttcctcatcccctcacataacttccaatcttcttggcctggcacta

SEQ ID NO: 40887 - DNA, 2300 bp, Homo sapien
aaatacattgctgcatcggggtgtccagtctggagaggtataagtgttcaaaatacttgaggtttcttatattttgaattaatagctatgggaaatgcctctcttagcttgtaaatgctctggaacttttcttcatagtatctcattcttgagtagtcatgttgggggtagtttttacttataaaagtaatacatgcctgcactccagcctgggcgacagagcgagactccgtctcaaaaaaaaaaaaaaaaaaaaaagtaatacgtgcttcatggttaacaattcaaactatgcagacaactatcaaataagtaaaagtcccttatgtttccattcataccgtaaacctggttttccgtttgttttgattttgattggtttgttatctggtgggttgattagtttgagttttggttttcaaattcaaactgccttcattttttttttcaatgattgcttgcatcatccaaaaggaaaaattcctatgaccagtgaccatcctactgacagagattgcttcgcaactaaactaagcttctgtgatttgaaacagcttaaaagctctaactagaaagcttaccaactcaatataaaaccaggttttaattgacttgggttatgaaaggctctaataatagagcctgccactttaagaaaatgccatagcccactggcatatgcagaagctccttgtgcaagggaggcgtgcctacagctgatgtcatagcccagccttctaatgccatttgcataaagagtattcgattgcatgattatataaagtgaggtttactggtattttcttgtttagttcttgaaagtctaattataggcctaagggaataaatctaccacttgaagaggattgttgtggctactgtcagattccagggagaagacagattaaaagcaaaaatttgaatttcaaagaaaatactttaatgcaccaacacaatgaagtgaagtttatgtcaaaatatagaggtttgcctttcttgtattctaaactggttcttcattaaaataactttatctaaagaaaaatgaatgccagccacagtggttcatgcctgtaatcccagcactttaggaggccaggcgggtggatcacctgaggtcaggagtttgagatcagcctgatcaacatggtgaaaccccgtctctactaaatatacaaaaaatttagccaggcatggtggcacatgtctgtaatcccagctactcaggaagctgaggcaggagaattacttgaacctgggaggcgaaggttgcagtgagccaagattgcaccattgcactctagcctgggcaacaagagcgaagatccgtctcaaaaaataaagaaaaatgaaggctcactgtcaaacattttcacttaaagcattgaaattagtgcctagttaacctgtatccagagctgatttttagctacagaaagcactatgattgtgccagtgaccatgtggaaatacttctacccagatgggaataagatcacaggcctgaccccagtgggtactccctcagccaccctgtcccctatttcaccccttcgaaatccagcaactgaaggggtgacacttggcagagcaggacgctagctggattgtgcaccagcacagggtgcaggatctactctgattggcctgcgccctgctgatagtgaaataccgtgttttgaatgttcatctctatgcatgttaacttagctaaaggcacctcagtggataatccaaaaacccacatttggcttttttgttgttgtttctttttttttttttttttttgagacagagccttactctgtcgcccattctggagtgcagtggcgcagtcttgactcactgcaacctccacctcctgggttcaagcaactctgccacctcagcttcccaagtagctggaattacaggcgtccgccaccacacccgactattttttttgtatttttagtagatatggggtttcactatgctggctaggctggtctcaaactcctgacttcgggtgatccgcccaccttggcctcccaaagtgctgggattgcaagcatgggccatcgtggctggcctttttttttttttttttttttaatcacaggtatgtgacatatgaattaagtggtcaaatgtaaaactaatggggacaccaagcctcaggaagaacatcccatgtttctgtttaattctcttatgtgttatactaccttccctttctctttcttatacacatagattttccttaattgcagcccaagaggacactgccccattttgttttgttcttttgtcattgggac

SEQ ID NO: 40888 - DNA, 2300 bp, Homo sapien
accgggatcacgtggctcccagggctgggtgaagaagccgcccggaccgagcgcgccggagaggaggggcgcctggggacagaaggcgacgtcccctgaagtttgtgtcagccagggcccgccccctcgcgcttatgtaataggggcgcgctgccattggcccgcgcgaccagccagggcgcaggcgtgcgagcggggtgggggccagaaggaggcagccgcagaaaggcacatgggcggggctgcgaggagcaggcggggcgggggcgccgaggagagcggcgcggcgtgcgcgggcacgaggcgtagtggtctcccctaaggctgaggcggcggcgggcgcgcggcggcggcgggcgtgcgaggctgttgtgctcccggctctcgtgtttcccctcctgagcgggtggaggaggcccaagcggtgctgggcgcgctcccccttcctttccctccggcgtcctctcccggccctctcgcgctgcactgtctctccgacgcaagactgtcccggcccgggtgagcggcagcgggggcggtgctgacgccgcgggacgcccgggaaacggggcgggggccggccagcggggggcggtggggaccgtgggactcgccgcgggtcgcgaggggtcgcggggggcggcagggcccggcccggggcgggccgcgggaaggggatgagttcgggcgcctgccaggccctgcaggtggccgggtcgcaggccagccgcggaagcggagcggtaaccttacccccggcgacagccgccggtcagctgccagagtgtggcgctcccggtggacgcaggggccgggtttcgggcagtctcggcctccaggaggcgcgtcttggtccagggtccgtgaggactggctagatgggggctgcgtggcctttggtggcagggaggaggagggggtctccgaggcgggagaggcgggtttgggaaggaaggtgcgccaggctgaagctggggtcggagaagtgttgggtggagacctcactgtgggtgcgttcctcctctcctctccccaaaacgatggtgttaaaagctagggtcaggatgtggagcgctgcctgggcctcttcctttccgatggttatggagaatgagcctacttcctggacccaaaatccttttcttctgttactcatttatgttggttttaaaaggagctttggggcagagcttacttgttgcctcctacgagagcgcctcattttagaactcgtttcttccactacttccctctttgcagccccctcggaaaaccacactgagagttgcattaaaaaccagcatgtaggtatttgtaagtgactttttccctccagtttgtcgcatttaatcaaggagcggttgtagctgcctacgattttgtagaaaattgtgttggcttgagagcaagtcctaagttgagctgtccaaaagcaggtggttggttcgtttgaatttctgctttcagaaaggaaatcgatggggcgtgttgtcagaagttaggggcctacctcatgcatttagcttattttattccatttcctttacctggtgttaagttttctgtcttcagaataagaacaagtgactactgtctttattaagtctcttcggtctttttggttgctgtttggtgacaatggaaaatgggttgaatctattgtgtaatgttatattttagggaaagtcctaagtgcaaaagttaaaaataattttgtgtgtctaatgacattgctttgtacgagtcacaacatggaaatatcaaaatagctagtaacttctagaaagcaaaggaacttctgaaattagtggcttaccatttttgaagattttttttaacataaaacaagatttcccacaaaatcagtgtattaagatacataaaatacattgtgtcgaagagttaagatgtgtgagaagactggctattttgttacaaggtcctgatagtaagacattgagacaaaaaaccttgcaaaacattggtatacataaaggctgatcacgtgactactgtcgtccaaataatacataagtatccaaacctgtttccatgggaataggtttgtaagcttgcggtaacatcggacttaaatacacttttaaaaaaaatgtgccatttggcttagaattaataattttttttaaagcaaaaatggaagcttagtcttcaaggactgataacagctggtaatatttaccattgtttggtgggaatggggttctcatattaggctagcacgctaaacattttcaattacgaaaatgtattaggctcgtgtgctaccctaatataaaaac

SEQ ID NO: 40889 - DNA, 2300 bp, Homo sapien
agacatactcggttcatttgatcaatatccatttattcaacgtctactatgtttaacatactgcgtattccctgatgaaaataatcttacaatctaggactagagagtaatttaaaactgcaagaaggaagtcagagcataaaaagtgaaggtgagagaagctgaaatgaggatgaagagggagaactgaacacccggatcactgcatgccatgtttcatttcgtatttttctccactcaaatgcaataggcagctaactccttcctggctagtttaaacaattctgtggtatctatagcccagtccaagtcatttgggatatactaatattcagccaacatttcctgggcactgccacgcaaacttgggaaacggcactacaggcaaggtgagaacagccaatgcaaacactttttttttttctcctttgtcactagtagttctaattagaaacgaatgtggcgggggtcgggggtaagtatgcacaataaagctgatgtctaaagtactgtttccagatattcagcaattttaatcatggttataatcgccattgctcttgtcagatattgaaagtttgctgccactgcctgtaaatggagagagagcgcgcgcaaagaactttaaccattccccgaaggattagcaactcagtaccgtatattgttagcagtcaaactaaacccctccgggaagcctggccagcaatttttttttctttttttgtttttttttttttttaggcagggtctcactcagtcgcccaggatggagtgcaatggcgcgatctcggcttaccgcaaccttcacctcccggcctcaagcgattctcccacctcagcctcccgagtagctgggactacaggcgcgggccaccatgctccactatttattttattttattttatttttgtggagacgtgggtctcgctatgtactcaggctggtctggaactcctgggctcaagtgatcctcctgccttgggctcccaaagcgctgagattacaggcgtgagccaccgcgcccggcctagccagcaatttttaatacgacttaggcttgaatcttgaactcactaaaagcccccagcttgggaaaacacctggggtttccatgggagtgaggtaaagggcggctgtgaaagaacaaaggctgtgcgtccgcgttcagagccgctgggtccgccgggctcgctgggggccggggccgcggtgtcctgggtggcggggctccgggaatgtgactcagccaccgcggccccgcgatccgctcccgggccagcgcctcagtcggtgccgaggagggcggcgccgagacgggcgcgtcagcctgggaggagcgggaaaagggtcgcagcgcctgaggcccggccgccgcccgagtggatgagcgagcgagcgacttgtgaaacacgccgcggcccggtcaccaaccaggaccgggatcacgtggctcccagggctgggtgaagaagccgcccggaccgagcgcgccggagaggaggggcgcctggggacagaaggcgacgtcccctgaagtttgtgtcagccagggcccgccccctcgcgcttatgtaataggggcgcgctgccattggcccgcgcgaccagccagggcgcaggcgtgcgagcggggtgggggccagaaggaggcagccgcagaaaggcacatgggcggggctgcgaggagcaggcggggcgggggcgccgaggagagcggcgcggcgtgcgcgggcacgaggcgtagtggtctcccctaaggctgaggcggcggcgggcgcgcggcggcggcgggcgtgcgaggctgttgtgctcccggctctcgtgtttcccctcctgagcgggtggaggaggcccaagcggtgctgggcgcgctcccccttcctttccctccggcgtcctctcccggccctctcgcgctgcactgtctctccgacgcaagactgtcccggcccgggtgagcggcagcgggggcggtgctgacgccgcgggacgcccgggaaacggggcgggggccggccagcggggggcggtggggaccgtgggactcgccgcgggtcgcgaggggtcgcggggggcggcagggcccggcccggggcgggccgcgggaaggggatgagttcgggcgcctgccaggccctgcaggtggccgggtcgcaggccagccgcggaagcggagcggtaaccttacccccggcgacagccgccggtcagctgccagagtgtggcgctcccggtggacgcaggggccgggtttcgggcagtctcggcctccaggaggcgcgtcttggtccagggt

SEQ ID NO: 40890 - DNA, 2300 bp, Homo sapien
tatgactcaaaaacttaagaaacactagcttgaatacatatttcatctaggccatggtaaagagtgacatattaacctacttcacaataggagtcacctctttagttaagaagacatatctctgccacacaaatttcactgtccctttccactgtctactgtcattcacggctagataaacacagatctttgaagttcccatttctagggccaacaagtacccatccctctatcagccagattaacacaaccattaaggttacagtgactattagtgactaagctagagcttcatgctatgtcaatttaaaagctgctttcttcagacatactcggttcatttgatcaatatccatttattcaacgtctactatgtttaacatactgcgtattccctgatgaaaataatcttacaatctaggactagagagtaatttaaaactgcaagaaggaagtcagagcataaaaagtgaaggtgagagaagctgaaatgaggatgaagagggagaactgaacacccggatcactgcatgccatgtttcatttcgtatttttctccactcaaatgcaataggcagctaactccttcctggctagtttaaacaattctgtggtatctatagcccagtccaagtcatttgggatatactaatattcagccaacatttcctgggcactgccacgcaaacttgggaaacggcactacaggcaaggtgagaacagccaatgcaaacactttttttttttctcctttgtcactagtagttctaattagaaacgaatgtggcgggggtcgggggtaagtatgcacaataaagctgatgtctaaagtactgtttccagatattcagcaattttaatcatggttataatcgccattgctcttgtcagatattgaaagtttgctgccactgcctgtaaatggagagagagcgcgcgcaaagaactttaaccattccccgaaggattagcaactcagtaccgtatattgttagcagtcaaactaaacccctccgggaagcctggccagcaatttttttttctttttttgtttttttttttttttaggcagggtctcactcagtcgcccaggatggagtgcaatggcgcgatctcggcttaccgcaaccttcacctcccggcctcaagcgattctcccacctcagcctcccgagtagctgggactacaggcgcgggccaccatgctccactatttattttattttattttatttttgtggagacgtgggtctcgctatgtactcaggctggtctggaactcctgggctcaagtgatcctcctgccttgggctcccaaagcgctgagattacaggcgtgagccaccgcgcccggcctagccagcaatttttaatacgacttaggcttgaatcttgaactcactaaaagcccccagcttgggaaaacacctggggtttccatgggagtgaggtaaagggcggctgtgaaagaacaaaggctgtgcgtccgcgttcagagccgctgggtccgccgggctcgctgggggccggggccgcggtgtcctgggtggcggggctccgggaatgtgactcagccaccgcggccccgcgatccgctcccgggccagcgcctcagtcggtgccgaggagggcggcgccgagacgggcgcgtcagcctgggaggagcgggaaaagggtcgcagcgcctgaggcccggccgccgcccgagtggatgagcgagcgagcgacttgtgaaacacgccgcggcccggtcaccaaccaggaccgggatcacgtggctcccagggctgggtgaagaagccgcccggaccgagcgcgccggagaggaggggcgcctggggacagaaggcgacgtcccctgaagtttgtgtcagccagggcccgccccctcgcgcttatgtaataggggcgcgctgccattggcccgcgcgaccagccagggcgcaggcgtgcgagcggggtgggggccagaaggaggcagccgcagaaaggcacatgggcggggctgcgaggagcaggcggggcgggggcgccgaggagagcggcgcggcgtgcgcgggcacgaggcgtagtggtctcccctaaggctgaggcggcggcgggcgcgcggcggcggcgggcgtgcgaggctgttgtgctcccggctctcgtgtttcccctcctgagcgggtggaggaggcccaagcggtgctgggcgcgctcccccttcctttccctccggcgtcctctcccggccctctcgcgctgcactgtctctccgacgcaagactgtcccggcccgggtgagcggcagcgggggc

SEQ ID NO: 40891 - DNA, 2300 bp, Homo sapien
cttgatgagagtgcataattgagaggcgccgtaggtggtacaacactgtctggcttcgctactttgaaactctgcaccaggttgatcttgtccatggctctggcttgattctaaagtctctggttctggtcttttctggaatccatgcctagctcttcaattctgaaaccaaatttggattcttgactcttctgtattgatttataaagcaaggttttgtttggtagaataacctgagcaaggttttggatcgaatgtagtggtgaggattttcaattgttctgtgagtttggtgcgactgcacctataatttgttgctaccatcttgtgtgaagaggtgtctttggtcatgctggaagagagtcctggaagctgaagtaatgtgttggagacccatgatctcaaattcttagttttgccagttttgtactttatgtaggtgcagtattgactgtttcctgtctagcttttcgttcaaactcatgcttgtgaaattcatctaattttgcatgtaattatagataattcattttcttttttgtatggtattctgtgcaaatatattacaatttatttatccatgctactgtacatggtcgtttgggtaatttcagttttgagctattataattagtactatgcacatctagtacatcacttttggtaaacattgtaaacatttctgttgggtatgtgcataggagcaaaatagggtatgcaaatgtttagctttgctagatactactcaacagttttctgaagtagttgtaccaatttaccaccagccatacatgagtcccagtggaattggaatagaaatgtagaattttaatttttataagatttgtgctgaatggtaactgtggagataccctgagcccaaagatgatgaggcagaggagtttttccaaaaagttcgaatcaccattactttttcacattcattttcaggtcaaaacatccctgcatgtcaggtgtgctggtgcatgcctgtagtcccagctactcaggaggctgaggcaggagaattgcttgagcccaggagtttgaggctgcagtgaactatgatcacaccaccggactccagcctgggtgacaaggtgagaccctgtctctaaaaaaacagtgaaataaataataataatgataatcataataaatccctgtaaaatagacagaggtatgccttatgccgttttctcttgaagctgaggaaataagacaaaagagatcaaaatgttttttctaagagccctactaatcctgtatttcccactctagctccagagctttgattttaggtgcatgtgcctacctgtgaatttgttacagaaaaggcatgctcaggctgaggctggcatttctataacattgctagtttcaaacaacaagtttgaatgccatgaaccctcatagcatgtgagggtttattcagctgacaattagccaggtagaaggggcatattcaaaaactcacttgcctgaacttggagcttttctgacagttttttctttgtttgttttcgagacagagtctcactctgtcacccagggtggagtgcagtggcatgatctcagctcactgcaacctccacctcacaggttcaagtgattctcctgcttcagcctcccgagtagctgggattacaggcatgcgccaccacgcctggctaatttttttgtatttttaagtagagacaaggtttcaccatgttggccaggctggtctcgaactcctgacatcaggtgatctgcccacctcggcctcccaaggtgctcagattacaggtgctgacagttttaaatggaaaaaggagcctgtccaggtttcctagcctggtttctcatcagactcagctgggcggctttttaagctacaggtttccccatccccactcaaggacaattgaattgaggtcctcggaattgggacttgggaatctgtattttataaagttctcaagcggttctgatttaactggaggccaacagcaaacctttgattggaatcactgttgctctcagttttttaaagaggataaccatccaatacacttaaccgaaatcctgagaacaagaagagaaaataaatttaaaatcagactttccccccttctttacagcattctatcaaaatacagtgttttgggcgtccggcttccttctgcaacagacgtgggtcacgctctctctggctctctttctgccgccatcttgattccacgttccctccacaaaatgcctggcgaagccacagaaaccgtccctgctatagagcagcagttgctgcagccccaggc

SEQ ID NO: 40892 - DNA, 2300 bp, Homo sapien
ccactgaaacagtagaacaatgaatttctggaggaattgttttcagggcaaaattggaattgattgtttgatcatttggaaaataaacatgatagtcatttgatagatcagttgtagaaaaatatcaggatggggcataacaaactaagtaaatagatacaaggttttataaggaagaaaacaagaatagtacactattggctgtgttgtcattgctattggcatagtcacttacttagctcctaaactgtgaaagtgctgtgttggaaggagaagttgcttggcatgaaagagctaaatcctaatctgaagcaacaggtagtcagagcacaacatctattggcaaatcaagagatggcagtacaaattatttagaaatagggaggtaaatgacagaagagacagataaaagcagaatatggctgcctctaaaaaggagaggaacatgataggtattgcattatcttaaaatattatattaaaatagtacctgcattgtcttaaaatatattatttctttaaagtgtgtgtttatattgttttttaaaaatacaattttgaaatttattgttgaaaatggacacatggaacaaaccaaaccttgttttatcatgtaattttcagaaaatatgtgatccataaagattaaaagaaagttgtattaagtctggcagctttagtattaacttgaaataaaatatggcaagctttccacgtcctcctttatttccacaatccatatgtacgagctagattccagtcagaacttccacaaatacttcactctttggtagcagcggttataaattacgcctttgctaatttgcgttgttcccaaccaggagaaacattaccacaaaaaaagtcagtttcatcctgcagtgttcccgcagcaaccatattaagctggaagaataaagctcctttgtagtagtagcgtctattgaattacaatgtaaatgttgatgcctgcctggaaacgtcaaatgacaacaggtttacagaacgaattcagtggttgtttgcagctctggaatcccaggctgcagagttgagatcgaagaggtgcgtctggccatcttagcgttcattcaaccaaatctcctcactccatcaaaaccacgccactccccacctgcccagctcgtaaaaggatgctcacctgtttgaaaatctgtaatatatctgatgtcttttacacagcaggacacgaaaaagtgtttgttgtggataagagtgttaaaaattcaattacgcaacagaccaaactttgtgcttctttccccctctcagcacaaagtaactttagtcccgtcctcttctgccactgtcaaacagccctgttactgtgggcattaaatgccttgtggcgtactgcgcatttgattctggttgacttgggatacctgagctcggctctcattagctcttccgctcgacccacaatccctagtgtttgcaggtgttgcattcccccaacccctttcttctcttcaaccagtagcctccaccttcccatccctgctttggagaaggaggaaaacgcagcttgagatctactcgaagaactgaccctcagctctcacaggctgccgccgagctgcaagcatgccgccgctccactcgggtaaacttcggagtgagttacctgcactcggagaagggccttacctgagcgcgcctctgccaatggcagctcacctgagggagctccccagccaatcatcgcgcagctcgtccctcgggcttgtaccctttagtgaaagaattcagctccttgcgagaaagttacctgtggccgcccaagtccgccactttctgctctgtgtctgcccattgccacgatccaggaggactccgcgccgcccggccgcctccgagctcgggccccatgtgaggggcccccccttatcccacctttccggctaggtgagggcgcgagcgggcgagcgagcgagagtggtgaggggggacggaaaagcagaattacctgtagctcttgttctgccatctcgggcgctctcacacaccttcacctgcacagacttgaaagtccagtttcaccagaggctgaggctccaggaaaagcggagcaagttcattggatcaaacatgtcacaagagtcggacaagtaagtggatcacacgcgccggctgctgctactactaccactttgggctgatggcaactggtttgttatgtttttgtttttaagttgctattgttggtatttttctttcttttttctttttctttttggtggatccagacttttccgcattatgtttctaccctgatt

SEQ ID NO: 40893 - DNA, 2300 bp, Homo sapien
gcgagactctgtctcaaagaaaaagaatatagtttgggggtcagcctgctggaaattcctttttttttcctgttgggggctgcagagagaattgtagactatttatctgcagcagcaatcaatggcttttttccttgactttaattttccttatctggatgtaactaaggtcctgtattctaattatttttccttgtaccgctaacattgagtcctcttataatagccattaggtcattagattattttagctgaaatgaaggctataaaatattccttccaaagaactaaatttggaaatctttggagacacattctatttatttaattggtgttttacttttatatttggtaaaaagaagagactcggcaatacctgttcattattttctttttctttttctttttttttcatacactaactgaacatccactggctgcagaaaggaaatgcaggcagaagccacatgcacccgtgtagacttggcctttgtgaagcaaccagctttaatgaagtccccccaggattgggaggagggggaggaggggtgggagtttggatgagagctgatttcattttctagtttcaactttgttcttctggttgatggctctgttggtgtctgagtgtcgctggtacccagagttggcagggttttttgccttgtgcattttccctagatggccatggagcttcagccttaaccttcttccttccctctgaaggaagaatcagaggccacatcactgggaggagggagaccactcagtggggatgagggtggcctctgaatgacagttccaagtttattctgggagctgagctgcaacacaactgctgtaaggatggggacaggcagaaagggcaatggtggcagaaggaacatcagccagcagctgtcacgtctgtgggaccctgggggagtgtctcagcctctctgagcctcagtgtgcacatcttaaaagatagccaagacttccctatcatctctcatactctctacgttctgaaattcagaatgttattttgcagagaaataaatagaaaagctgtactccacttcactgagggcactagaaccatgacaactgcttcccccactgatcgaggacgggtgcttgctgtgtgcaggccctgggctaagcgtgccacatggcttttatttcatttaaccctcacagtagctctgcgaggcagatgttattatccatgtttcgcagagaagaccaaggctcggagagtttaaatgaacaaggcccacagcaggggttgcactctggggtcaaacccagccccgtgggactccacatcctaagcctgctcctccccttgtctcggacagtgccccgtctccctcccaggcctgtgcaagtttgttatctgcctggagtttgctctccctcttctccctttctccccactgcccccatctcatcacttgcctgcattcacgcacacacaattcacaacttggatctctccttcaagggacccttccaggaacttcccccaacccctccaggtcacggccaggcccctataagcactgtttcctgacattttcctccataaccctgtgtctagttgtctgcttatttgaggaaagcctgcttctctaaatggactgcaaaatccttaaggacaggggctgtgatttaactaacactgccacaaccccaactcctagcacacatagcctatgggcccaggtgggcattcagtaatatttgtcaaaggaacaaataacacagaggaaaagaggttgcaaaaagagatgcgatgtacccctcaggagaaattccaatgggaacatttgtgtcaaagcatcctacggccgggttgtcggtttatctcatctaatcactccttcacagtccctagccacaggttgtttatggagatgtctcagtcacccttgttgaatgttagttatctggaccagggttctgaggcttcgcaggaggtgccactctccaacacctgtgtgacaggaaacagtcccctggagcagctgtggaattgtgcagcccctcggtcacgtggctctcttgcccatctcttccagtgctcttgtacgtgaggaaggagactgacgatgtgttcgatgcattgatgttgaagtctcccacagtgaagggcctgatggaagcggtaagccatatactcctttcagcctccaggaaacctgctgtgttctctctcctctggaatccatgtactaacgtgcagccaccgagatggcttcagaatgagctttatacagaacaagaaaaacctaagatttgtggaggcattgatc

SEQ ID NO: 40894 - DNA, 2300 bp, Homo sapien
cccctgatttatttaagccctatgctttcttcacgtctttgtgcaatcatcattcctcagagaagcctaccctaaccctcctggcaaaacctaactctcccactatatcatcacagaagccatgcactcttctttctagcacttttctcaacaatggttttacatgtatttctttattttactaatgtctgccttatttcacagcaaaaaccatgagggaaaggattaggtcaatgtcaatacctggtacacattagttgcttatacatatttgatgaatgactgagtgagtggatggatgaagaggcagtcacctaagagcagggatttccatgacctggggtctatggatcagcttctaaatacccaaacctctgagatcgtctgcaatggtgggtgggtttgcatggtttctaagggaaaagctcaaatcttttgacagattaagtctttaaggggtttcacatgaatatgtttaattatgtgaagagagagagaagaaaaagaaaagaggaaactaaaaaaaacatataaaaggataaaggggaactttataaattggagcagtgcagaataaaggtgagagagggaaagaatgagagggcaactgggggacagttattcctgaataaattctttaaactaagtgaagttgactgtattcaagaccctatgttaggtactatcagggattcaaaaaatagatgtgactgctaccctcacatctaaaaggagaacattctgggtgtgaattcaaggtaaatggaaggaagtgatatgagagaggttgggttggagccccttgctagcacagagggagggagattgcacatagcaatagaagaagggaagatgatggaaggcttcctggaggagggtaacattttgatctgctcttaacacatgggtaagagtccaaggaggaggggagatggggtaggtgagcactcaggtgagagaagaatataaacaaagctgctggtccaggacaccaaggagcgtatcatgttgtcagactcttgacaacagcctttgtggagcatctgagctgggagacacctcctatggccagtcacaggcacaaagccagtggcatctagaaggaccacgtgagacaaacttactgaggccagaacagacttggagaaggaacaatccagccccaaagaagattgataatgaataaatacacagcccccttaaaacttctggcaaaaataaacttatcccttgtctgtaagtgctcttccccgcaacacctctgcaactcctgaaacagctccatgcgctctcctttaaggaggttgtgctaatgtgatctgcagggatgccaatttctaaatgttgtgttattgttgtcctaagattcctgggcttatgaattcaccaaatatttagatcatatgagcttgaaatgtatgtgaggggtgtgcatgttttcatagttggtgccgattccattttgactatgtcaagagttacgaaaagcttccactgtgggagcaaagcaagctggggagaggttgctagacctcaagacttttgctggtgtgaaaagacacctgctgtctactgttactaaatattcacctgggcgtgttaaatctcagggcctctcttctcccatttgcaaaaacagctccatctctccggcctttcctagctcccccaagaacttacgtgtccccggcagtgaggcacatggcactacagccccagcacagttggtggagcagacctgggctgggatgacagcaggcaggggaccatgatgaggagggcagacgatggctcccctcttgtctccagagcacacttcagtgagcatttcttgggaatgaaatggctcagcttaccccagggacacccataatcctagacagcaccctaactctgcgctttacctcccagaccaagtcgctgcagagtcagctatggagttcagtaagcacattgggtgggtttgagacagactcagggagcctgtccagaagcatccctgagggatgggatcagcctaagggccagcacactgggtgagtctgttttcattcttattttgactgagattagagtacttaccctaccttatccagaacatgttaggaacttctggcagggttggtcctgagcaagactgtaaagcagctcaggtgaagcttcagtgtctttttctgctctcacctttcccatttggaggcgactcccctcagctgctttcctttctctgtcctctgcacctgccttgctgcccctagagctccagaactctctgaaattttctgcctactccctggcaa

SEQ ID NO: 40895 - DNA, 2300 bp, Homo sapien
cagttcactgaatattttaatagttcactgaatattttaatactgcccaaggcagtataaagtatacttagtcttaaaaatgctaaaccagtcaaagtaaaagtgttggttttttgctaattttcaaattaatccatttaaagtcctgaattttaggcatttttttttttttttagaactgagaacttcttatttcagaagacatcacctattagcagaatgtggcactgcagtttttctctcttaaatgctaaagctgcataaagaggaggaagaattaattaggcagctatggattagagccagagagatggtaaattaagcagctcagagaacgtgggtccagggaaagctagaagggtatgtttctctgcctcttccggttccctcatttgtatgatgtgcatttctgaacataaaagcagaacaataattggaacaaattgtcagtttatgaattgtggctgttggtgaaatctgcccctagtgaggctttaggtagacattggattccattgtccttgttcaaacaggtaaattcccagctgtcattaatctgaaattaaaggaggaaagttccttatagtttgatttcggttttgcagtgccacagctaatcgcatcaggaaaataactttttaaataaaaatctatcttttctcccaattggggctgggacagaaataaaggaagatgaaaaggaggatggagtaggacgattctatgaccaagtgatttgaacattagtcttattattaaagaagcaatttctgattctactaaagaaatttcattcttttacagtgacacaaatgtaatctgcctggctgacttaggttccatttatattttgtagcaccccagagctactcttttttatttatttatttattttaagaaacagaatagaagtcgttataagcctagcatataaaggtccttagggttttgagggcagtctcttctcccctgccttttaactccttgtcctttgtttgggcatacattttctgaatgtctttttcagagtaccttcttgtgagtttcattgattttgtttaatcggcttcccattaattaagaaagagaattaactgggaaataggcacgtgtgcagagttaaaagtaagctagggtcgtcgtaaaggaaataaagctgatgttagaaaacatgtgagataaccctttcattctatggctctgggctttcattacactttgtgtttgtggaacactggccctgtttactcaatgttgagtctcagcaaaggggtgtggatgagaggactcaagaggggagcatttggcacccgtatggccccaaagcacagttttcagcttactcacatggttattttaaagtaacactgttttgaaactccttcggtcctcatttttacctagacattttacagtacaggaatcctgaatttatgttatctgatgtctacatcctacttggtgtcaggatcattagactgtcttacctgtctctgagtcataagccactgtcatgaacccaagccactgttttttatttttctttccatcacaagcatggtctcagtatatccatgtagactctgatatagtttttaaaatacattttcttccaacccctccccctgagcttctgtttttatatatttgcttgcaaataagtttaattggctaagaaaactactccagaatttttcagtttctttccttttgttatagagaaagagagagagagagacatgcttcatgctgatggtagtgaaacaaatgagaacttcagggtggcatatattttcctgcaagtaactgtagagaaaagacaccaaagccttaaagaggaaagttgtaggcattctggagtcacaacttcgggggttgaggttgtcaaggagctgtccgtgatggttctatggtgtgtgcgtacacacatactctctctctcacacacacacaccacagtgacagatgacctattgaaataatttcagagccggtctgtggttgctacgacaaccaatgatctcttggctttcatctggccatgtgacagggactttgacgtcagctagaggcagagtctgtggctgagtccacacagtcaaaggcttgtgagaatctggtggatgctggaccttgctgctgctgctactgctgtttccaggggctgcagagcatggactgttaaatcttgcacttcttctgagtgaggtaattagtttgctttatatacaatagttagatgtttttatagctcattgtggttttcccctctctcttacctcctacaagtttgtattcat

SEQ ID NO: 40896 - DNA, 2300 bp, Homo sapien
actccttttggatattaggaattaaggcagactgaatgggaagtaactataaactataagttttacagtttacaaagcactttataactataaactaactataaactataaaatactatgaacctaccttgtatgttgaaagccactgtgcaagaagttaggcttctcataaaaaaagggtatagccttgaaaattcctatgatttctcatacataaaaaattccatagctgggcatggtggctcatgcctgtaatcccagcactttgagaggccgaggctggtggatcaggaggtcaggagatcgagacgatcctggctaacatggtgaaactccgtctccaccaaaaatacaaaaaaattagctgggtgtggtggcacacgcctgtagtcccagctacttgggagactgaggcaggagaattgcttgaacccgggaggcagaggctgtagtgagccgtgatcacaccactgcactccagcctgggcgacagagcgagaccccatctcaaaaaaaaaaaaaaaaatccttataccattgtcatgtaacatatgttctgtgaccttgaataaattagcatacactggaaactgtgaagggtttagcagacacatgctcttcccttccatcttgggcagcttcagcaccaaaaggcagcctaaacccactgagtatgcagagtctaaacaattccatttttaaagaagaaataagccacagtgtgactagacccccaagcggctacattctaccagatacatatgcttctgagatacaggctgaatgagtctcagaactgtcctcccttttgagcacatttatcacagaagttcatctacctttggggttctgtccctctgctaccaggtagtgagggctgctgtcacctaattgatgggcatgttttctcttcttccccacccctggctcatctcaggggctctgccgagggcttattttctgttacagaactaagatttccttttctttaggaaaggttatttctaaataccttagccctcccctgttccctaaccccaggactccgtccctatgccatggcctgaagcaagccagaaatatgaagtttcaaattctctttgtcccagagctaatgatattttgggatgaattttatgcaatctgaattttcacccttttcttagtagagagaaacttatgttaaattcacccatgcaacttaggcctccatgatgagcttgtctttgtgaaacaaacattaactaaccgaaactgtagggttgtgtgtatgtgttgtgatggatactttccgctggctccttcaaatccactccctacccttctccacactgctctgtaccccagaaggctgaattttatggaacgtagcaatgggccttctggcctttctgggctttggttgaggtttgccaatggaactccttggcaggtgatcagaaagaagaggaactgatgggtttactcttcccaccatcttcctggtgggtggatgtgctcctctgtgaaaggcacagccccatgtccagtggcacctcccacatctgagtttggtgccctacccagtcccctccaggcttagggattacagtggcttcccagggtgctttcgtcatcctttgttagtttcttttaaccatgctgacacttttgtaaataggtctctcctgaatcacctgctcgaatatgctatgtttcctgcctggaccctgtgacattattttcagtctagcaatcttcagaaatgtctccacctgaggtttccacaaaccatgagcacctaaggaacaggatgtttataaaaatggctcactccttattacttggacagttctctgtttctaactctttaaccttcctaaagattttaatgccaaaaacatcctgtattcaattaaaatattatataccacaattccaggtactgcatccaatggaaagagctcctgctttcaagactaattgtatagacatagacttcttccaacatagggtttcattacatagtcttgataaataccagtataacaatatatatcattgtgacatcagatagcatcacttatagaataaatggcctgagctttgaagaataagggcaaaaacctgctctacaggacaactgactaataaatgttgaagctctgaagcaaaaagcatttgcttaacccagtttaattatttctaaatgactcaaaaacaactctcagaaacttaggaggccaataagcactgaaacacgttctttccatcagcagagagggcttagaggactctccaaacaacatcctctctcaccc

SEQ ID NO: 40897 - DNA, 2300 bp, Homo sapien
tataatagccatgctagtaggtgtgaaatgttgaacacattcttgaaggtaggttggaattgaattgtgagaaatagtggtagagtttaaacttcattctagggtcatggggaaccattggatatttgttgcctgtgataatggcatgatcggaaggtttggacgttagagagggggtggggagaagaggaaagcagcagagaagttattttaattatttagatgagagaacataatagttttccccacatctgtacaactgaaaatatgtctatctctagtaaatggtactgaacttggggaggaaatgtaaatacggcatcgagagatctcatggcccaggattcctcacagaagtagactactgttgctaataatagcactcatgctagcaaatgcctaaaggcgattcaagtattgattaattctgctaaatcctatgaaagattcctcctccagcatcccataaggaggcggatgaactgctcagaaggcagtaactgaggaaagttaatgaagggactatttacaaaggtgcgggtaagatcagggaacccaccagaagtggccagcagtgcatgcaagccttcactacccagccctgacagcatgaggtgagagagcagtttctggagttgttcaggggacagggctgctggctggagctgtggttttcagtagaggaatatgactactgcccattgtggcctggtggggaggcatccaggtggataaaggccccagccactctcttccactctctgatctggtgctggtgcctcccaattggccaaactagccacagccagacagcaagaaggcctgttgatgtgggactatcttgtagtccatagtagccaacacaaagtagtgttctaattatccccaatttacaggtaagtgaaccgaggcattgagaggttgaatgatttaccaacattgggagctagtgcaggttatggagctgaaatctgaagactgacaaataatcagagatcatcagcacatttcttctgtatatgcagctggatctggaaggttacgttttccccaacctgtgtgttttggttctttggaaataatctgatgtgtacaaacttggcttggctgtcaataggtggtgtgggtgcctgctcagatcccccactttttacaaaaataatgtactttgcaggcatatttcatacttgattcattgtgtttagataaaaagaatattttccatatacttgatgggagtgacaacatgtccttgaatcacatttgctacacatgaaaaagatgtaagttgcgttttttttttttttgagttgaaagtgccaacggagttgacagtgtcacctggctgtttaaacattagtgagaccttgggctgcaataagagaatactgttcaaaggaagggagaggatcgttccctctgtgctgccctgactggtacaagttaaggggatttctcatgagctggcggatgccgaggacagtagctgggactctctggcctggaatcgctctgtgggacttttatattcttttcttcacatacatgaaagcactgtactgagggaaagggattagactcatctggggccagaactaggcctactgtgaacacggaatgggctgctttggaaggcttcatatagtccctggccggagattgtgaagctgaggccacaggtgagagatggggctgtaagcttatatttgtttcctgtggccgctgaaacaaatgaccacaaaatggtggttgaatgcaacagatatttatcctctcacggctccggaggctagaagtctgaggccgaaatgccgtgcttcctccagggattctaggggcgacttcatcctttgcctcttttagcttctggtagctgcagcattcttgggcatgaggttgcatcactagagctgcgctgcacgtcacattgcttcctgctcttctctgtgtgtctctcctctgcgcatcttttataaagacatttgtcactggatttagaacccagctgcgtgatccagaatgattttatttcaagatcctttatgacatctgcaaagaccctttttccaaataaggtcatattcactggttccgggggttaaagcttggttatggccaggcccagtggctcatgtctgtaatcccagcactttgggaggtcgaggcaggaggattgcttgagcccaggagttcaaaaacagcctggccaacaaggtgagaccccatctctaccaaaaaataaataaatagataaaaataagtaaaagaaaaaaaattaggcctcttggcatgcacccgtg

SEQ ID NO: 40898 - DNA, 2300 bp, Homo sapien
aaaattggctatggtaatagtttgtacaactaactgcatatgcaaaaaatattaaattgcatattttgagtgaatagtatgatgtgtgaattatacctcagcaaaactgttttttttttaacagtagagatcattaaagaaaaatcacatcaataaagaaaagtagataaagtggactttaaaatcacctctctctctgaggaatcccaccccaagcaccttcctaactgcttcctatgcacagaatctgtccagactacaggtgacgaaccgatgaccaggggaccacttgtggcctacaaattcttattttcttggcttatagagaaatatttaaaaaatatttaaaattttttaaaatatttaaaaaataagttactaatatttttaaattagaagagttcacattaaacgtgaacttctggcttctcttgggggcagggggaaccaaaccaaaataaaataaaataccccgacttgatggccacactggaccctcttttcccacgtagaaaaatgaggctgcctttttcagggccattgtgcccttctcagtttgtccctgtataaccacttaagttacttctttgtcacctgcttttatccttcagggacatttgagtttgcaacacctgtgcagaccttttgctgtatcaacgggacgttcccttaggccctgcttgatgattggctaatcctatggtggtttccaaccctggccacacatcagagtctcctggggcccatgtgaaaaaaatacccatacaaagctggacacccctgaaccccggattttttttttttttaacaattagattagattctctcggggtcgggcctagtattaagaaaaaagaaaaaaccaaaaaccaaaaaatccaactttccaatgcaaatttttgcttgcattggattagcagattagtccagcatttctcctcctgtgtgtccaggaagggaaatgctgggctaacctgctaacccaatgcaagcaaaggttttagtatttgatgatggtttaacagcctcctagataatttttgttttacaattgaaggcaaccggtagagctaggaaagggtgcttttgattagatgaaacttttacttggtgtttaaatcagagttggcagctgtctggacctcaatgtaactgtcctttctataaccagtcatgttaaaagattttgcaaacattacaacgaggaaggccaggtcacggtgcctttgcagccttgttatttttaagcagcaactttttaaattgatgaatttgagttgctcttgagaccttctgcgggttctggaaatgtcaccagggttgacaagcacaaggagttagttacagtggctttttgagaggccatgagtggacgacacagcaagacaggaaacaggtgctggcagccagcaggtactcgataaatattgggtgaatgaattgacaagacattttgcttctcattatctccacacgagatgaaaaatttgaggggaggaaggaggggcaggagaggggccccttagatgtcttcctccggattttttgttaagcttttcctagacagtttacagaaggctttgggtagagaaagcactagttagacaaaagcagcccccctcccaccttgtgggcatgaagagtccagaggacaccacctgagaagcttttcaactgccttccaaggctcccttgaacttcactgcggtagagcagggaccccagaccccccctcaaatcgaagcttggaaggaggtgctctaggctgaatctgacctcccaggacccgaggaggcaagcagatggcaccccttggaaagtagcagtgcaggctggctagaggcctgggcggtgagctaggactatggggcaccgtggggacacgcccggaggctgcaccagggcaagcgggggagggggggggcgtccactgcacctgcaaatcccgcgcctcatcttggcccccctgcaaccccgcggtgaagcccacgccggagaggctgcctgcggggctgcagtggagagggggtctgcggccgcgaggagggaggcggcgagccaggctggggaggggggcgcggctggcgacggtgctgtccagggggaggcgggcggagggaaggcgctgccgctgctgccgccgcctcgcccgaagcgacacagacgctgggagcggccgaggcggtgagtcgcagcgccttccctccgcttctcgggagccagagcggagtcggagttgcagccggggcgggtgtgccgggggcggctgctgggggggacccgtgcgctcggtgcgccgc

SEQ ID NO: 40899 - DNA, 2300 bp, Homo sapien
cctggggtttttatgggcacagggtaggggagtggggccatgggtggttttggaaagggcaacattatagtgggaaaacaggaatacatgtcactttgggctgcagttccaggattgagggtggagtcctcgctggggaccatcttcttctgcccagaatttccctgcctcctgtccctatcaaaatgatgtctatatatgctgtgtgatggtatttggaggtggagccttgggaggtaattaggtcatgtgggtggagccctcatgaataggattagtgcccttaagagacatgagagatatgatctctctctctctgctatgtcaggatacagcaagaaggtggccatctgtaaatcagtaagagggccttcaccaataacccaaccatgctgacatcctgatcttgggctttcagcttccagaaatgttcaaaaagaaaaataaaagtatgctgtttaagcaacccagtcaatggtaatttgttatagcccccagaactgactaagggaaggtacatttaaagacaatttttggctgggtgcagtggctcaggcctgtactcccagcactttgggaggttgaggcgggcagatcacttgagctcaggagttcaaaaccagcctgggcaatatggcaaaaccctgtcactaccaaaaatacaaaaaattagccaggcatggttttgtgtgcctgtggtcccacctgtgcctctggaggctgaggtgggaggattgcttgagcctaggaggcagagactgtagtgagctgagattgtgccaccgcactccagactgggtgacggagtgaaaccccatctcaaaaattaaaaaaataaacaatttttaaattgtaggtttcaccaaattctaaagtacgtctcccttaattccaaagactaattctaatgaacattttcaaaaatatttccattcccaatggaagccatacctatgtataaactgctttaaaaaaaaaactgggttgttggccacctgtgatggctcacacctgtaatcccaacactttgagaggctgaggtaggaggattgcttgaggccaggagattgagaccagcctgggcaacatagtgagaccccatctctttaaaaaaacaaaacaaggccagctgtggtggctcgtgcctgtaatcccagcactttgggaggccgaggcaaacagatcatgaggtcaagagattgagaccatcctggccaacatggtgaaactccgtctctactaaaaaatacaaataattagctgggcatggtggcgcctgcctgtagtcccagctactcgggaggctgaggcaggaggattgcttgaacctgggaggcgaaggttgcagtgagccaagatcatgccactgcactctagcctggcgacagagcgagacttcatctcaaaacaaaacaaaactcaggttgttacctgcctggcattacttctggatgtaaaagtagactgattacctggcagtaaagtagcagctacagttggttaataggtgcctaattatctaacaccatagcacatattatataaaatgttaaagcagtgactgttgagattcattagtttatttacttcagtgccttcttgactagtttttactctcccccctccccttttagcccttctttcatttgcttcagtgccactagattatgttaatttgaatatttttaaagtacatcctggccagcttcttaattagccagaaaattcgattccatcttaattttttaaagataaattttattgtgtatgtttaaggtgtatgacatgatgttatatatatatatatataataaaatggttacccattatgtaacaaattaatatttcctttgcctcacatagtttagctgttcacccccccaccaagaatagctgtaatctactcatttaacaaaaatcctgaatataatacacttgttaacataacttttttttttatttctttgcagtgctaacatctttctttttccatagtttactggtagtgggatattcctacttaacaatagaagttagtttcccaaacactttgagaagaacttaactccaaattaaaatttttgaaaatctttttattccaggtcgacttatcaaaggatctccctcactggaacaagcttaaagcagatgagaagtacttcatctctcacatcttagccttttttgcagccagtgatggaattgtaaatgaaaatttggtaagatttttgcttgatttaacttttgttctcctttagcagttaaatgatgataatgtcagtaagattattaaattcagc

SEQ ID NO: 40900 - DNA, 2300 bp, Homo sapien
ccaccgtgccggcctagccaagacaattttataactctttgtacgtggctattacatgtaaggcaatctttcagtaatgacacattactcttaaaaaaaaatcctagttttcctttcaagtcaaatgtcttgtttgaataaacttatttaaaatgaaaataaattgatttaataaactgtgtgactcaggcatctcaatttgatctgagccttttgaactcagccatctgagttccatgaccctctgggatggcctgactcgtacgtggaagctaccattgcatcaaggtaatttcccaccccaataagtgttttacaagtaatatattattaaattcacacaacaaccttatgaggaagggattattattcttatcctgtagatgagaaagctgagtctcagagaggttaattgacccaaggtagcatagctaataagtgagggaactagaattcatgcccatgatgatatgactttttcaccaaactcattcatgtttgtatcttgaatacctaaacgtgatgcccgacacacaattattgtttgatgactttaattgaatctgattatttgccacgtggcctatagtaaattgagactcagttgcctagcagaatgtatgtggctattatttaaagttcacagatgaaaaaaatttcactcagcatttgacccctagtagttgctttaagaaagactgtctacccctacgctatggcaggtttgagaaagggctttcagcattttcaacgcttaaagtgagatcttgatcctatttaccatccttcagccagccacaaaacaggtgcatgctgttcaggtcatggcaagatcccgtcaatctttcagcttcaaactacttaaacaaatctctcttccattttatttttgttagaccaaactatttttttcaaaatatatttttttcaaaatatttgcctgactttagtaacgtgtccctctccccctcactcacccgcattcacacacacacacacacactttcccccagacacttccccttttcggttgtttacgcacgaaaccagccagccctttccctagcgaagtgtttggcggtgtagctgtcccgtccccggcgcttcccacagcaacagcgcgttctcttcgcctcccgcagtctctcaggacaggccaggctagcgcaaagtaccgtgttcctggaacaccacgagggcgagctcgggaatctcgagccggcctgcaggacacctgccgcaccaagtggctagagcccggggagggcgaggcgaggtgggacgaggcggggtggtgagcgggccgggaaggcgaggccgcgcggactctgggatagctcctcaggagtgggcgcccggagtgggcgagcggaggaggcggggccgatgaggtgaggtggggccagctggagtaggctaagcagtccagagcagggggcgtccctcagtggaaagccgggcgactgggcggtgcaacagagtaaggcggggccagcggaagcagggagatttccttaggccgcaggcggggaaatggggctggccggggtaggcggagccccgaggcaggggaggcgtggctggcagaggtaggcggtgccccaaggcaggcggggcttgccgagacagggataatcccttaggccacaggctgggaggcagggcaggccgaggcggggaggatcccttaggccgcagtaggggaggcgggtcggccgaggcggggagaaacccttaggccgcaggcggggaggcggggctggccgaagttaggcggagccccgaggcgggggaggcggggccgggccggcgcagggagagtcactcaatggacaggcgagaaagcaggaccggcgcggcggggcggggccggccgagtccctagagctgggggcggggcggacccagcggaccagcggaccacctgggtgctgtcgtagttggaggtggcctgaggagctcagttccctcagcgcccgtagcttcggcggagtctgcgcgatgggcgacccggaaaggccggaagcggccgggctggatcaggatgaggtaaatgttgctgttgcgtcttccccctcaccgcagtcacgccagcccgttagattgcaagttgcaggaccgctgtaggaaatgttattcgccgcggtcaggacaggcctgtccgcccgccctcgccgcagcctggcttcgtcgttgcgagcgccggggaggccgtccccggggagggcggaggaaggagctgactttgggtttgcgtcccgctcgctgctctgccccggggccagccaaggacgacgctt

SEQ ID NO: 40901 - DNA, 2300 bp, Homo sapien
tatcttcttcagttgaagaattgtaatgtattttgtttatgattgtaaagccaaggacaattctttttttttttttgagactgagttttgctcttgtcatcaaggcaggagtgcaatggcacaatctcagctcactgtaacctctgcctccaggattcaagctattctcctgcctcagcctctcaagtagctagaattataggcatgcgccaacacgcccggctaatttttgtatttttagtagagacgggttttgccatgttggttaggctggtctcgaactcctggcctcaggtgatccacccgccttggcctcccaaagtgctgggattacaggcgtgagccaccgtgccggcctagccaagacaattttataactctttgtacgtggctattacatgtaaggcaatctttcagtaatgacacattactcttaaaaaaaaatcctagttttcctttcaagtcaaatgtcttgtttgaataaacttatttaaaatgaaaataaattgatttaataaactgtgtgactcaggcatctcaatttgatctgagccttttgaactcagccatctgagttccatgaccctctgggatggcctgactcgtacgtggaagctaccattgcatcaaggtaatttcccaccccaataagtgttttacaagtaatatattattaaattcacacaacaaccttatgaggaagggattattattcttatcctgtagatgagaaagctgagtctcagagaggttaattgacccaaggtagcatagctaataagtgagggaactagaattcatgcccatgatgatatgactttttcaccaaactcattcatgtttgtatcttgaatacctaaacgtgatgcccgacacacaattattgtttgatgactttaattgaatctgattatttgccacgtggcctatagtaaattgagactcagttgcctagcagaatgtatgtggctattatttaaagttcacagatgaaaaaaatttcactcagcatttgacccctagtagttgctttaagaaagactgtctacccctacgctatggcaggtttgagaaagggctttcagcattttcaacgcttaaagtgagatcttgatcctatttaccatccttcagccagccacaaaacaggtgcatgctgttcaggtcatggcaagatcccgtcaatctttcagcttcaaactacttaaacaaatctctcttccattttatttttgttagaccaaactatttttttcaaaatatatttttttcaaaatatttgcctgactttagtaacgtgtccctctccccctcactcacccgcattcacacacacacacacacactttcccccagacacttccccttttcggttgtttacgcacgaaaccagccagccctttccctagcgaagtgtttggcggtgtagctgtcccgtccccggcgcttcccacagcaacagcgcgttctcttcgcctcccgcagtctctcaggacaggccaggctagcgcaaagtaccgtgttcctggaacaccacgagggcgagctcgggaatctcgagccggcctgcaggacacctgccgcaccaagtggctagagcccggggagggcgaggcgaggtgggacgaggcggggtggtgagcgggccgggaaggcgaggccgcgcggactctgggatagctcctcaggagtgggcgcccggagtgggcgagcggaggaggcggggccgatgaggtgaggtggggccagctggagtaggctaagcagtccagagcagggggcgtccctcagtggaaagccgggcgactgggcggtgcaacagagtaaggcggggccagcggaagcagggagatttccttaggccgcaggcggggaaatggggctggccggggtaggcggagccccgaggcaggggaggcgtggctggcagaggtaggcggtgccccaaggcaggcggggcttgccgagacagggataatcccttaggccacaggctgggaggcagggcaggccgaggcggggaggatcccttaggccgcagtaggggaggcgggtcggccgaggcggggagaaacccttaggccgcaggcggggaggcggggctggccgaagttaggcggagccccgaggcgggggaggcggggccgggccggcgcagggagagtcactcaatggacaggcgagaaagcaggaccggcgcggcggggcggggccggccgagtccctagagctgggggcggggcggacccagcggaccagcggaccacctgggtgctgtcgtagttggaggtggcctgagg

SEQ ID NO: 40902 - DNA, 2300 bp, Homo sapien
gagaaaccccatctctactaaaaaaatacaaaattagccgggcacggtggcgcatgcctgtaatcccagctactcggaaggctgaggcaggagaatcacttgaacccgggagacggaggttgtggtgagccaagatcgcgccactgcactccagcctgggcaacaagagcaacaccccgtctcaaaaaaaaaaaaaaaaaattgaccatttggttaaaaaatgcaatacgcttttatgcattataactatggcatatacaatatgccataaagactatatgaagatgtagaattctgttactcctagagatcttgcagttacacatttaattgtttacatagttacattgtaactaatatatacatataataaagtaatggggaagaggaaaatgatagagaaaactatactgtagtagtcagggtgtgatggaaccaaatcgcagttttctaattgaaaatgcattcttggtccgtaagaacagagttctgtaataaagtagcaggctccatttttagtcaaaacctcctgtccttggaacacattaattgtatctttagcctccatcttcaactttacaggtgtgtctatttcattgattggttgcacatgaagtctagaatctgatcaacctcattgcctaaccctgttcacaataggctttcattaatttactaagtggtatacacctttttttttttttttttaagacggagtctcattctgtcacccaggctggagtgcagtggcgggatctcggctcactgcagcctctgtctcccaggttcaagtgattctcctgcctcagcttcccgagtaactgggattacaagcacctgccaccacacctggctaattcttgtatttttttttagtggagacggggtttcaccatgttggccaggctggtctcgagctcctgacctcaggtgatccgcccaccttggcctcctaaagtgctgggattacaagtgtgagccactgcgcccggctggaatatgccttttaatcttaaactgcaccacagacccattctgccctgccaccttcaaattaataggattgttgttctcaatcttgcctccttctttgggctttctgtcagccagagtcttcttagctgccacttcacaaaacaggtgccagttctgtgccaaacaagcacacaagctgtaccctattaaatcattttaaaacataacagcaaggggaaagagattgagtggactaacatattttggttaggatgtggggaggggagagagtggaaggattataccatctgaatcttaatgttactgttcgtgtactgtttgatgcatcagacttccttgctggtggtgtagttatgaggaccatagtgaggatgagcaagactgctcagcaggtagaaggtggagccagcacacacttttcttttggagaactgctggaacctgactccagctataactgcatttataaccagttataattaacctactgagcagctatggatggtatctgtgtttcttggacagagcacgtgtggggccagagtggatctcaccagtgagtggctggtttagggataacatagttgtcagtctggcagtaacatgatcattaccttatgaatatttaagatttatttggggctgggcaccgtgtcccacgcctgtaatcccagcactttgggaggccgaggtgggcagatcacctgaggtcgggagtgcgagaccagcctgaccaacgtggagaaaccctgtctctactaaaaataaaaaattagccaggcgtggtggtgcaagcgtgtaatcccagctactcgggaggctgaggcagaacaatcgcttgaacctgggaggcggaagttgtggtgagctgagattgtgccactgccctccagcctgggcaacaagagcgaaactccgtctcaaaaaaaaaaatttacttggtccttctagcccttttaatctaaaagtggaactctcatgtgttccattatttttgtgtatgttcaatacatatatgttccattcatcctatttttaacatgcctcacagtgtaattatttattatttatacttaatacatcttacaaatttcattatgtctaacaagccatttgctcccatacttagtttctctcaatttctgtggcagaattgaatattcttaaatgacacagcaaaaacatcacagtactcagaatagtgtaggcagtgtgagtttcccccaggatgttcaaagttattggaagagcaaatggaaaaaaataacacgcgtaactgaaagatctcaaggagtaagaggatt

SEQ ID NO: 40903 - DNA, 2300 bp, Homo sapien
tgcttggagatgtacctcactttagcactaagtagctgtgtaactttgagcaagttgtttaacctgtgtctccattcctctcgaggatcataatagtctttctcatggggtaaaataatacatgtggaacactcaacaagatgcatggcacacagtaagtactgtaataaaagtaatttagagaaacagaagatactttgcttaacccaagataccttgaggtaaatttaaaagtcacattttaaatacattcctattgtttttcatacaactatcacttctgtggtaatcaaatggtgtttaaataatctatgtttatgcctacttacataggttaacataaacagtaaaaatattttcattcactacccaagcacagtctattgaaggcacttccaaccagccccttatcagtaggaagaatccaacctaggactagtttatcaatagatgtacttttccatagattgtaagcagttctaagtaggaaaggtttggctctcaggagctttcagcgggacatttatatttgtaaataaaaaggaaatattctttgggcagtgtttcagaatcacctgggatgatctgcatgaagattcctggcctccaccaaagacttactgaatcagaaaggaggcaagaggatgaggaatgcttaagaatctgcattaacaaactttacaaatgaatcttacaacatacagaagcatggaaactactgcctcaagggattatctcaacttgagtttaaacataggaattgctgactacctttaaaatgtaaaaatagtatctttatgggagggatgttgtttgggggcagctactaaatagtgaaatcattcctttaaaataccctctcaagtctgccccagttatccattttactggatagtcttggtatccagatgatttagggaaaaaaatagtagtagcaaactctgaaaacactcagtaaagttcattcttggtcttctcttcctaaatttgttttcaattgttagatttaaacactaaacaagaccaaaagagaactttattttacatgtctttattttacatttagaaccgttttatgatttacttaaaaaaaaaatcttttactattattagaagtattttttaaccaaaatcttgatttaggaagacttaagacattgtgcattattttaaatattttcatttcagtaactattaaaaataaattcacaattagggtttcaaatgtcctaatcatatctagtttgttctcatttaatattttatcaatcccatcatgtgcatacagaggttaaggtgatgtataaattttatatctttcaaacacattgatgctaatcagctcttgatctaattactatttcatttattcagaaatagcatttagacataaaaaccaatgtctcactttgtaaaataacctttggctaatttacacacatctaatacagcgtgttatataagttttaagtaatacaatgagtcactactatcattcagttttaaatatttttagtgttaacagggctgagaatatcatgtggttcagtcttctgaaggaagttatataataaaagcatagtgcctttgaacatgaagactatcctcaaggccagaaatcctacaaaggaactgaaaggagagattccagagaattgctctcctcatttttaatatgtaaagtgactgttttaagtcacttcattgaagacttaaggaagaaaacagtgttattatgccactgaataaagctacttaaaccagagtaattttgggatattaatcctaggctacataattaataggtcatcaaaacaaaaacctgtcagttattaggtgtaagttaacttcctatgccaagtaaggggtcacacttcacttcccccatttgtaaaatgaaaaggtggccaggccagtgccatttaggattctctgctaactgtaaaatgtggactgattttcttctgtttcttatagtccaggtgtatataaacttccagttctttaagtcaaaatttttatgcacataaccatgtcagtgtattgcccttagtttaaaaatgtacaactacataaataaaaactattgtttcttcaatattacttgacatttcttctgtaatttctttatttaaaaaagtaaatgtaacaagatacttaaaaaaggctagatacaaaagtagttaagctgctcacgaacatttaaaattttccaaaatgtatcttcaataatcatgatcttataaaacattttacagttatcagaaagtgcccaggctgagtttacataactgaaatac

SEQ ID NO: 40904 - DNA, 2300 bp, Homo sapien
acagctttagttttatttaccaaagctactttgggtaacctgctaaaagaactcaacaggactcagaagcagttgtacttaatagttattgtttattgtagcaaaaggacccacagcaagatcagcaggggaagaaacaaacattaggcggagtcttgaggaatccaggtgcaggctttcaaagttctgtctcaagcaggggaatgagttattgcaaagaacacacttcttccactagtgaaatgtatcaacatgtatacattatttgtgcttagggaagcccactttagagtcagagctcagtgtttttattggaagctagttccatgggcattttctatctgcacaaccagccatgattactgaaattccagaatccctgaagaaagcacatgttcatcttgaactgcattgtttgcacaaatagtccaggcagtctgatacagcatggttcattgctccagacattcaaaacagccttaccagttagtaatgttggaatattgcaaaaaccaagttctcagacaccagccaatgccagccctactagtcaggcccttgtaaagagtaacatcaatcctactatgttaatgtcttccccatccagggtaaaaaaaaatatttttttttttaagacagtgtcttgctctgtcaccaggctggagtgcagtggcacaaccttggctcagtgcaacctccgcctcctgggttcaagtgattctcctgtctcagcctcctgagtagctgggactataggcgcgcgccagcatgcccagctaatttttgtatttttggtagagacggggtcttgatctcatgatctgcccaccttggcctcccaaagtgctgggattacaggcatgagccaccacacccagcctgtaaaatgtttatatagctttatgactgatggtgttgagtgtttctgatccctgtgctacaataattgtgcaggctttggagtcatactgttagagttgaaatcatggctctaccaccctctagctgtatgatgttaccaagttaagttttttgtgccttggttccctcctctgcaaaatgaggataagattaaattgaattaggtaaggtactaagacaattcctggcacatcataatttctcagtaagcatctagcttttgagtttgtgtctgggaggtttgttgttgtcaatttatctttcctgagatactgacagggtagcactttttaaagattgaagctattcttaatgactagcctgtttgttattaacaaaacttttaaaattgttaaatcactgggatataatactacttcactattgaacccatagcttattcactatgccttccctccccacttcctgcctttctctcttttgaatcctaagaaataaaaaatacaggactgaattttttttgctatctggcataaaatgggaactagcattgttagagaaggctgctaaaattatgtcttgtgctttaataatataaataaatgttacatggaaaatgaagtattattgtttctgaaattctctaggcaatgaggaaaggtctactagatgtgcttccaaaaaattcattagaagatttaacggcagaagattttaggcttttggtaaatggctgcggtgaagtcaatgtgcaaatgctgatcagttttacctctttcaatgatgaatcaggtaggacatttaaaaaaaatgtttaaagaatgaactatatagataggtcagtcagcattttctgagtttctagttcttaaggcctgtttatagggtttgggaaattgctgtattactcaagcattaaaacaattttttacattgtttttaaaggtatgtttgaagtaaatagtattttgatggcttagcattaggctattcttaactcttttactgcttaatttttctaggtttcaaaaaatatgaatacaaacaaaaatttttcatggtgagcaactgtgtaaaaaaggatttgtatatagtggttaagaaaaagtaatccatgtgacaactctctgggcttttctgattcatgttgcttaaactccctaatgaaagaatttgtatgatgattgctctatagagctggacccaaatcacacttctaaaaacacagtagcacacaaacacttcctagattcctagaatctaggaagaataaggagtggtagtgaaagtcctcttgaaagaaaaacttttatctccagtgtttgatttgctgcaattctttcttttgaaagtcctatggtctaggaataggctttttagctgtgactgtacattagaagctccaagaagttctctgt

SEQ ID NO: 40905 - DNA, 2300 bp, Homo sapien
gctttatcctcgtgtacaagcaatgcaaccagtgtgtactgtgtacttagttacctcttaactggctgtgttatttttttgcttttgaattaaagatggtgtttaaaaaaaattgtcagctactggcaaaaccacatgattgaggactctttttagctctgcagtaagaaggaagctcaggagagaataaggcagtgtttactgaagggtaactgtatagcttgaatttattttttcctccacccaccttatgttgggacactgtctccattctaccttccttgcatgctaaagaatttgctgtgcattatatttattgtatcttcatttgaacaaattattactacttttggagcagactttatctgttagcaagctgtagttggaacacattaatgctgattagtattgcaggaagaattttattttgaatgttctatcaagagtttttctttatatgatatgaaacacaaattagttatgttttttgtctttatgcataactgtatgtacacattttatagtgaaagaataacagaaaactattatttcttccagcaagtcctcagccttaaacataggtatatttttctctaccctacccccttctttttttctaccctaaataaaagatatttctggctctctgatgaagaaaaaaatatggaaattgagtatatgtatgtttaactcagagatataaaaaaacctaaaaagaaaacttgtcatacaaatattataagtagccttaacaagatgtggtactgcatggactgtttattccctgccaagtttctctataattgatcttccagtttcataaaagaccttactggttctgaaattttgtatttgttacccaagtttcttattttattttttttttaaataaaagattgtagatgtaattagacaagaggttttagagagtagtcaagtaacatttgttcatcatttacaggcatttgcaagtaaaatcactggcatgttgttggaattatccccagctcagctgcttctccttctagcaagtgaggattctctgagagcaagagtggatgaggccatggaactcattattgcacatggacggtaatgtgtacaattgggaaggcatttcagtttaaacatcagctacttactttcagtatgtgggtgccatcatatcttaaaatttatgtcataaagtataagactttaaatgcatttttatttattttttaaatgatagcttaaattccatgaatgagacagcttagtttcttctcatgtattagaaaggtagggttttaatagttaccaaggttatttggaaattacttgaaagaaagtacatctcaaattcacttatcagaataccctcctggcaaaggccatacatattatactgtgttcttgccataaccatgacatttcttttaggcttcctgatttgtcttaaaaattcatggaagtttttgctttctattctgtaaagtatgaatttaatataaaatctaaaaaatatctaacagattacatatccctttttccaaggtgacaagtaaaagtgacttaggaagataaggccgggtgcggtggctctcacctgtaatcccagcactttgggaggctgaggcgggcagattgcctgaggtcaggagttcaagaccagcctagccaacatggtgaaaccgtatctctactaaaaaaaaagttaaaagtggctgggcacggtggctcatgcctgtgatcccagcactttgggaggccaaagcgggtggatcacgaggtcaggaattcgaaaccagcctgaccaacatgatgaaacccgtctctacgaaaaatagaaaaattagccaggcatgatggtgggcgcctgtaatcctagctgctcgggaggctgaggcaagagaatagcttgaacccaggagggtggagcttgcagtgagccaagaccatgccattgcactccagcctgggcgacagagcgagactccatctcaaaaaataaataagtaaataaataaataagctgggtgtggtggtgagcacctgtaatcccagctactcgagaggctgaggcagggagaattgcttaaacccgggagacagaggttgcagtgagctgagattgcgccactgcactccagcctatgtgacagagcgagcctctgtctcaaaaaaaaagaaaaaaaaagggaagataggtcacatttatgctgtagtttctatcctggggctaatctgatacccagtttgaaactttgaagtgtttattattttagatgaaaagttgtatttttttcttcctaatgagt

SEQ ID NO: 40906 - DNA, 2300 bp, Homo sapien
agtcttgctttgtcgccctggccagagcatagtggcatgatcttggctcactgcaacctccgcctcctgggttcaggtgactctactgcttcagcctcccgagtagctgggattacaggtgtctgccaccatgcctggctaatttttgtatttttaatagagacagggtttcaccatgttggccaggctggtctcaaactcctgacctcaagtaatccacctgccttggcctcccaaagtgctgggattacaggtgtgagccaccacacctggccttgcttcttagatcttaagtctttatctcctttctttcaaactgaatagccaacttcccaacaacattaatcaaattactcatttgttttaatgccacaacatacacagtagcagtcttagaattacatcactggaatctgaggtggaaggatggtttgagtccaggaattcgaggacagcctgggcaacatagtgtgagagactctgtctcttacaaagaattataacatcaacactaccactaacaaaatgattattcaaaataattgaagatttatttgcggatgtttgtccttaggtcatatgcagttagagatacacagttaaattaggtttgttttaaagtcacttgaagtaattcttctttgtaggttttgctaccagctctatataattagggccttttgtttcattttgctttcagattttagggattcgtttttcctcttttggttttattttgtaatcaatgtaaaatatctacagtgtggcagagtgaactctacaaaagaatggatataagtccattcttgtctcttttaccattttttcaagtttatttccttccctcccttttaaaacatataagcatatgtatgtattaattacatacctcctcccacctccccaaacatactatacattttattccatcttgcttttctcacttagtagtatatcccagagaaaatatgagatgttctaccttccttttatagctgcttaatgtactgcactttaatggttgttatcgcagtttttgcagctaatcccttacagactaggtatttgggcttgtttccagtcttttgctattacagatagtgtgatgaatggcctcgtgtttttttttgctagtgtgtccctgagatagattcttagacatggaattgctgggtcaaagagcatgtgcatataattttgctagacattgacaaatacttctgcataagcagttgcataattttgcattttcaccatcaatgtgagaatgcctgattgctcagtctcgccagcagttgttaaatttctagatttttgctaatctaataggtaagaaatagcacctcagtatagttttaatttgaatttatcttattttgagcaaagttaaacattatttcatatagttaggatagttatatttaactcagttgatatgcccatttttctaagttggctttctctcagatttcagaggctttttatgtagctgtaggtgatagacacactcattaattaatatgtatctttgtgacaaaaggtgcaaacaatttttccagtttggttagtccccctccagcctcccgcccacttagcttgtcatcaaggaatctgttttttttctagtattttttttttaacatctctgatcatttggtattttggtgtatcccaaaattgaacaagattattgttttccaatagacctttgaaagaaagtgttagaattgaattaaattctgttgtcctgatttaatttgcaagacattcttgtatgctttaaagtattgtattttgtaatggataagcttctgagaactccaattactttgttgttttttaaactctcaaggaaaggctaaaactagattttcagattgtacatagaaaaattcaagctactttccaacattgaatttactactttttgacttcttgatgtgttttaataggttgatcgggatcgagatcttctcattcagcagactatgaggcagcttaacaatcactttggtcgaagatgtgctactacaccaatggctgtacacagagtaaaagtcacatttaaggatgagccaggagagggcagtggtgtagcacgaagtttttatacagccattgcacaagcatttttatcaaatgaaaaattgccaaatctagagtgtatccaaaatgccaacaaaggcacccacacaagtaagtactctacaaataacaagcagcttaaaattctttccttgttcctcaaaccaacagtggtaatcatggtttctatatgtgtgagtgcataaatttgcatt

SEQ ID NO: 40907 - DNA, 2300 bp, Homo sapien
agggtaccaggtctgtcctgatttgtaagtattttttcataaattttgctcagaagaacttcctaagcaaaactgtgtgtgtgtgtgtgtaattcattaacagaccacctctgtagaaggaatgtcatgttctcagtttttgccttcgaagaggtactttattttttaaaggaggtcatagaaacctttgagaagaaagtcatgaattggttccttagggaaaaaaaaacagacttatttgattaaaaaaaatttttttttgagatggagtctcgttctgttgcccgggctggagtgcagtggcatgatctcagctcactgcaacttgccaggttcaagcaagtcttctgcctcagcttcctgagtagtggggtttacaggcgcgcacagccatgcctggctaatttttgcatttttagtagagatggggtttcaccaagttggctaggctggtctcgaactcccaacctcaggtgatccgacatcctcggccttccaaagtgctgggattacaggcgtgagccactgtgcgccgtggccaaaactctgaaagtgtcttatagtagaaactcggtataaaagatcctatctcggccaggcgtggtggctcaggcctgtaatcccagcactttgggaggccgaggcgggtggatcacctgaggtcaggagttcgagaccagcctggccaacatggtgaaaccacatctctactaaaaaagaaatacaaaattagccggacgtggtgacacatgcctgtaatcccagctactccatagactgagacaggaaaatcgcttgaacccgggaggcggaggttgaggtgagccgagaccgcgccattgcactccagcctgggcaacaagagcgaaactccgtctcggggaaaaaaaaaaaaaaaataataattttccgttctgattccactgatcataaattgaactcctttgtagaacaggtttatcatctttcatttaaaagtaataaaaaatcacgaatcatttatatcaggaaattagtggaaatttccacattttgtctttgggcatgtgatggtggtgaggaaactggggagaccgaggtaatagaagttgctgcaaagccaactccaggatcctactatctccttctggaaaggcccttacataatttccttacttttccaataaaaggctgtatatgtcttgccccttaactgattttaccaacttcaccataaatacaactgcggatgaaggatgagaagcaacaagaaacccctaaggatccgccaaataattagggctgccccaggggaatccgagcgaaagaacacaagagcccctcttcctcctcgcctcctctgggacacacacttaccctccctcccggcaggttagcccgcagcctcctccttccctaacacgtgctctccggaacactcactctggagacatcccacccccggcggggctgggctcgggagccgaacggaccaatcggcacgcgccttacagcgtcgtggcccgacaacgttgagcagcccaatcgagggggccttgccgcccgtttcccggagccccgcctctcgccgccgcgcccccgcccgccggtctcctccctcctcctcctcccgtttgcccctcccccgccgctccggagcggagcctgcgagacggagaaactggggcagaagtgaagatggcggcggcagcttctcgctagtgacgcgcggtgcgggctcatctccttcccctccttcctcacctcccctagtccggaccccgtccgccgccgggaccagaccgtccccgtagcccgcagccagcagccgcccctctcctcccccggccgcccctctcccaacgcccgtctgccgctggccggcggcgcgcccctggtcccggccgcctgcctcgcactccgcgctgtcgccgggggagcgggtggcgtgtggattcgccctcctgcccgcccctccgggccgcggacacacgcccggcagggaggcggcggcggcccctgcgtatttgcttccctccatttggggactgggaggcggcggcggctgtgggttttggggaggggtagagggctggggggcgggcgagagcgggagggggccgccctcgagtggaggacgagaaggaaagcaccatgacgtccatccatttcgtggttcacccgctgccgggcaccgaggaccagctcaatgacaggtaatagggctggcgggtcggcgggcgcggggggaggggcgcccttccctccctcccctcccccacgggccgtgccgggcgggtgcgggtgtttacgcgccggcc

SEQ ID NO: 40908 - DNA, 2300 bp, Homo sapien
atggaattgtggcttcctaatttatatctctagcccaggctttcctcaaattccagaccctcttatccacagaatactccagatttctaccttaaagttgtcaccagcaccacctgttcaccaaatccccaaacttactcttctccctgtgttatttttatctcagtggcaccaagagtctgccaagcttgaaagctggaagtcaccactgattcctccctcactccatcctcactctgttcactaaatcctgttgaattcacccagatggtcattcagtgagtacatttcaagcacctgctatgtgccaggcattgtgttaggtatctactgcgaagcaaaaatagacaaggtccttgccctcgtggcttacagtccagctggggaaacaatatcatgaaggaaatgtatcctaagttaagagagtgtttagtctgggagacagagaaggcttccccaagaaagggggagatctaaagggtgccttaagaattaaatggatgaaagtcataggtggggagttcaatttctaagcaggcagaacgtcctgtgtatgagctctgaatgaggtggaaggaatgaggaatgtccttcaagggactaaggaacggcctctggaaagtgagtggtcttccaggaaggccatcgtggctgaggggtaatgaattgcaataatactaggatgggagaggagagtggggaagtgggagaggccccattgctcagcacctggtaaagattttggtcctttttttgagaggacagagaagacttttaaggtgagtgggatgatgggtggggaaggttgaggaatgacagatttctatatgaaagtcgctgtggctacaatgtggaaaatggattagatggggcctgggcagaggtgggggaaggctttcccattggcttcctccttgccatccccatagccatgatccccagtccagatttttgttgtctcttcttgtcttgcagcagaaaaccccactactattgtccctagcaacttaccttcagtgtggctgtctcacttctgacaaaagaaaagaaaatcaacaatccttcgttgggctcaaaataaagttcagagtccttagtctggctacaggtcccttcaaacctggcccttgtctccctcaccagtgtcacatccaaccacttgtcatcaatacctgagctctagttcatacaagggagactcgagagctggaccgcagtttgaggtgaaaggaccagaggagtagaggcaccgagagccaaatctgaggccgaatcagaggtctaggatgttaactgaacagaaagtaaaggaaactggccgaagcgggggtttcaggcagttggcttccagcatcttcaggcggttggctacaagaacatcaaagaccaacatttgggaagcactcagggacaagacatccggaggcttggatgcaagaccaaaggtgtagttgatgggaggtagttccccaggacaggcccccgaggactgacagatgggagcttaaggacaggacccccaaccagtagagaaatgaggttcccgaacagccatgaccacagctggcgcagaatgggcaggactcagagacttgtaactcagaaggtcaaggacaatggctgacttgaggatgacttggtaggaggagaatgatgagaacattctttatattctacctgtctggagacagaatgaattctagaacaaaaggagcaaggccaagcttccaatcaaggctagagctagaaggtcatggagaaaggcgtgggcagctcctgccttcgcctgcaccaagttcaacaaacacacagtcatagccatggctggtccccagagcacacacaaggcaaggatgttagtggccagccccatgcaccccgatgagctatgctcgcttgggagacccatcctccttgaaggtgagtgaaatctcaacacgagtatggttctgagagtagctctgtaactctgaggatggtctctggagaccatgactgtgtacagttcacatggtaaccagaagactatgacatacttcagaaggtggtgaggtcatagaacacaagctttaaagtaagtgaatcatgtgtgcctcatttatttttaaaagcaacttctgagaagggcttagaacaaattttttcccggagtgccatttcccaaaggtactcacagaacaatcaggtgtgaccataatggctgcactgagttgtctcttggacagtgtcagaagggacataaagaaggtggacagagaactaaggcaactgagatgcatcgacgaatttagcacacggtg

SEQ ID NO: 40909 - DNA, 2300 bp, Homo sapien
gcctctctaggcaggggcgggggacgaggggcaaggagtgggcgaggggtgggcgaggggcggggggcgtcactcaatcaggtggcctctggagttccccggggcagggcagagggaacacgctgccggggattgtgtacacgctccactgacaccagcttcacgctgccgggcagtcgccgatcacgcgtggccccgcgagcccattggccggcgcctcacacacctttgccgttgattggccggcctcaggctccgcccccacccccgcccgcggcgcggggcaggctgagcggctacctgaatggggagggggcagacggcgctgagcgcggcggcggcgggagcggcgtcgagtgtctccgtgcgcccgtctgtggccaagcagccagcagcctagcagccagtcagcttgccgccggcggccaagcagccaaccatgctcaacttcggtgcctctctccagcagactgcggtaagtcatttggggatgcccctgtgcttcctcgcctggtcttgtctggggggccaaagggggcgcgaaccccgagccccggacatcagccatgcctgagaattggggctgcagcggagtcgtggggaaggaaagggcttcctgcctgcagactatgggcattagtgagggcgtgtgtgttcgggagggggtcgaaccagggggctgggatcttcagacagggacaggggtcttgctctagatgtactgaggggaagggacaactccgcatggagacccgagagggctggtgaggaggaggatgacgagcgggggaggagtggggagggggccgttgccctgcagcgaggttggggtacagtgtggaacgagagtcgcgggagggacaagggggctaccctcacctggtaccgaggagagatgcccggtctggctcaggaacgcgagccaggggaggaaggggctgctcgcaagcactcgggaggcggggtgtccacaggagaggcgagtgggctacccatcctgggggtctgaacccacgcttggaagacgggggctgctcagcagatagctcggggctgggggaaggggcgcctgtcgtcggagcggggggatgacacgagggcccgccgacagccctgggggacgagttgctcccccagacgtctggagggggactcttaccccaggggcaggtggccgccttctgacgactccttggaagaggcggggagccgcctctggggcaggagggtgggaagcgggacccagcagctggggcgggaaggtgggcggggggagctgggccgcgagacgcgggggccgcgcgtctggagccggggcctgtgggggctgcacgtctgggaacccgtggagacgcgcggcgggaggggcctggagctgccggaagccacggggagggggcgccgcgtctacagggagagacggggtggtctgaggtcccgtgggccgcgtgggcgggaagtgccgagggctcggccgggttcccgggggctgccggcgggaggagggcggcggccgggtttccgcggggacctggctcctcctcccgcatctgaggcggaggccgggggtgggccgggagcgggtgcgcccggggagcttctcgtccccgagtgacccagccccggcctccgccaggggcgggagcgaggcccggccccgctgtcggttcctaagggaacggcggctcgcggggagctggaaggggcgggcgcctcccggagcctggcgcccgcagccccgcccctccccgcgggcccggcgcgcacggccgggcggttggcggcggcgcccgcggcccctcccccgggtcgggcgcgggcgggggcccgcaagctcaggaagtaggggaaaggtgacggcgcggcaattcccagttcacgtttcctgcgcctcccggagcagccgctgatcacgctttgttcacatgcctcgccccctcctcgcccacgcccccgccccgggccgcacagccaatccgggctcgggccgccgagccggccggccaatggcgggggcaggggcgcggggacgtgcgagcggcgaggaatgttcccagtgactcacccgtgagcctcattgaggttagggcggccccatccgtcggtctccgccagctaggatctcccccgccgtccgcccccgcccctcgtctgcctcccccgcccgcgcctccgcccgcgcttccctttcctgcctcgcgccccactccctttcctcccctccctgtttcccttcctgtccttcccagctcacgctctctttccctgccgcctgcctttcttttttcctttttttgcat

SEQ ID NO: 40910 - DNA, 2300 bp, Homo sapien
agcccggcaaacatgtttctctgaatctctaggaattgtgccaccaccacactgttcctcctaccccttttctcttttctttcctgttttgaatcactctcacaagtcaagaccgctccctgcttcttagcccgctggggagccaggccagcaggccccacattcctgaggaagggacagggttctggcctggagggtctagcagaagccaccccaggggagggcccgacaggaaggaaggtaggcctgccggaggggcatacaggagcttcctctcccgccacagtgtccagggccaactgctccagccctcaggctgggtcaacaggatgggacagcccaggcggaaggaaacctgtggggagggacaccccgcagacagaagcagggacatggggtggggagaggcaggaagagctgccgggctgctgagctggcgcctctccagcagactcaggaggggcggtgacaggaggccattccctcctcatccccgcagccctgggcctctctggtcctggccaacagtattactatcattattattgctgttgttcgctagcctgggccttagatacattagaaaaaaaccatcggaagatacgcatagcattggcagtttctaaaagaattaattcccttcctgtgttcattctgtgattactgggatagaaatgctatttgcattaccagcctttcattcagttacagagacgtgagtgctcgaaggagagacagtgatttttgccttaaattcagcctgtccaaatcggataagatctccgatttgctttaagccccgttatcactgccttcctctccaacaacagctgctgtgatcacgcacaaacggccaaacgggggcaaatccgtgccaaagcagggccatgggctttcctgatcagaaggcctagccccagcccccaggcgcagcacacgggcggcttcctttcagaaacccagcctgcctcccaccagctggagtgggtgggtggggcggtagtggtgccagtttcagggaacggccggcaaacccacctccaggcgtgctccagcgggagcctggagaccctaggagagccctccccacaagcggcttccaggcaggacgcttccagaggtcttggtccaggggtgggggtgaggtggggtctacctttgaaacagctacaatttaaacttcagctacaccgagctcaaactcgattccgcagccgagtgtcggcgccagagaaggataaaaactcgggtctacggctccccaccacgcccctggtccggtcctctgggcttccaggagtcctcacgccatcctctgggttgcccaggaggaaggatgggcggggcgggcaggcgctgcgggcgctgcagatggggagggcgagcccgcggcacggcgtgagcgggggagaggcgcgcgagcaggtgtcggctccgtgacagggtcccccatcccgcgccccagtgctccccgaggcttagtgaggcaaaacccagcaaatgcttcagaaatgcagctcagtcggtcaccgggttctgcttcctcatcagacgcgcaagaggatggcgcttccaatgcaaatctcttggctccggccccttggctggcagccgccgcgtcccccgcctgcctggcgtcccgcccactccgtggcgggctgagacgaggcccggcgcggaggggacggggcggagcgggcatccctccccaccccccacgtggggctggccctccgcagtgcctgggcgcgctgcagtcgccgcgcctccccggccgcggcaccgcctctctaggcaggggcgggggacgaggggcaaggagtgggcgaggggtgggcgaggggcggggggcgtcactcaatcaggtggcctctggagttccccggggcagggcagagggaacacgctgccggggattgtgtacacgctccactgacaccagcttcacgctgccgggcagtcgccgatcacgcgtggccccgcgagcccattggccggcgcctcacacacctttgccgttgattggccggcctcaggctccgcccccacccccgcccgcggcgcggggcaggctgagcggctacctgaatggggagggggcagacggcgctgagcgcggcggcggcgggagcggcgtcgagtgtctccgtgcgcccgtctgtggccaagcagccagcagcctagcagccagtcagcttgccgccggcggccaagcagccaaccatgctcaacttcggtgcctctctccagcagactgcggtaagtcatttggggatgcccctgtgcttcctcgcctggtc

SEQ ID NO: 40911 - DNA, 2300 bp, Homo sapien
cactaacgagtggcaaggatggagtgcttgcctcccagtgggctgctgggtggagaggaaagccgaataaagcaaagcctctcaaagcaggcaaagcatggtaaaggctgtagtggaagtgccaagggtcaagttaactcatgagaaaagcttcataaaggtggcaatccagctgggcccaagccaaaagcgtaagtaatcagaattagaaacggtggaggagtcaacccctactgagacagttcgggttctcagcctgaaggaaaatgtggaagttggaggttgtggagtttgtggcttaagccacagccccctcctacacctggccttagctcccaggatacctgccccccactgggccaggccacggacttcccaaagggcaaccacataaagcacaggaccttccaccactcacactttccagacctatccctggccactatttcttccctctgatgtcacagggctctgcatcttgtcccacctcagcaaaattagaccccctggtttcccaagagatgtcatttttaactcttttctacaggcgcctggagcacagggcttcccagaagtctgattcaatgctattttgagctgggttagattggcagaaatgaaccacccacccttggaaaagtcacacttgggaaaagactgccccagcagaggtggactgggagctctttctcagcatgagtttgaatgggggtcatatggagcaaggagacgctcacatagtttctgcaaagctgtgctgacaaatagctctggacagatccagaccggttctgttcacccagctgttatgccgcttctgcctgcaagatgagaaagacacctccccttcccaggttggcatcatttattgaaccatggctttggaaagaacaacaagttcaaatcccggaaagaagctgagcgtgaattccagccggaggcccaccaatgacagccctgtcttgctatcctggggggcatggcatgggtgggcggggtgcgatggggtggagggaaggaaatccaagcacctgtggatgcttactgccttactctgtcctcctggctccacgtcacccttccttcctgcctgacgtgatcagggaaatctgcggggttaaagaagcttctagaagccacttagtccccctgcaggtagatgctttttttaagggtctcttgctcactttgagcattctagaaccacagatgcagcctctcagagtggttacccagcaccaactcaggggcagaccatagtgcccagccttgttacagcgaggaaggtgactctcaatggactggggctcttgaattcctttaccctcagacatacatccttccaaccccatcatcccacgatggtgacagggtctgtggtcaagggagggggtcaggttaggtcagtgcagttcttcaagtcggaccccaagcaggcagcaccagtccccaagagtagggctcggccagagctgctcccatcaaagggaactgggtggggccctgttatccagacacaaatatctgctgggcccctgggacccagggtgtccaaaggtggttcttttcctccctcagaaacttggcccagggcctttcccagcaagtgcctccccctcctcccgccctcgggttcccttcccagccacccactcagtgagggcttcagcacgtggctgtgtggggcggcgggtttcctctccgccccggcagctctgcagagggtggttttcgccctctcttctcccccatcccccgtgacttcttgtaaaaggctccggcgtccccacccacctccgccctcccgcggctgccagaccggtgcccgcccccgcctcccccggaggccgcgctctctccccgcccctggcagcgggctctgcttcggaaactgttgactcagagggtggccgggcggccagcgtctgatgtcagcctggagctgggccagggagtgcagggcgggcggcgctgggagcgagggaggaagggtgcggggccgggccgggctgggtgggcgcccgcggcaggcgtaggggctgcgctcggcgctcccggctgcgcgctcggcctcggcggcggcccgggcgcccgtgactcagggtgcgtcaccggagcagatgcccggggcggttggaggctcccgggctcccgctgactcatcagaaaggcctgccgcgcggcccggggggcgggggaacgtgggggaccgcggggagctgccgggcaggcggcagccgaggtcgtttgaggcgcgcagagccggaaaaccccacggagacggctgggcgggggcgggg

SEQ ID NO: 40912 - DNA, 2300 bp, Homo sapien
tacagtctgtttccgataaataaaacaaaatcttcaactgtgtaacactaaagtcacattgccttttgagtctaggtggtttgtgttccactcctttctgggtgaagacatgcactatgatttagaagatatgtgtagtagaggccatctgtatgcaaagagaaaagtttctccggatgtctgagtaggaactgagacttttcaggttagctttaacttaatgcaaatgccagtaaagaccagaactagttcgttgcttgttcctaggccaggtttatcctcattatgaaagcctgctgccgtaattacttgcatcacacctttttcctctcaggatggatgcgattcataggatttactcacaactcaaatgtagaagactaatttttgttttacattttgattcctgccaatttaagtttctactattactgtgtttcttttctttttttgagatggagtcttgctctgtcacccaggctggagtgcggtggtgcaatctccactcactgcaacttctgcctctcaggttcaagcaattctcctgcctcagcctcgagtagctggcacaggtgtgcgccaccatgcctggctaatttttgtatttttagtagagatggcatttcaccatgttggccaggctggtctcaaactcctgacttcaggtgatctgcctgcctcagcctcctgaattgttgggattacaggcgtgagccactgtgcctggcctgtgctttaatactataaggttacattaaaattaaatcaactaaaaggcagcaatacaaaaccttctctgatgcccaaccaaaagtccaacttacaaggacaaaagagaatggtcaagtacatgctaaagagatcttaataccaagctatcaaccactggcagtatctgccatttgcatccatgtgccaggcactttcaaggcctggtaaggttaagttctagtgtcttcatcctacagacaagaaaccaaggcccagagcaacttgtccaaatcagtataatcaatctaataggtaataagggtcgtttattgagccctgtgtgccagccagttctaagcaccttgtaactgttacatccttataaccttatgaagctgctacttttactaccatcattttctttcttttcttattagagatagggtcttactttgttgcccaggctggagtgcagtggtgtgatcgcggctcactgcagcctccacctcttgggcccaagcaatcctcccaccttggccttttgagtagctgggactaccagctaattttgaatttttttggagagacacaggtctccctacattgcccaggctagtcttgaactcctgagctcaagcaatcctctcacctcaaccttccaaagtgctggcatttacgagcataaaccactgtgcctggccttaccacgattttccatctgggaaaaccgaagcacaaaagggttaggtgactagcctatgttcatacagacagtaaatggcagaggcaggatttgagtcaagcagactggaggcaaggtctacacctttaaccaccaccctatactagtgcattgcctgaataattaagtaaatctttgaatttaaagttactccccaaaatattaagtcacccagttaactaaagtgttcaaagaacaaagagatgatgcttttcatttcagcagagttcagaagacttcttaaggccaagacaggttaggaaactaaaatatatactctaaaaagaagaaaaaaggaattaagcaatgtgtggcttctctaacccagtatttccatttaatggtattaatgcccatatttacttggaataaatctagcttaatttgtcaatctattcatttagtccgggttttaaattgttaggaggctagtgaactgaagtgtctagaaaaggctgtcctggaaacagtgctcacatatatactggactttaccaaaatttcactgttctatatataacttccagcattttttagcagaatcaattttctttctaataaagcaagattgttaatacacataaagctgatatgtaaaattttacctctatttcagatagaagccaaagtaaaacatgaggaataaaaacatttatctatgtattcagaatcacacacaagttacctttacagttcaatttactatatagaaatcattgggttttatatttgcagttaacttttgaactgagattacaatattataacaaaaaactttacattaattcagaactttttagcataccaaattgaaatacataggttcaaatttcagatttatggcaaa

SEQ ID NO: 40913 - DNA, 2300 bp, Homo sapien
tccaagttccaattttttgttttgtttttttttttttttttgagacgcagtttcactcttgttgcccagactggagagtgcaatggtgtgatctcggctcactgcaacttccgcctcccaggttctagagattctcctgcctcagcttcctgagtagctggattacagccatgtgccaccatgcccagctaattttgtagttttagtagagccgggttttctccatgttggtcaggctggtctcgaattcccgacctcaggtaatccgccctcctcggcctcccaaagtgctgggaatacaggtgtaagccactgcgcccagcctccaatgtcttcttgatgtcaccctaatctaccgtttcaatctcatttgcaaccatgcccctatgctggaaccagaaaggctattcacaattctctaaacccacccacttctgtgccttctctcatccgtttcccttgcctggaacactggaacatctactctcaaaatcaccaaacaggcgagtttggtgaaaaaggaagcacctttgtctagaaaggcttttctcaaaatcactctttacctttccccagcagcctttctctcacttagctgcaatcatctcttccctccacttggtccttgcagcattttatttgtatcagccaacaatttattttgtattgctgtcttatttcccctgctagattgtaagcaaggtttcaaatattgtattcatctctagtttttcttcctccaccagagagggtctagtgaatggctgtgttttcaaatgttctgaatagaacagaactttgaagaaataaaagacagagccaagatatagccgagcaaaataaggaaaaacaaaatcaggaatgcgtccacagctcctgattctaccgaatactctctcatacagcctcgcaagataccctgcttttccacacaggaaggtcgctttcttcctttcacatttgatgatttattaatcaaccacagtgctgctcaaagtacacagagggttcggaagaatgaaagggaaaaaagtcagggtcttaatatcaaagatcttaacttcagaggggtgtgtcaacacatattccatttgtgctatgtgttgcgaagcgtagcagcacgagagaactcggggtctctgatcatgatcattagtgctgaggcatctaaaaaagatgaaaataaattaaaagctatgtaggtaatcttagaacccctagtaaaaaaaagtctgttgtggagtagaaaaattaaaacgaccgcgaaaatgagacctaggggattgaagtaatgtgcgcttgtaacatcagtaatcccctctccaacgcgggtcctgcttgggactgactccaccaatccttttaaaaatgaagacataaaagccatattcctttaaaaaatttccactgcaccgtattgcaacgttcgagcactgaggacattttcacgtggtcacaaccctttttaacacccggacactgggccggtcctttctggccacgaggaactcgcttccctaaaggagtaccgcatcaccgagggcgggcgcctcagcccgggaggacactccccagggtaaactacaggcctcacaaagcggagggagctggacgcgaaggctcggcagcggcgccgacaggcttaccccaggcccactctaggccgcacagggttcgcgccacctccggcccaggacagctctcagacgctgccagcgtggagctcgacccggctcacaatgcgctgggccccgcagcgtgagcgcaggcgcccgagaggcggcgggggtcgggcggacggcgcgctccagccgagccgcctccctctctcggcccacacccgcgcggccgcccttcgcctgccggggagctgcgggtggctggagggcgggaagcgaccggccagtctgcacctgcatgacccggtcgcgcgccgacccctcccctctctctcccgggctcagtcctccttcctcttccgtccccctcccttttctccgggctgcaaccgggttccgccccgctcgcgcggctgcccggccagctgtgatgtcaccaggccacgccccctaatataaatactggcgtcgctggcgccgccttctcacactttcaggctctgatcgcggccgcagtttttccttttttcttctgccgtcgccttctctgcctcttctcatcctttctcgctctgctgctctgcagtgtgacgagtccgaatcctcttcccacccagcccgcgcctttcttcttttgcctgcgctgttctatttctccttcggccgccgccgccactgctg

SEQ ID NO: 40914 - DNA, 2300 bp, Homo sapien
caccgtgcttggccttaccttattttctaagaactgatgaccataagtaagttttggcacacaccactttgtatgcttcgtctctcatcccacatgtccgtggagataaacctcattgacatggaacctcagaggcagcttgcagaaggaataatacatcacaacaagatggcaacactctttaagagctgcatttccagtcctctggctttgtttcagtggggctgcttttaggttgattgaataactagcagcaacgatagcacctaaattattagttaatgaaagtctgtaatttgctaggcatgtgctaaccagtttacataaatcatctgaaagcctcacaataactttgaaaggctaggttttccctttcacagatgaagaagttgaatatttgatttatttattcattaaggaagagatttttaaataaaaataatttttttgtagagatggggattccctatgttccccagactggtctcgaactcctgggctcaagctatcctcctgcctcagccgccaaaaatgctgagattacaggtgtgagccaccatgcccaactaaggaacaaattttaatgggtgcttcttatgtgaaaaacatgggattagacactggggatagaaaaccgaatgacacatagtccttgctgttaggaaatatatggtctgttgggaaatctggcagatccacagacaattacaatcctgaggtaaaccttgggaagggttagaaaatacagaagatgggctgggtgcagtggctcacacctgtaatcctagcactttgagaggccaaggcaggcatattgcctgagctcaggagttcaaaaccagcctaggcaacacggtgaaaccctgtctctactaaaatacaaaaaattagccaggcgtggcagtgtgcacctgtagtcccagctactcaggaggctgaggcaggagaatcgcttgaaccctgaaggtggaggttgcagtgagccaagataacgccactgcattccagcctggatggcagagcaagactccatctccaaaaaaaaaaaaaaaaaaaaaccacggaatatgacacctgaccagactgaggtttgcataggaggtgaggatagaagctgtattagtccattttcacactactatgaagaaatacctgagactgggtaatttataaaggaaagaggtttaattgactcacagttctgcattgctagggaggcctcaggaaacttacaatcatggtagaaggcaaaagagaagcaggcaccttcttcacagggcagcaggacagggagtgcaagccagggaaatgccagacgtttataaaaccatcagatctcatgagactcactatcacgagaacagcgtgggggaaactgcccctatggtccaattacctccacctggtcccacccttgacacgtggggattatgggtattgggattacaattcaagataagattttgggtgtagacacagccaaaccaaatcagaagcctcaggtcttttcttaaacctagttaatctgaagtctgtcccctaccttccccaacccccacaccagattaacaaacctagagcaattcctccaaatctccataagtactttcctgccctcagttaactaagctagtaaataccaatgcccaaggaccatgtgaatcttaacaggaccctcccacagacaacatgtactgaagctgggaggaccatatagtttatcacaaaaatgaagacacttttgagactgaaaggggccctattaacaattattccaggataacaggtataaactaggtatgtcctagcaacctgggacacaggtttaggttaagtataacctaaaggaaggcctgtaacgaaaagactcaggctgaatgctaaccagtggggaaaacactgggggcagtagttccttgatgtccctcaatcctctccactaagcagtgacatgggcttaaatctggggcctactttccctaagctcagggaagcactgcctgacagtggatgtgggggtgggggatggttgctctagcaacaatcacagaggtccctttggaattgttaccagggtgaactcaccagccaggggaataccccagaaagagctgccagtaggaggagggccagcctcactggtgattggagtccagcagtcccactgattgggagtgctgagccaagcccatgtcgtgcttcgctgatgcatggctgggctgaagaaagagctctttgaatttttcatagaaaagactggtgcccaaaaggccagggctcgagaatgaggctgcctcaag

SEQ ID NO: 40915 - DNA, 2300 bp, Homo sapien
tgagatggggtcttgctctgttgcccaggctggagtgtatggtgcaattttagctcactgcagcctcgaactcctgggctcaaggggtcctcccacctcagcctcccgagtagctgggactataggcatgcaccaccatgcccagctatgtttcctaaatttttaagtgagatacattaaacctcataaaaattagagctaacatttattgaacactctgttgtactgcctcccaagtataacatggtaattaaaacactggaggccaggcacgatggctcacccctgtaatcccagcactttgggagggccaagtgggcagatcacttgacctcaggacttggagaccagcttggccaacatgaggaaaacccgtctctactaaaaatacaaaaattagttgggtgtgatggtgcacgcctgtagtcccagctacttaggagggcaaggcacaagaatcgcttgaacccgggaggtggagtttgcagtgagctgagatcgcaccactgctctccaacctgggcgacagggcgagactccatctcaaaaaaaaccccaaaactaaaaaaaaaaccccaaatgttggaaagttgcgcgaggtataattcagtttagaaattaagaatccaagacaaaaagtctgcctcaggaccacacacaagcacgaagaaaccaagatagttcaagcatggaccttaaaactgcactgtctaaggctgttgtcactggtctcatgtggctatttaaattttaattaaagtgaaataaattttaaaattcagttactaagtcacactaaccatatttcaagtgctcaatggctccatgtagctagtgggtactgtacagacagcacaggataacatttgcatcatggcagaaagttttagtggacctaaccaaaaaaaaaatgcctttaggctcatttcgtgatggcagataaaagcctctggaattctgataagtttctgaagccatgttatagaactggttattgtaattgcatgaacttcatccaaaactggtgaaagcgtcaggttggggatagtctggtggttgttactttctgtccaacctaatactgaggctctgagaaattctgtggtgaatttctgtagggggacacagcagaaaaggcatagtataggtcagaaaacctgggtcctataatacatagtaataatgacgaccatttactggttgtttcctatgtaccaggcactgtgctaaccacaggcttcatttaatcctcacaatacctgtgtaaggtattattaccaccactttgcatgtgaacaggctgaaattcagaggagtaaggtcacacaactagtaagtaggagagcctggattcaacacctggtatctattcccttgcgctgaacaactccgtgccctcactttcttcatctgtagatctaaaaggattaaattagaacatctcaaaatttctactacttctaaaactctgtgttctaaattaggacattactatctatctccccaagctaatgaaataagcagggttcctgggaggagcttgttacctatttttctccaaaggagatgctttcccctgtctatgcctctgtcctaaaacctttggtttcccactatctaatgtggtttcaactatctatgaggcgctttcgtggcaaggagtgattctctccagtaggcaatcctaagaacgagcgcagtgcttggcgcacagtaaatgctccatggaccatttatgaaattaagtctaagtggacttcaggaaaatgtgaatctgctaaaatgaactactagccagtatactaggtagaaaacccagctgacgaagaaaaccccaagtggagaagcccttgtagggggttggagacaatttctgacccgcagaaacctgcagtggcgctgacgtttacaagtggtggacaaaacgccacttgcaacactggaagaagcggaaaaccccacccactctggaacaacagcgatcagccccgaatatagggtccccttgccgccccgtagcctcctagtcccgcccctctcccaaggcccggcagtggcagcggctgcggctgcgcagtggcgcgggcgtaggcggagcagcgcgcgccgcggtcagctgactgctgggctggcacgtgacttgttctgtgttcgcttgggtagaggaagccgtgaggccggagcttaggtcgggaagggatggatcgctgagccgatagcgtccgctaggctgtctgcctcggtacctgttactgctgctacttcctcgtttgacaccttcctgggtcagtgagcgatgg

SEQ ID NO: 40916 - DNA, 2300 bp, Homo sapien
tgcacattgaagaccaacccttaaaatgaaatttgttcaaattccagtggcaaaatcagagaggaaaatgttctatcagagagaggaaatatttcccaccatgtctgcagcccttaatccgtgaggtcaacatgcccagctgcatggtcttctggcagaagtgttattgcagtcatccacagcatgcttctaggggcaggacttaattgaatttaacagcagctaaatgctcagctaaaaagagaagttatgggctgggtgcagtggctcacgcctgtaatcccagcactttgggaggccgaggtgggcgggtaatgaggtcaggagttcgagaccagcctggccaacatagtgaaaccccatctttactaaaaatacaaaaaattagctaggcatggtggcgggcacctgtaattccagctactcgggaggctgaggcaggagaatcgcttgaacccaggaggcggagattgtagtgagccgagatcatgccattgcactccagcccgggtgacagtgcaggattctgtcaaaaaaaaaaaaaagagaagttatggaaaactgtgatgctgcagtgaaatgaaatcaggctgctatgtgtcaggctgcgatgtggggccctgtgtcctgagtcacacaccaaaacaggaaatcccctattctcatcttgaaaaatttattagtaaaataaagtaaataagaccaagaaaaataaggctgctattatttgaatcatttagtgaaaaagaaaagctttctagaaccaacagaacatggtaatgaacactctgcccccatacttatcagtctgtattggcattttctgtgtaacatacctttctttcctactagaaacagtttctctagttcaggatctatgtcttatttatcaactcccaaaactgtcccttctttgaattcctttgatacttaatacccaagtcactcatttggcatttatgttaccttgtatggtctattgtatttctattctgtttatacatagtgactcttgaactagactataaactccttcgaggtagaagtcttgctttgaacattttgtgtccccatttgttatttgttgaaaacaaggcatgccaaggaaggtgctaagggctggatatgggataagagaccctggtctacctttggggattcacaatctggggaatttcctcaggcagggcacaaaacctatgagacaatcctgctttcctgctgaacttggacctgggacagggtggggatgggtgaggctggagctgctgcagcagcgtgcctccaatgcctataaatttcctgttggctctcatccgtctgggctgaattttctatcaaccaatagaaaatacagacaggtattatgaaagagggtgttaggaaatcccatgcaattattatacatgtcacaaatgtgtgggtgcatatgcacctgtgagtgtgtgacagacagagagggaggaagagcactaggaggaaatgccatctgaactgaatcttgaaagacaaacgggagttaacgaaagatgttcctgagagagtggcaggtctgtgcttgcatcctgatgtcagagtcagataaactccagaagcctcagggcctctgcactctatcccagtgcttccccaaactcctgttgagggcagactcttttagaatatgttaacgaatggatgtgcagaagaaaactatcttctgagaacaaaattgctctagtttctgcattgctggttttctctgaacctttaatatgctgataggcactcaacaacagaatcctttgttggcagagcacaaattaccctctgtctgttgaacagtttcagaaagtttatgaagcacttttcaatgaggtgtggagtaataaatgattcagcaacacttaagtcctgccaccctaggcctaactggttacactgtcatgaaaatttacaaattacatggtaccaaagacaatataaacacaatctattgggtaaacaattgcatgatggattactgtagacttatcaatagttatggcataattcagtctttatttttgcatatgaaaggctctcacgcaagcatttttctgtagctcattggaatacagtacagatggcctggatcagtgcaatgtgcaacaagaggactatatcgtctcagtaaaaaccttgaagagatgaacccatttcagagacccagcaagggatcacctgcatatacaggcatcagcagaaacaggaatttgggatttatcctggaggtagtggaagcttttggaggtcttaaccaggtgaatgcaatgattggg

SEQ ID NO: 40917 - DNA, 2300 bp, Homo sapien
gactgaactgaggatagaaagaggagtgggtgggtcaattccacccacaatcccactgccatgttcagtgcagaactccaaagactgagagaactctacattagaacctggccttttaagtttttatgaagataacttgtcaaggtatgaggacagcccatgtttcaattaaacttgctcacttggtttatagcttttacaatttagacatatgggcatgtgggtttctatttggccccaggatacccctccacttcacctcacgtttactctgtttcctgtgctcaccaagctctagctctttcagtttctttcgttttctagaactcccccaggacggtctaactcagacactctttctggtctgtctgctctttgggtggtgacatcacgaagtggctggttatgaaaggagcactgtgccgtagaactgaggaaagcacaggctctgctagagatgttaagtattctctctccctgaaagctggttcttctgaaatcaaaatattcaggggggaaggaaaagaggcacagggcatctgaattccaaaggactagggaagccaccacttcccggataactgcactccctccaccttacacctaaaacaaggttgaagagtcctgtcaaggccatctcaaaaggagaagcaaagcctgcagaggaggccagcctgagtcctggggtgcgaacgggtgctgcgctcagcatgaggaggaggagaccctggccacagttccatgaatctttgctcccttccacattatggattctggtgagtgcctgccagaggaatgtctgacagctctaccctcaactggatcatctttagcccaaattacaataatttaagtgaatcaaattactataaaaagatacttcattattaattcactggacatttactgagggcctactctgtgccaggcaatgctctgaacttgccctacctattggatgctacgtgctaaatgttatagacaatgtactctcgtacattctataaattatataggatataatgagtactatattctctatgctttacatgctatattaaacatcacaccctatagtctacatacaatggataatatacaaaatatattatatatgtattatgtctactagaacagtcttttgccacaataggaatttagtaaatatacattgaatgaatgaatgaatgaatatgatacttaataccatattctagcagagcttggtcattgaagagttattcttccaaacccttccctttcctacccccctcttgaaggctaagaagattttcatctttcaccacctgttctggattcttggaacaggtaaattcattggcctacgcaagtctgagctctaggtctgaacccgcatggacctgagggtgcaccgagaaaagaaaggctgacaactggatcccgggaatgtcaaggccaccctgggcttgaagggaccggccatgcctccaagccttgcccagagagggggttcaggatgctgcgtggttccaggtgatctattgctttctcgagtttaaagttcagaggatcatgaagtaccacagctggaaggggtgtaagtgacactgcctagcctaactctcttaaaaatcatagccctactcctgcctccccaaatcagatacgacaggcataggctctgactgttccttaagtcttagtggcaatactccctgaccagttttgcggggttgctcccagttccattgcttttgtaacaggtggccagaaagcctggggtcccgtgataagagtttcagttctttccaggatggatggaaagaaggaaggaaggatggatggatggatgaatgaatgagcgggtgagcggatggatggatggatggatggatggatggatagatgggccagagactgggaacggtaatgccggccagacgggtccgagcgcctcgggagccccagccctcctccggctgcggggccgctgctcctgctcccgggccgtcacggagccctgagggagggggcgggcgagcgggggccttggggcggccagggcgctgggagggaggactgggcggtggggaccggaggggagggagggccttggaggcggagaggagggacgggctgggagagggcccggactaggggcggcgggcaccgcaggagctccgcgcggctgcagcgcgggcgggagcggggacgcgatgtcgccgccgccgcctccttgcgggccggggctgcgcctccggggctgagccgccgccagagccgacagccgagcagccgctgggcgctcccgcggcgca

SEQ ID NO: 40918 - DNA, 2300 bp, Homo sapien
tacccacctctcccatcagaaaacaacttctgtaaacaggaaaaagtggcattctggcctcctatcacaacgcagccactgggggctgttaggtgtcccccagcagcttgggagtaaaatcatgagtaaagcactggcagggggtgggtgaggtggaagtgagggggcagagaagatgaaaggaatacagaatcctggccagtctcccagggtggctgaaacccaggagatctgtagctttcacggatgacccattctgactaaagatgaccagctcccagtctgaaaaacccacagaagtcaagccattcccaaaggccctagggaatgccagtacacccccaaagaaggccttgatttaatcttggtcttcagaaatatccctctcccctgaggctaacagaaattcccagggaattaaaatgaccctgcccatacaagcgtcttgccaatttcagggtgctgtcctggggctgaagtggagcttctcctctggaggatgcaggccttcaggaccacctctctggcagggctggcccatgtttggcagggtaccatgaatgagtgtgtctgtcccaggccccacctgttgcagtgaccagatctcatgatggatgggatatgaattagtatggcagagtaataaatcaaggagtgtcaggaaagttgtgaggaacatgtatgtacatatagagccatcccataataactctttcatacccatacatatgcatatacgcacatacacacacacaccatatactcccagtcaccacggcaaccatttcttaaagctgtacttacggggttttggttgttttttattattatttttttcatgctagatcttttcacccttatttcttcggagtacatctctggcctttgactctctgctgagaagtaccatacctccttgggaaaccctgtcacatctaacatttaccaggtccctctaaaaggctcatatctatcctcatgctgacactgaattcagccaacacaccatttggtgacttgctaaaagcattggcaatacaaaataaccattctgattgccactgtgagtcagaaaaactggagacaaatatagtgtaatgtattgtacagctttcacagacagtcctcaattttaaaataaaaccaagtcacaaagttaatgtggaaaaggagccagctttggtccttaaaaatggagaaacctattcttgattaaagtgacagctctatttagtaggcatggatttaagattcttaaccttgtaaaagtaattcgcatttccttcctcttccatatgttatacattatgcttcaaattaaccctattttccattttagatttcattattcaaaaatgccaataatatcagtgggtgaagaaacacttaaaacatttttatccaaatattgaccttgctttggacaacatccatgtaataagtagtgagattttttccttttaatgtcaccaatatgtttatgattaaaggtcagtctgtggcaacagtttgcatctctgcgctataattacttgttctgctaaaaaataaaaaaataaaataaaataaaatcctgacttatgacctgaccagacaattctttgcatctccttttatcagatttctgctggatgaggaatgacctaggcaagagtatttaatttatagtcaaaatccacatgtgtgccctgcctcctgcaaagcattgggacaccatagggtagggagagaagtcctttgctatggaacaactgctccaaaagtaacctaaagtgcagaactagcgatggggcggggtgcatttattttgacctaaactgggattctggtctttgaagcccgcgagtgggctcatttcctagagggagaaaaggggaagcgacaagaaagactccacccaggcgatcccaggcaggcgccttgtgtataaatccagggagagaggggcaccaggtggccaatggatgagaagtcacccggctgggtacgcaggtggccaggggatggcagatgggccaaagcggggcggaggcggccctgggcggatcagggggtgggtggctgagggatatgtgtgcggaggaggtgggctgtcctcccacccaccggtctcccgaccagcgagcaagctttggacaaggccaaagagcattgggctgctggaagctggggcatcggcgcagccttcggtaaggggctctggtcgaccccactccctgggcttgcatctgtccactgatcagtgggcaggtcctgcctctgcttcctcccagccacccccgccgcgccatcaattcctc

SEQ ID NO: 40919 - DNA, 2300 bp, Homo sapien
ctgagagtctcatttgactcacgtggctgacttccagagaccttctccagctctagaattctagtagtgaagccatttttgttgatttcacagtctggactctcctgaatctactggctctttcatttactcctacccacctctcccatcagaaaacaacttctgtaaacaggaaaaagtggcattctggcctcctatcacaacgcagccactgggggctgttaggtgtcccccagcagcttgggagtaaaatcatgagtaaagcactggcagggggtgggtgaggtggaagtgagggggcagagaagatgaaaggaatacagaatcctggccagtctcccagggtggctgaaacccaggagatctgtagctttcacggatgacccattctgactaaagatgaccagctcccagtctgaaaaacccacagaagtcaagccattcccaaaggccctagggaatgccagtacacccccaaagaaggccttgatttaatcttggtcttcagaaatatccctctcccctgaggctaacagaaattcccagggaattaaaatgaccctgcccatacaagcgtcttgccaatttcagggtgctgtcctggggctgaagtggagcttctcctctggaggatgcaggccttcaggaccacctctctggcagggctggcccatgtttggcagggtaccatgaatgagtgtgtctgtcccaggccccacctgttgcagtgaccagatctcatgatggatgggatatgaattagtatggcagagtaataaatcaaggagtgtcaggaaagttgtgaggaacatgtatgtacatatagagccatcccataataactctttcatacccatacatatgcatatacgcacatacacacacacaccatatactcccagtcaccacggcaaccatttcttaaagctgtacttacggggttttggttgttttttattattatttttttcatgctagatcttttcacccttatttcttcggagtacatctctggcctttgactctctgctgagaagtaccatacctccttgggaaaccctgtcacatctaacatttaccaggtccctctaaaaggctcatatctatcctcatgctgacactgaattcagccaacacaccatttggtgacttgctaaaagcattggcaatacaaaataaccattctgattgccactgtgagtcagaaaaactggagacaaatatagtgtaatgtattgtacagctttcacagacagtcctcaattttaaaataaaaccaagtcacaaagttaatgtggaaaaggagccagctttggtccttaaaaatggagaaacctattcttgattaaagtgacagctctatttagtaggcatggatttaagattcttaaccttgtaaaagtaattcgcatttccttcctcttccatatgttatacattatgcttcaaattaaccctattttccattttagatttcattattcaaaaatgccaataatatcagtgggtgaagaaacacttaaaacatttttatccaaatattgaccttgctttggacaacatccatgtaataagtagtgagattttttccttttaatgtcaccaatatgtttatgattaaaggtcagtctgtggcaacagtttgcatctctgcgctataattacttgttctgctaaaaaataaaaaaataaaataaaataaaatcctgacttatgacctgaccagacaattctttgcatctccttttatcagatttctgctggatgaggaatgacctaggcaagagtatttaatttatagtcaaaatccacatgtgtgccctgcctcctgcaaagcattgggacaccatagggtagggagagaagtcctttgctatggaacaactgctccaaaagtaacctaaagtgcagaactagcgatggggcggggtgcatttattttgacctaaactgggattctggtctttgaagcccgcgagtgggctcatttcctagagggagaaaaggggaagcgacaagaaagactccacccaggcgatcccaggcaggcgccttgtgtataaatccagggagagaggggcaccaggtggccaatggatgagaagtcacccggctgggtacgcaggtggccaggggatggcagatgggccaaagcggggcggaggcggccctgggcggatcagggggtgggtggctgagggatatgtgtgcggaggaggtgggctgtcctcccacccaccggtctcccgaccagcgagcaagctttggacaaggccaaagagcattgggctgctggaagc

SEQ ID NO: 40920 - DNA, 2300 bp, Homo sapien
aagaactgtgaaacaactacaaaagtataacatatgtgtaacaggaataccaggagaagaattagagaaaggaacagaagaaatatttgaagcaatagtgactgaaaatttccccaaattaatgtcagtcaccaacaatgttagaccaactctctaaaatctcttccagaagatagaagcagggggaatacttcctagcagcattgccctaataccaaaaccagacaaaaacattactagcaaagaaaactataaaccaatatatctcttgaacaaagatgtaaaaatcctcaacaaaatattagctagtagaatccagcaatgcataaaaagaattgtacagcataaccaagatttatcccaggtatgcaaggctggtccaatatttgaaaattcattcatgtaatctaccataccaatagactaaagaagaaaaatcacatgaccacatcaatagatgcagaaaatgcatttgacaaaatccagcacattttcatcataaaaactttcagcaaactagggacagagggggaactttctcacttgctaaagaacatctacaaaaaccctaaggtaacaatatacttaatgatgaggagcttacctatagaggaacaaaaataaagaatgacatccaacttctcagaaaccacgtagacaagaagagaggtggagtaaaagtgttcagagaaaaaaactaccaacctataattctgtaccttgcaaaattagcctttaaaagtaaaagtctgtttcttctacttttggtcaccactgtcccctagcatcagcccagaggaacaatgcaaagagaaagagaaggaaaatgaggaaaaccgtcagatagttccatatttacagatgaagaaactaaagaggatctgaataatttgctcaagttcacacagcaagtaaatgctggagctaggttttgaacccagggattttgaactccaaagtttgtgttcttaatctcgtaccattgggatgaaattgtacagtgaaagacaagcgatgatatagatgattgcctaagtattccaaatccatcctgacaaaaaaaaaatcattctagttcatcactgctcactatataattaaatacaatgaaaaataaaacaggctttatttacttctgtataaatcaacttactacaatttttccttccaaataatggaacaagtattcacttgaatttcaaaactatcgttttcaaatgatactttaaaagtatcgttttcaaacgatattttaaaaagtatcgtttttaaatgatacttttagtgatacttcactgcctggtagtcactagagcctgatcacaaaaagatctcattaagttcgtagaaactggagagaaatagtcttccaatgtagaaaattagaaatttaggggaaaatattcttcctacatagaaatttattctgcaatacatcaactatccagctcttaatgatgttaatatttcttcatcactacctgtctcccaacatcagtaagcttttgataaaactggggaggaattccccactccaaattcgtctttccccacagattccaaaactcttactctggttgttcagggttgtccttctaggtatggaaatatgacattccttttctgcaacaggatgatttatctgacaagaatagcctccatctacaagttactttgcatttttcaaagtacttctacaagttcatttgcttctcatactattctgcctgtttcataggagggccttacaggttaggtgtaaacacttgtaacgaacttggcactatttgacttacagccagtgctcaattaacgttaaccatcattacaactattgtcattcctatattgtgaggaaactatgccccttaaagattagggtaatttatctaatatctatgacagagttggtaccccaaactaggttgatttctacagcagttcaacttcctattagggtttgtatcaataaaactgtgggacccgccagggctggaatcccactgctacctgagcatccagttggtgaccaggctccccgaattaataaaagtatttgttgttgtttttatagcagttgtccaggaagtatctcctttcgaactcaagtcacttgggcaattggctttacaaagcaaattggctccgtttaaggattcttgactcctgaaatccgcaaggaagtgggttcttttagagccagcgccaagagcttcaaaaaatccttctaaggtgaacccctccggacccggatagcgagatggggctcagccttgcgcctcgggggtcgtaacagacgg

SEQ ID NO: 40921 - DNA, 2300 bp, Homo sapien
aaaatcacatgaccacatcaatagatgcagaaaatgcatttgacaaaatccagcacattttcatcataaaaactttcagcaaactagggacagagggggaactttctcacttgctaaagaacatctacaaaaaccctaaggtaacaatatacttaatgatgaggagcttacctatagaggaacaaaaataaagaatgacatccaacttctcagaaaccacgtagacaagaagagaggtggagtaaaagtgttcagagaaaaaaactaccaacctataattctgtaccttgcaaaattagcctttaaaagtaaaagtctgtttcttctacttttggtcaccactgtcccctagcatcagcccagaggaacaatgcaaagagaaagagaaggaaaatgaggaaaaccgtcagatagttccatatttacagatgaagaaactaaagaggatctgaataatttgctcaagttcacacagcaagtaaatgctggagctaggttttgaacccagggattttgaactccaaagtttgtgttcttaatctcgtaccattgggatgaaattgtacagtgaaagacaagcgatgatatagatgattgcctaagtattccaaatccatcctgacaaaaaaaaaatcattctagttcatcactgctcactatataattaaatacaatgaaaaataaaacaggctttatttacttctgtataaatcaacttactacaatttttccttccaaataatggaacaagtattcacttgaatttcaaaactatcgttttcaaatgatactttaaaagtatcgttttcaaacgatattttaaaaagtatcgtttttaaatgatacttttagtgatacttcactgcctggtagtcactagagcctgatcacaaaaagatctcattaagttcgtagaaactggagagaaatagtcttccaatgtagaaaattagaaatttaggggaaaatattcttcctacatagaaatttattctgcaatacatcaactatccagctcttaatgatgttaatatttcttcatcactacctgtctcccaacatcagtaagcttttgataaaactggggaggaattccccactccaaattcgtctttccccacagattccaaaactcttactctggttgttcagggttgtccttctaggtatggaaatatgacattccttttctgcaacaggatgatttatctgacaagaatagcctccatctacaagttactttgcatttttcaaagtacttctacaagttcatttgcttctcatactattctgcctgtttcataggagggccttacaggttaggtgtaaacacttgtaacgaacttggcactatttgacttacagccagtgctcaattaacgttaaccatcattacaactattgtcattcctatattgtgaggaaactatgccccttaaagattagggtaatttatctaatatctatgacagagttggtaccccaaactaggttgatttctacagcagttcaacttcctattagggtttgtatcaataaaactgtgggacccgccagggctggaatcccactgctacctgagcatccagttggtgaccaggctccccgaattaataaaagtatttgttgttgtttttatagcagttgtccaggaagtatctcctttcgaactcaagtcacttgggcaattggctttacaaagcaaattggctccgtttaaggattcttgactcctgaaatccgcaaggaagtgggttcttttagagccagcgccaagagcttcaaaaaatccttctaaggtgaacccctccggacccggatagcgagatggggctcagccttgcgcctcgggggtcgtaacagacggcaaggtggaggtggcttcccggccccgcagccggacctcggcaccccgagcccgttcaccggggccgggtcctggcgggccgcggagtgaggccgggcggcgcagcgcaggcggtgcccgggcgcagggccagtcccgccgccgccgccgccgccgccgccgccgccgccgcgagcccggacctgcccgcccgacctggcggcgcagtctcgcgggatcgctcagctctcgctccccgtgcggctctcgaggcagctccagtcccggacgcaaccccggagccgtctcaggtccctggggggaacggtgggttagacggggacgggaagggacagcggccttcgaccgccccccgaggtgaggcttccacggctgggactgggcaggggccgggcgggtgccgggggaagcggggagggcctcgaggggcgag

SEQ ID NO: 40922 - DNA, 2300 bp, Homo sapien
ttcttttaacaagtatcttataaagaacatataagtgctatgcttagaaaacaaagtcactttttagtgactttgtgatagccttaaaatacagtctacagcaacaaaatattctgataatttatttatttcagaaaaactgtaccaagtgaatattacaactacttataaaaacttgtaaatttcttcagttttagtccaggcaataaatattacatgttcagtgaagtagaaaaatattcagaattcgcatttctagaagaactatcatacttgattcaggaaagcaaaatattttctaggtacaaggtatttagaaatcatgtgtaaccatacttcattatataaaatgaaccctattcaaacgaatctactaaacagggccgcaaaggtacacaaaacataagtcagtagagggatttaattttcaaaaggacttttcaaaacacaacttgtacacaacttgaagaaatcggctctgtttaaaaatagacttatttttactagtttattctagaacagagcataaactactattcaataaacgtatgaagcactactcacctccatttccaccgcggcaatactctggtcataatgacccatcagattagggaaaaacgtcatgttgtaggccattttcatacatctgggaacagtaattggttcacaggtgaagagactgtgccctcttaggaggggtagaaaaatacacgtcaacaaaaatgtaaacatttccattttcttcaaattcctgattttaccacatggcttggatgaatcactctttgcatcctcagaagatccccatccaaagataaaatgttcaaattcctcatttcactattttactcattttcaggctttcctgaaaatgagtcctgggtcaattactgtaaaaacaaaaggagggtgtatcagcaacatttgtcataaactcaaatgtggagtcaaagtgcagagttaagattttcaccccaggtaacaaacactggaaaaacaacggaaaattctgtcctaacgagatactcttccacctgccttagcatggaatatatcatttgctaaggaagctgcacctctaggaaaccgatgctaggaggttggtgctgtatggaagacagggttaaaaagagggaatggcaagagtaagatggaggaaaaaaggaaagctggtgattcggagtaaattataaaggattaatataagcatacaatctaagggcccctgttggaaagcttattaagtacaagaaaactaaggccctgggaaattccttaagacccaaagagttcttaaacttgtaaaagactctgaagagtcagtttttgtggcagtcttctgggtatgtagttttctcgattttcgtaaggccaactagagggagacttttaggattcctccagtggaggagcaacattgcagttttcactggctaggagggtgtagtgctgccgtcgaaaggaaagtgcgcaaatctgtcccgggggaagggcgaaggcagtccccttgcgggaggaaggctgtaggccccggattacgaattacccgcgccccaacacacactgatgcccggtccgccagcgccccacacccgggaacctgccccaggcctagagccagacagcagcgttcctggcctgcgcggcgccgcggggccccggcatcgcctttcagagccggttcccgcttccgaggaaactcaggtgcgggccgtcccgccgttgcctccccagcacctgcggctcccggcgcgcctcatcccagccgcggcccctcgcccctcgaggccctccccgcttcccccggcacccgcccggcccctgcccagtcccagccgtggaagcctcacctcggggggcggtcgaaggccgctgtcccttcccgtccccgtctaacccaccgttccccccagggacctgagacggctccggggttgcgtccgggactggagctgcctcgagagccgcacggggagcgagagctgagcgatcccgcgagactgcgccgccaggtcgggcgggcaggtccgggctcgcggcggcggcggcggcggcggcggcggcggcggcgggactggccctgcgcccgggcaccgcctgcgctgcgccgcccggcctcactccgcggcccgccaggacccggccccggtgaacgggctcggggtgccgaggtccggctgcggggccgggaagccacctccaccttgccgtctgttacgacccccgaggcgcaaggctgagccccatctcgctatccgggtccggaggggttcaccttagaaggattttttgaagct

SEQ ID NO: 40923 - DNA, 2300 bp, Homo sapien
agagacaggtaactaaggcacctaaggcaatctttagtgtcactgtactcctcccaagtggtttcttttaacaagtatcttataaagaacatataagtgctatgcttagaaaacaaagtcactttttagtgactttgtgatagccttaaaatacagtctacagcaacaaaatattctgataatttatttatttcagaaaaactgtaccaagtgaatattacaactacttataaaaacttgtaaatttcttcagttttagtccaggcaataaatattacatgttcagtgaagtagaaaaatattcagaattcgcatttctagaagaactatcatacttgattcaggaaagcaaaatattttctaggtacaaggtatttagaaatcatgtgtaaccatacttcattatataaaatgaaccctattcaaacgaatctactaaacagggccgcaaaggtacacaaaacataagtcagtagagggatttaattttcaaaaggacttttcaaaacacaacttgtacacaacttgaagaaatcggctctgtttaaaaatagacttatttttactagtttattctagaacagagcataaactactattcaataaacgtatgaagcactactcacctccatttccaccgcggcaatactctggtcataatgacccatcagattagggaaaaacgtcatgttgtaggccattttcatacatctgggaacagtaattggttcacaggtgaagagactgtgccctcttaggaggggtagaaaaatacacgtcaacaaaaatgtaaacatttccattttcttcaaattcctgattttaccacatggcttggatgaatcactctttgcatcctcagaagatccccatccaaagataaaatgttcaaattcctcatttcactattttactcattttcaggctttcctgaaaatgagtcctgggtcaattactgtaaaaacaaaaggagggtgtatcagcaacatttgtcataaactcaaatgtggagtcaaagtgcagagttaagattttcaccccaggtaacaaacactggaaaaacaacggaaaattctgtcctaacgagatactcttccacctgccttagcatggaatatatcatttgctaaggaagctgcacctctaggaaaccgatgctaggaggttggtgctgtatggaagacagggttaaaaagagggaatggcaagagtaagatggaggaaaaaaggaaagctggtgattcggagtaaattataaaggattaatataagcatacaatctaagggcccctgttggaaagcttattaagtacaagaaaactaaggccctgggaaattccttaagacccaaagagttcttaaacttgtaaaagactctgaagagtcagtttttgtggcagtcttctgggtatgtagttttctcgattttcgtaaggccaactagagggagacttttaggattcctccagtggaggagcaacattgcagttttcactggctaggagggtgtagtgctgccgtcgaaaggaaagtgcgcaaatctgtcccgggggaagggcgaaggcagtccccttgcgggaggaaggctgtaggccccggattacgaattacccgcgccccaacacacactgatgcccggtccgccagcgccccacacccgggaacctgccccaggcctagagccagacagcagcgttcctggcctgcgcggcgccgcggggccccggcatcgcctttcagagccggttcccgcttccgaggaaactcaggtgcgggccgtcccgccgttgcctccccagcacctgcggctcccggcgcgcctcatcccagccgcggcccctcgcccctcgaggccctccccgcttcccccggcacccgcccggcccctgcccagtcccagccgtggaagcctcacctcggggggcggtcgaaggccgctgtcccttcccgtccccgtctaacccaccgttccccccagggacctgagacggctccggggttgcgtccgggactggagctgcctcgagagccgcacggggagcgagagctgagcgatcccgcgagactgcgccgccaggtcgggcgggcaggtccgggctcgcggcggcggcggcggcggcggcggcggcggcggcgggactggccctgcgcccgggcaccgcctgcgctgcgccgcccggcctcactccgcggcccgccaggacccggccccggtgaacgggctcggggtgccgaggtccggctgcggggccgggaagccacctccaccttgccgtctgttacgacccccgaggcgcaag

SEQ ID NO: 40924 - DNA, 2300 bp, Homo sapien
tgtgtgggagtctaagtctcttcgtaggtctctaagaacttactttatgaacctgggtgctcctgtattgggtgcatatatatatttaggatagttagctcttcttgttgcagtgatccctttaccattatataatgtccttctttgtcttttctgatctttgttggtttaaagtctgttttatcagagactaggattgcaaccccatacagggccagtttcatgggcatatgacctgtgctgtcacacagggccaggcacttagaaggaccccacacgtgatttaatgctccattgacaccattttgcaattctgaataattttttaacaaaagctcctgcattttcattttgcactgggtggggcaaattatataaccagccctggctttacagttcatttggatttttgctgcttctagaaaaacaagtgaaatttacctttagttagttaccagcccaggactgggcatttgcagaactgccgcgacctgcttccctgctagactgctccctctctttaacatccatcagctggactcaccaactccggaaaacctgcatgggtctatagggagacccctgctgagctgaatttgacttcacagtattaccatccgtcacaacctcgtgttgttatgggtgtggcaagacttctgttatgcctgattccagccagttatatataaaagatctcctgctccaacctggccctacgtggtgggtagcctgggccctgagaatgttttcttctacaatggacaggccaaaggaggacagagggggttacaaaaagataatatccatcagaggcaaagagtactcaaaagtgaacttctaccatttccactggatattgattaacttccctgagcctcagtttcctcattcgtttatgagagtagcccaggaggcatctacccctcccaacccgccaggattgctgagaggacagagtacgcgtgcaaggttttgcaatgtgccagagcttagtaagtgttagcacttatgaaaacagcgtttatatatcatttgggtcatgggactcttggaaaacctgatgatacctatggtttcttcctgcctccgccccacccccaccttccagcctccaaaaatgtcacctccaaaaaacaaataaggcagggcgcggtggctcacgcctgtaatcccagcactttgggaggccgaggcgggcggatcacaaggtcaggagatctagactatcctggctaacacggtgaaaccccgtctctactaaaaatataaaaaattagccggggccgggcgcggtggctcacgcctgtaatcccagcactttgggaggccgaggcgggtggatcacgaggtcaggagatcgagaccatcctggctaacacggtgaaaccccgtctctactaaaaatacaaaaaattagccgggcgtgatggcgggcgcctgtagtcccagctactcgggaggctgaggcaggagaatggcgtgaacccgggaagcggagcttgcagtgagccgagatcgcgccactgcactccagcctgggcgacagagcgagactccgtctcaaaaaaaaaaaaaaaaaaaaaaaaaaaaaaattagccgggcgtggtggcgggtgcctgcagtcccagctgctctggaggctgaggcaggagaatggcgtgaacccgggaggcggagcttgcagtgagcctagatggcgccactgcactccagcctgggcgacagagcgagactctgtctcaaaaacaaacaaacaaacaaaaaacaaataagactcgccgacccatgccatagattgacgacccttgaaggtggctcgtgtacccaggttaagccacgtgtctctaaaatgttcatttaggcggcgctgtgttacctgcgggaatccccgacctgcggctcctgaccacgggccaccccgcccagaccctgcaggcgggctctccacgagggtctgcgcagccccgcgggggtcctgacaggccgagcgactgcagtaggagggggcgggcccggctctcggtccgcccccacgccgggctcggggtgggggctcggggcctattacgggatggaagctccgggtgtcgcgggggcgggaggaattaagggagggagagaggcgcgcgggtgaaaggcgcattgatgcagcctgcggcggcctcggagcgcggcggagccagacgctgaccacgttcctctcctcggtctcctccgcctccagctccgcgctgcccggcagccgggagccatgcgaccccagggccccgccgcctccccgcagcggctccgcggcctc

SEQ ID NO: 40925 - DNA, 2300 bp, Homo sapien
aacccgccaggattgctgagaggacagagtacgcgtgcaaggttttgcaatgtgccagagcttagtaagtgttagcacttatgaaaacagcgtttatatatcatttgggtcatgggactcttggaaaacctgatgatacctatggtttcttcctgcctccgccccacccccaccttccagcctccaaaaatgtcacctccaaaaaacaaataaggcagggcgcggtggctcacgcctgtaatcccagcactttgggaggccgaggcgggcggatcacaaggtcaggagatctagactatcctggctaacacggtgaaaccccgtctctactaaaaatataaaaaattagccggggccgggcgcggtggctcacgcctgtaatcccagcactttgggaggccgaggcgggtggatcacgaggtcaggagatcgagaccatcctggctaacacggtgaaaccccgtctctactaaaaatacaaaaaattagccgggcgtgatggcgggcgcctgtagtcccagctactcgggaggctgaggcaggagaatggcgtgaacccgggaagcggagcttgcagtgagccgagatcgcgccactgcactccagcctgggcgacagagcgagactccgtctcaaaaaaaaaaaaaaaaaaaaaaaaaaaaaaattagccgggcgtggtggcgggtgcctgcagtcccagctgctctggaggctgaggcaggagaatggcgtgaacccgggaggcggagcttgcagtgagcctagatggcgccactgcactccagcctgggcgacagagcgagactctgtctcaaaaacaaacaaacaaacaaaaaacaaataagactcgccgacccatgccatagattgacgacccttgaaggtggctcgtgtacccaggttaagccacgtgtctctaaaatgttcatttaggcggcgctgtgttacctgcgggaatccccgacctgcggctcctgaccacgggccaccccgcccagaccctgcaggcgggctctccacgagggtctgcgcagccccgcgggggtcctgacaggccgagcgactgcagtaggagggggcgggcccggctctcggtccgcccccacgccgggctcggggtgggggctcggggcctattacgggatggaagctccgggtgtcgcgggggcgggaggaattaagggagggagagaggcgcgcgggtgaaaggcgcattgatgcagcctgcggcggcctcggagcgcggcggagccagacgctgaccacgttcctctcctcggtctcctccgcctccagctccgcgctgcccggcagccgggagccatgcgaccccagggccccgccgcctccccgcagcggctccgcggcctcctgctgctcctgctgctgcagctgcccgcgccgtcgagcgcctctgagatccccaaggggaagcaaaaggcgcagctccggcagagggaggtggtggacctggtgagtccgagggagccgagccgggaccgccgcgctggtggaggggacctggccgcgcgccccacgggcagggcgtcagtctggctgttgggggtgtctgtctgtacagctgtgtgtcgtgtgtcttgctgcgccggggtgtcatgctttttatttacaggtgaagaaggacctggttatgcgtgcagtgagtcttggaactcagaggggagaccaaaatgggaggccatcgtggagcggacatgcgatatgggcccggtgggtctccccgaagtacagggagtcccccaataatttctggccccagggggaccccttgggaagggtgggagggatagggcggcagtgagagtaggatgaggagcttgggtacgtccgaagtggacctgggaaaaaccctggcctcgctgatcacatggacctgggcctgggccagggcggtgcaacgtgtcctttgttggggctggtggccacgtctgcctgcgagagagaataacaacccccacaaagcatccgtccaactctttgtaacttgaagactatgagtcacgttgggtcatcttcctagggagtatgggctgcaatttactttgttggacaaccacagctggggctaggaatggttcagaaggtttaaggccggaaagggaaatgaaggggcccggcgctaaccctctaaggacctgttttgcttctgtttaaaccaaatgggcagtctgtcattacacacaccctgggtcttcatatgtggccgccaggtaggagcatcacagtcaagctacgggagaaaacagtttccaggaaactggaaatgaacggcccgagt

SEQ ID NO: 40926 - DNA, 2300 bp, Homo sapien
ttaggatcaacccacaataaggcagccccctttcccacatgtaagttctctaaatatcttgaggtttttttctctcccgagctaaactagttcctccagtcatttttcatatgaagtaatttctaatctttctaccactctggacacctctgagttccaatttatacttgaactcacagaaaaattccaggtttggtttaatagcacatgcattcagaattaacccccacaccctgtcatcattagattttaactttattaaatgagtttaattacatggaagcataaaaattatagtatgttactcagcactgatgttgataatcaataaatttttatttcgttattcatcttcttaagttttcctcctatcaccatttcacagctacactgtgagctttattattacaaagtcctgcttccactcctggatctttaatttaggcctccaatccaaactcaatccttttatctgtcacctcagccccactagtctcctaatactcttcccaattcatcaagactattaatcttctcaggtaccaagaattccctttcctcaggaatgatatgcttcaaagcactgtctaaactcatcaggccaaccacactattcttcaatgatcacctcgactatcacctcttctgctcctagataaaatgctactgaagacagacagcaagtcatacaggcctgcacctgcaggcaagtctaaaattcttccaatgttcaaaccattgtataacaggtacttatagaggtaatacggtgaggggttaagtgccagagggttccagagttagattacctgggtttaaatcccagatccatctttacaaacttgtgacttgggcaagttagtcaacttctgttatcctcatctgtatagcagatatcataaactcacaggattgttcctgtgaatagatttacaggataataaatgagataatgcatctaaagcatagttcactgccttgctcctagtaaatactcgataaagattacttgtcaataacataattatttgtgcatgcatcataaaacttcatgacattatatgtctttgtggtgttttttctagagataatactccataattttcgatgattttccttcatagaacgggttcttgcttcctctccagctgtcaaaatattagcccttctatgggaaaccccaagccccaatcttccactgaaccttaaagatacacatggccatcagtaatgtagaattttcttaacggtttacctgtatttatattttgtttttgtatttcttgattttatgttgtctagaattaccttttatatgactaagtctaacgcctacaattaaattctaagttccctgaaggcaagaactttattagatacttctgtagcccatacagcagtctacaaatattaagagaatataaatcaagtgaactgaattgcctaatgctaaaataaacaacttctgtagatttaattctcaaggctgaacttaacttgtaataactttatttggaaactattttctgcaatttcagttatcaaagatcatctttgaaactctttccagactttagtgttgagtttaacttctaaaatgctttgttaatttcaacatactcaattcatctaatacacttaaaatagtatttcgattctagctattttttcacagaaacttgtaccattctacaaatgccaaaaaacaaacattcaagagaattctattctaaatctactcccaaccattcgctgaagattacgccctatcccaatactagtcgagctgccaaaccacgtgggtatgctaagatttcaaagttcctccaagagtgaatgatttgcacgtgtgaggactaaaccttaaaatgtgacaatcccttctttattttacaaatcaggctttgaatcccatcttctctgccaatgaggatgttttttctcagacttctctacatacatgccccctctcttagtcttgaggagcggggaagatcgcaggccgacccctccaccaagcaccatttcctcaaatctagttcaggttagccaacgcggacagcaacgctcccttcaacgctcctcctccccctagaacggaaaagacggaggagatccagttcgggctgacagtgagaggatgcagcccggtgtctgggcgggctcttaccggcgaagcggatcttcacgaggtcgagcggatgcagcgcaaggttggataagacgccgccgctcacgcccgctatcaggttctcataccggacgtggcggaataccgtgctccacgccgacgacccgga

SEQ ID NO: 40927 - DNA, 2300 bp, Homo sapien
gacagcaagtcatacaggcctgcacctgcaggcaagtctaaaattcttccaatgttcaaaccattgtataacaggtacttatagaggtaatacggtgaggggttaagtgccagagggttccagagttagattacctgggtttaaatcccagatccatctttacaaacttgtgacttgggcaagttagtcaacttctgttatcctcatctgtatagcagatatcataaactcacaggattgttcctgtgaatagatttacaggataataaatgagataatgcatctaaagcatagttcactgccttgctcctagtaaatactcgataaagattacttgtcaataacataattatttgtgcatgcatcataaaacttcatgacattatatgtctttgtggtgttttttctagagataatactccataattttcgatgattttccttcatagaacgggttcttgcttcctctccagctgtcaaaatattagcccttctatgggaaaccccaagccccaatcttccactgaaccttaaagatacacatggccatcagtaatgtagaattttcttaacggtttacctgtatttatattttgtttttgtatttcttgattttatgttgtctagaattaccttttatatgactaagtctaacgcctacaattaaattctaagttccctgaaggcaagaactttattagatacttctgtagcccatacagcagtctacaaatattaagagaatataaatcaagtgaactgaattgcctaatgctaaaataaacaacttctgtagatttaattctcaaggctgaacttaacttgtaataactttatttggaaactattttctgcaatttcagttatcaaagatcatctttgaaactctttccagactttagtgttgagtttaacttctaaaatgctttgttaatttcaacatactcaattcatctaatacacttaaaatagtatttcgattctagctattttttcacagaaacttgtaccattctacaaatgccaaaaaacaaacattcaagagaattctattctaaatctactcccaaccattcgctgaagattacgccctatcccaatactagtcgagctgccaaaccacgtgggtatgctaagatttcaaagttcctccaagagtgaatgatttgcacgtgtgaggactaaaccttaaaatgtgacaatcccttctttattttacaaatcaggctttgaatcccatcttctctgccaatgaggatgttttttctcagacttctctacatacatgccccctctcttagtcttgaggagcggggaagatcgcaggccgacccctccaccaagcaccatttcctcaaatctagttcaggttagccaacgcggacagcaacgctcccttcaacgctcctcctccccctagaacggaaaagacggaggagatccagttcgggctgacagtgagaggatgcagcccggtgtctgggcgggctcttaccggcgaagcggatcttcacgaggtcgagcggatgcagcgcaaggttggataagacgccgccgctcacgcccgctatcaggttctcataccggacgtggcggaataccgtgctccacgccgacgacccggacgccgactggccctggcccgtcataggctcggggcccgtcgacaccacggcgcccagggccgcggaggtgggacgcgatgcagtggccgccaccgtggcgacggtcgccccttgtgagcgcaaccccacctccgggaccaacgagaggactcttatgcccaaggcgcgtgagcgaagccggagactctagtactgagggggcaagaacggggcacagacactacgtcacgccggcggaaagcgcgatggaggggaggtcccagcctctcccgagtctccgccctgcctcgcccacaaatgctccagcccacggacgcggaagcgactgcacagctaaagaaccgccccttgctaacgtttgccggcaaaactacggagcggcgcaggatccagttgagccagcaggccgccgctccgcgagtcacgtgactggaagtagtctgggaaaagcggaagtcgcctgtgggaggaggtggcggtgggcggaactcctagcggacacctcgtggagtccggccggaagagcaaccgagatgaaggtgaagatgctgagccggaatccggacaattatgtccgcgaaaccaagttggacttacagagaggtaagataagttggtagggagaaagggacggtttccgcaagtcgttgggtctagcctcggctttcgcggagt

SEQ ID NO: 40928 - DNA, 2300 bp, Homo sapien
ggttgcatactggaatcaattccccactttgcaaagtttcgtggttaacagatgtgatttcaatcactgtaaacctcttaaagagtgggactggttcagttaatatggtactgtgcaaagtgcagaatgcctgtacttcacaaagaaagcatacccaaaatgataatgtccataattggccacgtttatttaatatatttaattttcagtctcatccatcagttttgcaaagattatttttgaagtctagaaaatttctatctactctgatgtcagcagctgttcctacaactaaaattagcattttaataatttcaacagaagtttaaaaaccccaacaagatagatcattttgtttctaaatctcttcatgtaggcaaaaatgaatctttatagatggagaaactgacatttattaaagcaactatgtgctaggtgctgtcttaacagtgcatacacgaacatgattcttcccctttttggaggctaagtctgatgggaaagactattaaccaaaataataatcatgagacaatgtgataaacactgtgaagaagtgatagaatcacagaagacgggtgctgaagggggcggggctcatgcaggaggtaagcaggaacagattactgttcggtgaaagtcttccagagaaagcggctaaactgggtaagggtgtgtgccacaggaggccttaaaaaagatgactgaaacgcactgagatttgcaagggtgaatactaaaccacttgtgggaaacgtagtgactgactaaagtggcaaggaaggtgggaccagagattcaaggactgggaacgatgccaaatccaagtgacaaatctaatttatattttagaaacattactgccttgtgacaaactgtaaacatcttttgagcagagacttattagcaatgctcacacacatgttgataatatctcctactcaaccaaaatagtgaaatactgttttcgcctcatctcatctcgcttactcctcattcaaactaatgacacagcccttctttctatgccttaggttcattcctgcctgaagacctttgctcctgttattctctttatttagaacaatctgcttacgcatggttggtcccttgtcatttaggtatcacaaagtacaatttataagtggttagcatgttaacgggggaacagaccaggaaggataaattaatttcatttaaccattctttcatcaaacttcttaagggatggtaagagaaaactgatgcttttaaattcatctttgtctcttccaacatccacaactaatgtgaagtagtaaagcggcaagaagagcagtaggaaggttttaaaagcctgtttaactctcagcccttcaacccacgagtttggctcattcaagtccacttttcagtaataggaacctgaagacaatcccagagcagcagctggaatttttctccactatagacaactgtttcccactcaccactagaggaaattcttagaaaaaggacttgaacagactttacttgctatccatccagttccgcagcgactccgtaagcacaaagtttgccttagcgaaaggtaactgagaaagaaccagaccagagtgccagcctcccccggctttactccgcgaaagccgaggctagacccaacgacttgcggaaaccgtccctttctccctaccaacttatcttacctctctgtaagtccaacttggtttcgcggacataattgtccggattccggctcagcatcttcaccttcatctcggttgctcttccggccggactccacgaggtgtccgctaggagttccgcccaccgccacctcctcccacaggcgacttccgcttttcccagactacttccagtcacgtgactcgcggagcggcggcctgctggctcaactggatcctgcgccgctccgtagttttgccggcaaacgttagcaaggggcggttctttagctgtgcagtcgcttccgcgtccgtgggctggagcatttgtgggcgaggcagggcggagactcgggagaggctgggacctcccctccatcgcgctttccgccggcgtgacgtagtgtctgtgccccgttcttgccccctcagtactagagtctccggcttcgctcacgcgccttgggcataagagtcctctcgttggtcccggaggtggggttgcgctcacaaggggcgaccgtcgccacggtggcggccactgcatcgcgtcccacctccgcggccctgggcgccgtggtgtcgacgggccccgagcctatgacgggccagggccagtcggcgtccgggtcg

SEQ ID NO: 40929 - DNA, 2300 bp, Homo sapien
gtgtggaaggctgggtggggtgcgcacacacgctcacttgtgtacgtacacacacacacacacacacacacacacaggcacacacacccgagctcagtcacccacattgcttgcccagggcgcctggaagagctggcgagcccgcccagctctgttcacccggccccgccccgccccctccgggagggctctccgggcggcgcccagccccgagcagagcaaaggacggcggcggccacctccgttctccggccgctggtttctcgtctttcctcgtcctttcattgaacccatctccgtgcttcgaaaatctgactctaacccgatctcttcgcgtctccgcctcttctttctagagtgagcgccaaaaagggcctgacagacagaagcctttggccccagcaccggcccagcccgtctctagacgattcttgctcctttcaccctcacagcctccagtggtcgcttcatcttcgcaccctcccggccaaccctaactctcctcgtctctcctcgcgctgtctcgcgtcctcccctcaggatccttccgcacattctcagcgtccagcgcggtttcccacaacttcctcacgccccgctcccctcgccctgtccccgccctcgacaccacctgcgttccccactcgctccaacctccctcccccgctatccccacttgtgggcctccagctctctgcccctttcctggcccccatccctgacaccccagggacccttcctccctcctcacgttctccctccttccaggatcccgccccgacacttcggggccctcccgctacgcgcactctttctcctcaggtcctgacacctgggcgccccctccctgtcacccaccttcagctccagccctgactctcgggcgccttgccacccttacgctccccgccccgccccggtccctcgggcgcccccactcgccgcctctacctccctacctgctacacctggcacccctgcccccacccctgctcatactcttcccccgcccccgacacctcgggcgccccctcacacgctcctattctccacacttccgtccccgaaaactcgggcgccctctcccttcacgctcagtctctcctccctccccgcccggccccggacccagcctggagatcgcgctcgggaggggcggctgccgcccgcggggcgcccgcggtgcccgggcctgggcagcgaggaggtgacgccgcccccgcgggatgagcccgggaggcggaggggcggaggaggtgctggcggcggcactgagcggcggcggcgcagggcgcgcgggccttccgcgccgactccatcgacccaaggggcggcggcggtggcggcggctgagcgaccctgggccgggcgcgtgatgaggaggggccggcgccagaccccgctgcacgtcggagctcgcctggatccgggcgttggcagccgaagggccctggccccgggactctccgccgctagcccccgtcatatcttctccgctttcgcttctccactctagccgggggtggggtgggtggggttggggtctccgcgggggtttccggccccgcggcccgctcccgggtgtgcctggaggagttctccctctgtggcgcgcgggagccctgtgatgcgtcagccggcgggacggatgagttgcttctccgggaaaccgtcctcgcttcctcacgaccctctcggctcccgcctgggtgcccctcgggccggcagtactccgcctccgggcgctcgaagcgagttccccgggggcttgttcgcaggcaccccttcccctccgaggcggcgcgcgcgctcccggccctgaccgcggccggacacactcgcgccccggtccgcctgtcgccctcccgcctgctccctccagtcaccccacccttagctgtccccgccaccttactccaccaccctcccccgcctctccgcgcactccgcgtcccggcctccagttcccctttcccttgaaccgctcacttcacagcccttcgcccccgggaagaagaaacatttcccgaagcgcactcctcagccctccttccccacgcgctcgccctcccctccccctgcttttcttgggggaggggggctgtcgccttggattgaaggccattgatttgtatgtatttgtcccagcgctggaggctgccccagccgccgcgccggtgccgccgctgccagtggagttgcctccccgcttccctagggtggttcggctccaccaaacatgtcggctcctgtcgggccccggggccgcctggctcccatcccggcggcctctcagccgc

SEQ ID NO: 40930 - DNA, 2300 bp, Homo sapien
agcacctcaggttgcttctgcttgaggtaaatggaagaagcccatttaaagttacttgcgagttaaaacatttgagatatttgctctaactaaaatacccttgattaggccactggcaggtagttttcctattcatctattgaaattggccattttacaataggtgtgcatttgtgtgtgtgtgtgcatgtgcacatgtatgcacatatgtaaaaaaatagaatcacagggaaggaacatagaaaatggagtccaaagcaaagacaaaagcaacaggaaaatcaaaatattttttctatcttttataaattgtgtgatgtttaattcaatacagcttcaggccaggcgcagtggctcacgcctgtaatcccagcactttgggaggccaagctgggtggatcacttgcggtcaggagtttgagaccagcctggccagtatggtgaaaccctgtctccactaaaaatacaaaattagctgggcgtggtggcacactcctgtaatcccagctactcaggaggctgaggcagaattgcttgaacctgggaggcagacgttgcagtgagcaccactacacttcagcctgggtgacaatgagtgagactctgtctccaaaaaaataaataattaattaatttaaaaataaataaataaagcatcagtttcttttcatccataaaatgatggtggcattagcacatacagtgttttctggatattaaaaaataaatttagaagtgctttataaactaaaaatactttatgatttttaggtatgtatgtgtgtttgacaaatagattggtgtatacctatgaaaatctgaaataataaataatagtgaaataataaaataaaataataaactgaaataaaatgggggcactcttagttgagaagaaacccataattgaacatcttattttaaaaaatggttgtttaaaaatttatattattacatgtttaatttgtgttgttcttttgtgacatgattatgccaaaaaagaattcatagcttttaaaaacttaatgtatttaaatgtctatttactgatagtgtatggaaagggataaaagggcaaagagttaaggtcaaaagggcaaaaagggctggatttattaaagaaatgtcaaaggttaagagctattaaaagtcaatgaaaatactaagcatctctgcaagtgagttaatatttaaaatttggtttacacactagttttagagatctgttatggaaagatggatgtacttgggtatagaataacctaaatgtttatcagaaacagaattattcactgagaatagatgatgatggggtggctttccaagaccataggagccttcaggaaacattttcttctacaaaatgctatgaccaccattattgaaataaattagtaataattgataaagtgtctctggccttgactgtagggtttttcccccacctggatttggagggaagttttaatttaatgtgtggtgtttaggtgaattttaattgaaaagctataatgtttttctaaaattatgtgaataaccatgtagtcactatgtatatagcctttagaaaggaccagattcaacattatccacttttctttaaaaataaataaatggagaaattttaaaataagaaattaaaacacctaagtacatgttttccaaatgtacttctcttagaaatatggcattttaaatgcagatgataaatgctctattgttgatcatatttttattgcttcatgacatcaaaagaagaatataccacttatttttagagtgttctggtcctttgcagcatcttgcacattgaagagatatatgctgttgctggagttgtttttcaggaaaagagaaaagggttggggaaatgcataatttctcttactcttacccagtagtagcattgagaagataccttgtccccatttttattacttctgatattttattgctggcagccagatgtgctaaaactcctgacgacagcatctattcattgcatgtttttaataggcttagagaaatatgagtagagtacatgaaagcagctcagcttcacacttcagctgggaatgcccaaaaagcttactgctgtttagaattcttgctacagtcaggagaaagccgaaagctgcacgggtactgaatcttctacgactgaattagaagaataatgactgtacaattaactatcaacctctgttcatttaagcacagtttttacagagctcaggagaaatatggaacttgattggcgtgtttttatttgatggtgtcagcaaatagatgattttaaa

SEQ ID NO: 40931 - DNA, 2300 bp, Homo sapien
agcaacctccttggttaagtatattcctaggtattttatgtgtggtgaatcacatgtattgacttgtgtatgttgaatcatcctttcatgcctggaatggaacctacttgattgtggtgagttatcttcttgatatgctattaagtttggtttgctagtatttgttgaggatttttgcatctcagttcattggagatattgatctctatctctttctttttgttgtgtcctttcctggctctgatatcagagtgatactggcttcatagcatgagtcaggtaggattccctccttaatcttttgatagtttcagtagtattggtaccagatcttctttgaatgtttagtagatttcacgtgtgaattcacctggtcttgagcttttttttttttgtttgaaaatttttttattgctgattcaatctcactactcattattgatcccctgaggggatcatcaattgtgcacgattttctagatgtttgagtatctaagaacctttgtcttttaaatacgagttgaaaatattgtcatgaataaaataaaaattaatttagcatctgattcacagaatctttttgttgttttgtattttaagatccaattgtaatcttaactggataataagattacaattattctcatgaaaaccttttagatcccaatttgggtcctcaaaaattcgaatgcatgggaagtagttacaaaagcaataaacaaaagaaaacatgttaagagtaaagagttaaaaatgaggaaaatagtactgaaaggagaataaacactctaaaaagaaagggagaaggaaattggagccctagaaagatcagtagagagtgaagggaaagcactagtggtattaaaggtgatacaaatgaaagtctggggtagatgaataagaggagctagaaacaagatgattgatagagaaaggcattggcaccagagtgtgcattacagttggaggaacaccaccaagagaactcactgagggggtaaaagtgaatggaaggaaaagtaaagaggaagaaggattgctattaactgcaatgtttctgaaattttcttgacttaagaataaaaataagctgtgggcaaatggatttttttttcagtttggtatgaactgtggggtctgtatggttgaaattactggttttacattcctatgaaaatgaattattttgaatttttattgcctttctctttgaataatctaccagtctttattagaaatctgagaggtaaaaaaatcacattctctgtccacatcttccccccaatcttttcaagacctacatttaattctaaaataaaatgatagaggtgaatacctatacaaatagtggaatggtactaccatatattcctagaccctcatttaaacttgctgtttgtgagatctaaaaacagcacagcactttttaatctttttctactcgtctaacactggccttttctcagttttatataaaagtatttggaaacatttaaatataactttcagagtagtaatattagtatccagataactggcttttgctaggaaggaatttgtgtggccttattaaaattctttttaattttttttaaatcactgaatgagcattgagatgttaattgataaattaaaatgagcaaaatttgatttaaacttagtgtctaaccaacttcttagttaatggagcacattactttttattaaatttgtacaaaaactgctgcttcttgaacctttggggaaacattgcctttttactgaagattaagaaacttgttagtgaataattgaaaagaagttacagaataggcctgttaaactattactatacattttatggtgaaagcttaagcagcacaattatcaataacaagcacatagttattttagaaatactgcaattcatataggagaaggtgatttataaatttctaaatccaccagttttaagcgtagtgcccagaaatgccttggatgcagcttgcatttggtgttcagtattgtgaggcactaatcagctaagtaccataatcctccttacagggtacattcttacttgacctggagctatatacagccacatagtaacagcattaaagaataacctttttcttaacaggcccatcactagaggattctatgactccatcctttgaatgagtgttgtttttgtgtaattttttagtaacttagttttgaaataaaacaattgtaaacaagtagagactttcaaatcatctgattaaggatggctcctatgattttgccagggctagaaggattaaatgaaagcactg

SEQ ID NO: 40932 - DNA, 2300 bp, Homo sapien
tttctttctctttctttctttctctttctttccttctttctttctttctttctttttctttctttctttcttctttctttctttcttctttctttctttcttctttctttttctttctttctttcgtgtatcaagtttactacctacctcctggccaaaccgggccacatggttaagcccagattcaaattgggtgggaactacaaagttacaaggcaaaggtcatgcatacagagaggtcattaattgggatctaccactgcagggtggtaaaagagaatgaaaactgatatggtggggaataccttagcatctactaagggagtaatcaggaagatatgagatatcctgtgaaggcttcccgaaggaaggagaggaagggaagaccatttcagttggaagaaggatacattatgggaataagtcattttactggagatatgaacacttatgtaaccaattcccaattgatagacatgtgggttgttctacatattctctattacaatcaatgctgatctgtgtatctagctatccagctggcatagagaggcatatggtggatttgtacacacacgtacacatacacatacacactgcacacacataccatgcaaatataagataaattcttggaatgactaattctagtagcttataaatttgtataggtattgtcaaatcagcctttttctttcactcccaagttgggaattgctggggactctcaaaaccatgtcactgactccatttttggttgtgggagctgggagcccctccatttcctcttcccagttctttcttctgcagctgcccccaggtttgttctccatgatccagcaacttctgtctccatcccccgttctcagaaggctccatctcctccttccccaagaaagttgcaactgccctcagctttcctccctccctcctcagggagtaccaacatctctctcttatctttattcttctttgtgaggctgatatgctaaatttcatctagttttccccaaactcaaaccactacctctctactgctgccttctccctctccatttccatccctagcactactacaaaggaaccccatccagtccagccggttggcttgctcctcccctcctcccactccagttcacgctccagcccactgaagagtggtgcccacccctaggcccctgcctaaatggctcttccagaaacaccagtgacttcccactcaccaaagtctggggccgtttcctcaagatcctgcccactccctgacccttccctcccttggggccaccatggctgcttctggatgactcaatcagacacccacattgcagtcccatccttcctgttcaaatgaaaacatctcatttcaacagctctcttcatcttcaggactaagtcagccccttacacaaaggactcatgagggacatgcagtctgtgtgcccagcctgagcccaagggtctattctgatcctttttttttttttaagataaaggtttttgcaggtataataggggtctccaacaaaaagtaaagaataattttgtagaaagattttgagactttcctaactctccgaaactacacaagctggtccttttgacttggaagctaaatttctaagatggaaagtcacatgtatgagtgggaggcatgaaaccaattattcgacctgtctggggtcatgagtgcagaggcggctcctacgaaccatctgcctcttcaagtgtggatgagaggtgggtatggcggatgcttgtcatttcccaatggctcgagtggatgtggggagtatgggagtgagggcaaaagagaaaagagggagagaggccgtccaagctttcacaactcactctcttgtgtttgaaaatatctgatttcattattttctataattaatttctagaacatctattctgaggaaaatgctagaaagaaatatgctattcatttgtatcagcattactctttgttgatattaaatggctcagtcactttatgggggaaataaagaggttgattcatggtgatgtgaccctctcgacacttctggttccctttttcctgctatatatcaagacctacagcccttgggaagtgcatttctgcattcgaagaagaatctgagagaaacctgtaagtaaactttcagaataatcttatttctaaaattgcttttaaaaaagtactagtaaattggaataaacaattgtgaccagagcatactttaaggccccctataccccgacagtctccctatgtatggaagtatcagaaagtcttttcatgttggtatctg

SEQ ID NO: 40933 - DNA, 2300 bp, Homo sapien
aattattttagtttcttagtatttttttctggtatcaaatttttaggcattttagtgcatcattgttttaaaaataccaataaatgatagttatcatgtgctgttttgagcactatctgccaagctctgtactaagtggtttatattcattattttacttaatccataaagcaagccaagtggtaggtattattgttcccattttacagaatagaaagctgagtctcagtaggattaagtaactttccctaggttaagcattaagtaaacctaagagccaggatttgtgataaggtctttttgattcccactgtaccactggacctctgtagagacaaaaaaaaaaaaataaaaggaagaaaatagtcatgaaacccaaatcatggagaaatgccttattcaaaaaatgttggtgtggaaaagatattaaataaaatggataaaatgaaatgaggtttgggaactgtctggagatggttccctatggcattaggcaaagacaacttacaggataaaaatatcacatgaaggttaagaaaaagaatcataaaaactctagatttttaaattcacatgaggttatcaaagtccttgctttggttttcatttcaaatattcagatttctttgtgagtggggataagagtttgagggcaagcaggaatagcaaatgctatttctttgcttatctgttgtccctaccaagaaaattaatcacttcctattctggactcccaaagcacagagtacagagtcacatcagcatttgtcagtccctgaactcagctggtctcctggctagagttagttccttcagagcagcatcttattcttttttgccagtacttggtacataggtggcatctggtaaatgaataaactgcacacagaaggagcaaaagctatagtttcagagatgcgtagaaggaaatttaactaaatttacccagcagattacccctgccttatttcaaatagtgggattatcttgtgagagcttgatttttatctatgattttattgcataataataaaatttgtcaacaccataccatgcagctattactgttactggatcttttgggaaatttcaaaggaaagagaagacgtttttatctgatttgacagctttggagaattgttaatttatgtattttaaaatgtagacagctgatcctaagggaaaatattgaatcagaagataagccatcaaactttatttgataaatataacataatagaatatatttcaacttcaacttcatataaaagttgtttaaggaaagaaaagcaaaagaaaagagggaggggaaaaatgtaagagcaacttggatgttcaagagaatcctgactgagcaaaactacatattattaattgtttacaaaaaatatatagctctttaagttaaaatggattacgtttcttgaatttttgtgtgtttagagtgttataagttccaacaaaatgtgaaagtacagacatttgttaagtcatctgtttttctctttttttttcagtaatagggaaccccaaccttttctggaaaatcaggatcacattgcattttatagagaaacaggaatagcttcatggagtgatgtatggtttcagaatactgctgccaaagcttttaaactgggttgtatctttgcaatgataagcataatttgccttgtagataagataaaattgagtggatggctgctttggtccttgagatgggtattctccatttctgaaataaccatttgtcaatgtctttctcaaggtggtagctcagagaaaataatttaagacatatcacttgccatataatcctaatttcttcaggttaatcactaccaatacaaggtaatacacatgctggagttggctcattttggctcacaagagacatatgtacgcatctgtgcccaactcttcattcagtggtgtcagtttggtagcttgaaaacagccagagaaggagtatttacaccacagaaataggcaggtgctttaagttagggctttaaggatggtgaggaaaaaggaaggtagagatagttgttaatatttaccaacacatcactacacacaggacactttctaagtactctttttcatgctttatctaatcaatcaacatccgttcagtaaatatttattgatcaccagttatgttccaagcacactttaattctttcaacaacccttggaggtaagtagtgatattcctatttcatatattaagaaatagaggctcagggagctcacatagttaccaagtggcagtgttgggactcaaacccaggtttgtc

SEQ ID NO: 40934 - DNA, 2300 bp, Homo sapien
cgtgggtcaaggaagagaaccacggaacccagcgactagtgttcagttagattaggacaaacccgggcacttagccatgcaggaacaatggcgagcctctagcctgaactggagcggcaatgggcgcctcgctggatcaggagcgcagcggactccctgctggattcagaggggtggaagtcagcggcgggtctgtgacggcagcaaacagcagtggtggatggtgagcaaaagctcagctcaagccgtaacaaacacagaccagaagagtgtgcagctgcaaaatttaatagagtgaaaacagagctcccatacaatgggagaggacccaaagggggttgccgctccctgctggaatgcttgggtttatatcctgatcattgtccctcctcctgtgctctcaggtgatatatgatttgactatttctttacctcctgcttttaacctaatttgtattttagtgagccctctttactacctgactggtagggtgtgagctgagatgcaagccccatgtttaaaggtaggtgtagtcaccttccccagctaggcttaggaattcttagtcagcctaggaaatccagctagtcctgtctctcaccatcagtttctccaaaacaagtgttctgagacttcaggcagaggatttcccaccaaagaaatgccagtgactgttaccagaataaggacaagaatatatgcctggtcagcagatgtccaccccacctccccatgacccttcataacccttttgcaagattccatcctgttgcccttcttaaaattctgcattcctgccttccatcacacagacctgtggtctcccttctctctgaccactctgtctcttcttcctcctcctcccctataagcaaagggatggtccaggattcagtgtaagcctatccctcatagcttaaccacagggagtgcattccttcatcctctctgtgcctttacacgctctgttcactctacctggagcactatgtcctcttcccaccactcacctctgcgtgttcacattctctgtatcctagttcaaatacctcttcacaaatcttccatatctgatgtctttaagccagaaataaactcactctttcctctaaattcttatctttatcccttctcaaagatagaatgttctgttttatatattgaaatatgaatgtgtgtcactgttggctgttagctacttgagggtggaaatgtggtttatctttcccacttagccctctagccaatccccctagtcaggtaagctttgtagtccttacaaagccagtatttaagtgaatttgcatggtgcttcccactttattagggtgtattcacagccatgatcatatttgcttctcaaagcaaatatggaaggcaagaacaagtattaatcaattttatatatgagaaaactgaggaaccaagagaataaaagatttaactgaagatctctaaactggttttgtggaaaagctgggagtagaaatttaaatctttagagttacagtaccggttattttccaagaaacacttgctggtatgtgttgtatcattaaactgtggagaatagttgacaccaagtcgttttctttcaaatacattaaatattttactctgatccttccctgtgtctgccaattactgggattatatgataatttgctcctcgcttaagaacatttaacaggaaacccagatcgagtggctctgttctggcttgggtgggtttgggtatttttgttgctgcttctagtgatggttcttgctttctttctccctctggatctgtcttttggtacaaacacacccccaaccaagggaaagggtgaggtggatttctttccctttagcacctaatcttatgatgaaaaacgcaggttcctttctcttaaaattccaagatctttcccttccaatgactccgaagcctgggtggatacctcaactcagggcgcagaacacttggggtctgagtgtgcaaggaccatgcggacctgttcaatcccggcctttgggctccagcccagccttcccggggggaggagccgcatatgcggccaggtcataaacccgtcaggccgccgggctccggatttgcagcctgaggcagagctcgggggctgtcggtggggaccttgcaggagggcaccccaagcccgcccggcccgcccaacccagcccctgcgcgcagcccgggccgagtaggaccccgcgcgcccctcgctatggcggcgccctcgcggctcctgatccgcgggggtcgcgtggtcaacgatgacttctcggaggtggccga

SEQ ID NO: 40935 - DNA, 2300 bp, Homo sapien
tggaacttaaaattaaaatattaaaaaaccaacctgttttttaaaacttctagcacttgggctttatgaacatttattataaaaatatcacttgctgttttatgtcttttaaagattataatttttctccttctctttccatctatttctactcacatcttcacagggaaatctgaggaaccaaattgtgcttgtgatcagtttcgttgtggtaatggaaagtgtataccagaagcctggaaatgtaataacatggatgaatgtggagatagttccgatgaagagatctgtgccaaagaagcaaatcctccaactgctgctgcttttcaaccctgtgcttacaaccagttccagtgtttatcccgttttaccaaagtttacacttgcctccccgaatctttaaaatgtgatgggaacattgactgccttgacctaggagatgagatagactgtgatgtgccaacatgtgggcaatggctaaaatatttttatggtacttttaattctcccaattatccagacttttatcctcctggaagcaattgcacctggttaatagacactggtgatcaccgtaaagtcattttacgcttcactgactttaaacttgatggtactggttatggtgattatgtcaaaatatatgatggattagaggagaatccacacaagcttttgcgtgtgttgacagcttttgattctcatgcacctcttacagttgtttcttcttctggacagataagggtacatttttgtgctgataaagtgaatgctgcaaggggatttaatgctacttaccaagtagatgggttctgtttgccatgggaaataccctgtggaggtaactgggggtgttatactgagcagcagcgttgtgatgggtattggcattgcccaaatggaagggatgaaaccaattgtaccatgtgccagaaggaagaatttccatgttcccgaaatggtgtctgttatcctcgttctgatcgctgcaactaccagaatcattgcccaaatggctcagatgaaaaaaactgctttttttgccaaccaggaaatttccattgtaaaaacaatcgttgtgtgtttgaaagttgggtgtgtgattctcaagatgactgtggtgatggcagcgatgaagaaaattgcccagtaatcgtgcctacaagagtcatcactgctgccgtcatagggagcctcatctgtggcctgttactcgtcatagcattgggatgtacttgtaagctttattctctgagaatgtttgaaagaaggtcagtatcaagacagaactattgggcctcaataaaagcaggcccaagtgtttgaaacaagttctttgatgattagcaatgtatttttgttttatattagtttagaaaatggataaagattgttgatgatgtataaaattagcgtgaaaaacccgagactcagaaggccagacacattacaaactaaatatttagagttatgagaaaaagcccatctatttaccagctcctgttttcagattaatctgttttataggaatattgtaagctgcagctctcagttttagtgttttaacctgtatttttctaaatacaaattcaaaaattccagttattctatatgctatgttcaaagcatacaggtaaatagaaaaatgaataaggcataatatcacaagcagtttacagttaggaggaaggaattggggcatggaataagatgacaaaagtataatactataaagagctatgaaacaaaatggtataaagtcaaaaatacgtaatctaatgagggagagaggcagaaaggctttaattggaggggtgccacttgaaatgtatgagtagaagaatatagataggggaaaaggtgttgttaaagcaataacctaggaaaatatatagaagtaggaatgtccagcattgctcaaaaagtaagcacatgattcagtttatctggagcccaggatgcgtatgaagggctaacaggagatacgattggaacacaagactaatgtcctgttgtagagttaagtgacaacagcacttcagagttctcagttcagtaagaaatggttaactgttaaagagtgaccttcagagtgagtagttttcagtttgatgcaggataaatgggacctggcagaagttaatggcagagatgtccctgtggagacaatgaccttcagtcccaggagaattacaaataatagatttaacaactttttacgtaacagatggctaataggtggcacacagatgcacagtatcgtaataaccattactgcatcttttcttttttttcctttt

SEQ ID NO: 40936 - DNA, 2300 bp, Homo sapien
ttagagaaagcaatcttaagaaacaagaaagtagagtttagaatcccaaaattaggaaagacaactgcaatttgtttagtgaaaaacactgaagttgcttctttccaacaagaatggaaaacatttttggagtgctggttgctttttttaccagatgatataagatttgttaattattagatttttgtaatacttattaatacatttttctcttatcttttggaatagcatttcctggttttaaaaaaaaaaacttaaaagggggcaaatcggcaggagactgaggaaaagcctaaatgtattccccagaaagtatgttttaaattttaacatttacttactgagaggtgaggccagctgaacttcctgggtccagtggggacttgaggaactttcctgtcttacaagaggattgtaaaatgcaccaatcagcgctctgtaaaatgcaccaatcagcactctgtaaaacgcaccaatcagcaggattccaaaagtagccaatcgcagggaggattgaaagaggggcactccgataggacagaaatggaacatgggaggggaccacaagggaataaaagctggccaccaccagccagcacctggggttctcttccatgctgtggaagctgtccttttgctcttcgcaataaaccttgctaccgctcactctttgagtccgtgccatctttaagagctgttaacagtcaccgggaaggtctgcagcttcattcttgaagtcagggagaccacgaaccccctggcaggcaccaactccgacacattactaggcgctaagcattgtgctagagagtttgctgtggtataggggcaacaatctttactttggaatgagaaaaactgtttcaaacaacttacttgccatgagtaatttaatttctctcttttctataaaacatgggtaatatttatctcacaaggatgtttgggattaaaaagtgacaacctatgtcaataggacagcatgatgcagtgtaggtcttcaatgaatagcatggagagtgcttgcaaagggcaacgataaaatctaatataaataagacgttgtagacaaacgctttaaaaacacagggggtaaggtctgatgtgccagcgtcactacagacgtacttagaaaagtgttctggggatctaagtaaaggaggactcccatttgctgggagtgagaaaagagctttagggaaactgcagcgtgatgggcgaatcctcctttcaatatatctaccctgaaagtcggctccagccctgccgaacatcctggcccagctgcacccgacccagcgtgagatgtcaaatgacctcttggcgcttccacgccagactggaggggctctgcacaagccttgcccgactcattccgggcaccttgagcgtgggagtccacactgccccttgaccgaccagctgccaggttggccgcactaacttgagcccacccccactcgaagctccgcgccgacagcaagtggagacttgggggtaccggatagaggaaggaactcccaagttgtcagcttcagaccatccacgcctcccccaacacggaaccaccttcagcctcccagctggtatcccaccccccctccccccacccgctgggccagagcccagccctcggacagcgaccgtgctcctccacacaccccgcgctccagcccctgggcatccagcagccggcgttcgcacgctctgtcatcgattggcgctgccttgctccttgggctcccgtcgcgtggaaatcggcccgaaacttggaaagtccagcggagcgcggggagggaaccgaggcaggcgggccaggggattgccgatcgcacggatgggcgcgcgctcagtctggcgagtggcggcgccggctagcccgagcggcgcgaggccggagtccggcgtccgccaccctctcgtctcgcgctggcgcgcgagctccttgcccttgcccccaggagggccgccccgcgtggggctctcgcaccgcccggggtgggagcaggcgagccggagggaggagggaggagggagcgcgcgcgggcggcggcggcccctcccttccccctcccgcagccgcggagagcgcagggagcagccggtggctcggcggcggcggcggcggcggcggcggcgtcggcgtcgtctacctccagcttctcctccctcctcctccgtctcctcctctctctctccatctgctgtggttatggcctgtcgctggagcacaaaagagtctccgcggtggaggtctgcgttgctcttgcttttcctcgctggggtgtacggtaagtgtc

SEQ ID NO: 40937 - DNA, 2300 bp, Homo sapien
agcctcctatggtaatagtactaatggtaatgtaataaaattcacaatttgtcttcagctttgtattaagattctcttggccatacctttcacaaggcaactctttacaccttccagaagatgtcctgttggggttataaatgacactgattacagtgcctcttacacactgagcatcttgcattatgctcaatcagcccaggctctgtgctgaccccagacccttttagagtatccagtttggtgtggttcacacaaataatagtcaaccaagcaaacggggacacaatttgagatcagaatggtccacttcacaacctcctgggggaaaagtcagcagtatctgggggactcatgtgaactgcagtggagtttattagtaaatactgattacataaagcagctagtcccactgcacttggatagaagctccttccaacccacatgggagaatatatttaatacttaccgtatatgaaactgtaagaaaataagctaacctcatacagtttaacttggccaaaataataactatgcaaatcacctcaaaatttgttctccttttggcttgcagttgccgatatactacacatacagtaattgaataagaataaaacaaaattttagaagctaaagaaccattaaatagttactgggtcttacccgcttgggaaattacagcaagatcaaatcttttattagtcgatcggtgcttccctgtggcagaagactaagagaatagaaaggtcacggggcagggtgggactacagaacttccccagactttcccaaaaagttagtatttttattagagatggttcgttttccacttacggctaatcagctagctaacgctcgctcctccttttcaagatgagaaaaatatctgcttgtctccaaatttgaatattttacaatttaaaatggaaactgtgggtgacagaacacgttgaggatccgactcagcacctcatccacgtgggcccagagcgggacggtccgtgtccgcagcggtctcctgggagccttgagagcaaagaaatggtcttctgagagcctgggcagatgagcggacttaactggccccaagacacacagttggcatttgtgatcatctggctctcgccgaggactttgccagtggcctaaccttcctgccaagaagctgggagggcgggggttgggggtgaggggagggggcggcataactgaaagcacaaagtttagggagagactgagatttctttgtgccccgctggactggcgaggcgtgagagaggagagttggggtccctcagagagggccgttggaagaagttgcctggaaggaggtggggcggggtgccctggcagctgcccagcgttgacgcggtgacaactgcagaaggtggccctcctccaagccgtccccacgcctcccctccaactcccacccacccctgcccccatcccccaccaccgcctggatcccccgcacttcgcccgaccaaggccggggccgtagtttgcatccggactggatttggatgcagccaatcctcctttggctgatggaatagtctcccctccccacagccccggcgcgcccctccctcgcgcgcctcgccgcctcccgccgcagaacaggagctgcgcggcccggagcggcggcggcggcgccggagtatccgtcccgcacgccggggcgaggggcgagcgagcgcgctcctcctcccgcgccctgcgcccccgcgctccccctctcctcgctgctcgctctcccgtccctccctccttctcttccttctttccgtgttatttttctcttctctttccccttttctctctccctgaccgttcgcttgtacattcccattctccccccgtcgctctcctctccccctcccctcctcactgtcacactctctgtgcccccgtctctcttctctcatttgcttgctcatctccgaacgtgaatccgcggctcccggaggagcccagcgcccggagcacctggagtccggccggcggcgggccgagcctggccagcggcggcggcggcggcggcggcggcgggagccgagggagcggcagccgcgaccgcgggcaccgcgggagccccagcggcagcagccgccgccgagatgtcccggcgaaagcaaagcaaaccccggcagatcaaacgtaagtttgcgcgcggggccgggagttggtgggattattgcccaggagcggggtgcgcgggacgggaaagcggtgggtgggtggcggggctaggggagatccgctcccggtcccctagatgtctcaaactttgcctg

SEQ ID NO: 40938 - DNA, 2300 bp, Homo sapien
gtttcacagctcagaagttacaaagccaggattcaaatctaggcagtctgtagcagactatacgagaccacttctcaaagaggtttaaaataataaaacaacacctctggcacaactgagcctgtggcccatgttttacatgcctcatgcatattttggaggaatcttatgcaaagtcatctttgacattcgtttctgcatggactctgggcaggttgtgaaggatgctgcttattatataatacagagtgctttctggaagaccatggatgttatttctgtctattcttagtagtggaaatatttgggcttctcttgagcaactactttatttgtattttgtagaaaaatcaactatttcatctcatttctctgttttcattggctggtatgtagcttagagacaaacgtcaagctagctattgccaagtcactagaaattcatggcctgtgttgtgtgtgctcactgtactgctctatcccaactttccctttgctttgcttcttacctattttaatttactttatctgtcagtaatgtacgtatcttagtgaaacaccttaaatcctttctgagaaaggcaggttgtaaatacatgcaaatattatttttctttgcttccaaactacatcactcttagatctctcttggtcagcagaaggaccccagcgattactttatagcagtaatgtcattccttcattggcacattttatccatagaggacagagaggataagctgtgaaggacacagtgtgcttcctattccctcctctctattcttgagctgaatgtgcaggggtgaaaagaaatgttggcacatagggaagaatggtgtagtggctaagtatatgggttctgaggtcagaactggcttatattccagttctgcagcccacctccatgtgaccttgagcaagttacttatctgtgcctcagttccctcatctataacacagagctgaaacagttacccccattcatgtagttattgtgaatattaaataaattaatgtaagtaaacatttactgtttttcaataggtgctcagtaaaatggccagtaagtgggggcaggagggctagagaattagaaaaagtcttttgaactgtagtaaaacaaacagaatattcttgatataactcatgaagagcccaaccgaaagtagggtattttttaaaggtagagattgtttttgctatacttaatatgtgcctttttgttttattcttcctgaagctaaagcatacatttttaatttttttacatattcttttaagcatcagaattataaggtaagaaaggatctatgttcatgagcactggccacactagtaatcctgtgtccggaattcgtgggttcttggtctcactgacttcaagaatgaagccgtggaccctcgtggtgagtgttatagctcttaaggtggtgtgtctggagtttgttccttctgatgtttggatgtgttcagccttctggtgggttcatggtctcgctggctcaggagtgaagctgcagaccttttcggtgagtgttacagctcataaagacagtgtggacccaaaaagtgagcagcagcaagatttattgcacagagcgaaagaacaaagcttccacaatgtggaaggggaccccagcaggttgccactgctggctggggcagcctgcttttagtctcttatcgggccccacccacatcctgctgattggtccattttacagagagctgattggtccgttttgacagggtgctgattggtgtgtttacaatccctgagctagaacaaggggaaggtggaggacaaaagttctccacgtacccactagattagctagatacagagtgtggacacaaaagttctccacgtccccaccagagtaggtagatacagagtgttgattggtgcattcacaaactctgagctagacagagggtgctgattggtgtatttccaaaccttgagctagatacagagtgccgattggtgtatttacaatcccttagctagacataaatgttctccgagtaccccgccagagtagctagatagagagtgtggattggtgcattcacaaaccctgagctagacacagggtgctgactggtgtgtttacaaaccttgagcaagatacagagtgccaattgctgtatttacaatcccttagctagacataaaggttctccaagtccccaccagactcaggagcccagctggcttcacccagtggatcccgcattggggcgcaggtggagctgcctgccagtctcgtgctgtgcgcccgcactcctcagccctt

SEQ ID NO: 40939 - DNA, 2300 bp, Homo sapien
aaagtaattaatataatcttaatttatattaatataaatttaaaattttatgcagtagttttgctgaacatagtttatctctatccagggctgatatttagctggtagactaatatagtctaccagtacactaatatagtcattttgcattggcatccatgctgattgatcactgcctatttctagtccatgattaaatattttgaatattaccattgactgtggtgggtaagcatcactaagattgactctagctcccattggtcagcatatggtaaaatcaggcttggcttatcccctctgtactctggactagaataagactgccttttatattcataagctgaaaacatggcagaggtacctagtcctgtagtcataaaaggggactacctatccttgtctctttttctccttaatgaatctaatactcatttttttttccatttagcttaaaggacccctgtattctgttctttttgttttgtacatgaccttactcaccatctgagacaaccaatatgtttctgcttcccctgctttattatctatatgaagatagctcatttgtaaggagaggaaagaggatgagcagaaaggaaatgacctacttttacaggttcaaagacaaaagcttgaactgtactagagcactggaggttagaacagtagcttaaaactcaacatgtgtttccattttaaaattatttaatctaggcaaagaccactaagaaagtcacccagaggtgtcctacaaggtttgtattataggtgctgaaaaactatgattctcagtccctagtttgtcccatgtaagaatgtacctaaaattatttaaagttaatagaattctgtacatttgaataaattcattttttaaaaaatatgataattagaatgctatgaaatgaaactaaaaatagctggcatacaattccaaattaaatagaaacagttgccaccttgctattgagagggccttaaaaagcttatttgtttttcagcctatttttttcttaagggattttaaaacatagtactaaaagtagtttaatgtcataaaaaccacctaagctgttatgatgcatcttttggaagtcagaaatattttactgatccatatttaaaagtaaacatccctgaactgtaattttaattagatctatcaatagagtagctttatttcaattcagcacacacttatatttatgtacctattatttcttccctaccatataggaaacactatgatcagtttccaaagattgcttgacactaaagcaataaatggcaatattcaaagggtattgagattttctttttaaaataatgtgcttttttaaaacctcagttgagaacaaatagaatgatttggcctctgaatttgtaagaaaagaattcagacccaagtcctttgagtaacatatgctgagtataagtggcataagatcacactggttgacccagaaagtttgattttgatgttatagatagctacagatagacagatatagacgtatacatgtaatgcatatatatttataaaaataacagagtcttctggagcaacagaagaaacaaaaggggcatttaccactgtgtgaattcaggtgcatttctagagctcgagcatttgaaaagctcttggtgcactgtgggaaggggcacaggctggaaatctgatgggcactgtcttcattttcctctgacaccggagcagcttctctttgcctcccactgcagtagtacatcaaatgggcctgcagattccgctcactccgataccagatgccacaggacttgcaagggaatatatcctctgcaggtaaaaacacaagagacacatttgctgctgtccatttgaaaccaactgtgggtaaagcagcatttagttcaatttttctcagactccgctctcaggttcttaattgggcaatcagatgagtaacagtctttggtgttgttctacagcataggactcgacttttaaagaaatgttgtactctgcaatttaacttcccacagactctagagaaagaggagactccaacatttaaaacacaagatattgattttattttattttattttttgcgacagattctcactgtgttacctaggctgcagtgcagtggtgcgatctcaactcactgcaacctctacctcctgggttcaagcaattctcctgcctcagcctcccaagtagctgggattacaggtgagtgccaccacgcctggctaatttttgtatttttagtagaaacaggtttctccatgttggctaggctggtctcaaactc

SEQ ID NO: 40940 - DNA, 2300 bp, Homo sapien
atgaagatgttcagagtgccataccaccttaagaataattactgaaagaggaagaatgaaagcaaccaggatgaaagtaaagtttatttttcaccttccttcaccactgatagaaaggaatgatttgtgttgatagtctaaggaaattcacattttgatctcccaatgaatcacctatggaaaattagaaacatgatgttgtcattataaagtggccctggtcctgcagataatatttgcagcttcagtaaaaaagtaaaagatcaaaccttaattgattacttattttggggtgcacatggcactaaattgcaagtggggatggaagggcgcaaatatcttaggagggaggacatcttgacccaaatagacagattccactacagttctatgaaaaaatcacatgtacattacttagtagggttagcaaagtctaactaatttataatactgggaaaacaaagtagctttatcacagagtctgaactgagataattataaaatacatacctagtctatacattgcttgtagaagattctcagtaaaatctttctgatagaataaaaattaaacgctatcagtttcaacataacagaaaatttaagctgcgaatgctcgtaaagaaattaggtaaaaataatggagaacaaaacccgcaatcggcttatcaatcggcttactgttgacacgccacgccactcagaatagtatctaattttcttgatcccttatctcaggtaaagctattgactcggggaaataggttatgcggaaaccatgaaagtttctagtctggccgaccctaggttcaacactctattattccagacaagcgatgagctcctgtcgctaaatttcaacatccctgtctgtcaaatgggaataataatgattctctcattgggtggctgtgagaggtgagtgaaacaagacggaaatttgacccaggaaatatctgtacctcttactttaaagaacagaattaaaaaataataataaatgatcagaaattaaggtagaatagagtgaacactaatagcgggaaatagctaatttgcaggtgaggtggctgaaaggctcctacgcttgaagtgtttgctggatgcacaggagatctgggatacatcccgaactcggcaacaggaccagctcctttcctcagggttacagaacagccaggttccagttcaggtctgggaatctacccatccagagtttgcgcccttttcgttttgcaatttaaaaccgggttggagggggaaggagtgaaggcagcatgcggagaaagtaaattacagttcaggtgacaggaacaagaaaatctccaaggtcagggtggggtgtcaacgaattatgcaaaacactgcggaatgaggagtcacaaacgccttgcaaagaattctgaattttagaagctctttgcagaacccccttcagcccgctccaagctgccttgggtccctttctaggctgtcagacttcgccttcctttcctccttgtttttcccagcaaccaaagcatctgaagaacatttttttcctccgtaaatctgaacaaatttccttgcagctttccttgcagaagcttttttatcgctttaacaaaactttcctctgcttctctagggagagcctagtattagagctgcccgacaggcgggaccccgaaatcggggcagctctggcttagtccaggctattcgagtgggcgcctgaactggaggcgccgtctccaccgggatggggatcctagtgcaggcagacgcctggcaggactcggcgagctggggtccccaccgcggtagccagagcagaaacccgaaccccagccagaggggccgcgcgcggggaggggtgcgcgctaagccagcgtggcttccgcaggagctatttttagcggtgcgtgcctccccccgcccccggcgtggtagcctccggctcgcggcgccccacggctcctctcagtctcccccgccgctgccggctcttggtagcttccacgcgggcaggtccggaaactgagcatgtctgcaagcgctcagcggcgccggcagcagcggggctagagctgggctgcgtcaggctgagcccattcacctcgcggccacaggagctcagcgccggcgccgcgccgcccagccccgccgagaggggcgcactcgccgccgcggggcccgccgccgctcaccgcagccccctcctggcgacccgcaagtaagtttgtgaggctgctgggcgttagggcgagggcttggcgcccgggggagtccaggagggatagcgagaggcgcggctggcg

SEQ ID NO: 40941 - DNA, 2300 bp, Homo sapien
ccttctttttttttttttttttttttttgagacggagtcttgctctgtctcccaggctggagggcagtggcaatggtgcgatctcagctcactgcaagctccgcctcccaggttcacgccattctcctgactcagcctcctgagtagctgggactacaggtgcccgccaccatgcctggctaattttttggaatttttttttttttttttttttttttgtagagacagggtttcatcatcttagccaggatggtctcgatctcctgacctcatgatccgcccacctcagcctcccaaagtgctgggattacaggtgtgagccaccgcgcccagccaaacaccttcttatagcagagtaccaggagcttaactagaagttttacataagttacctcatgtattgaacagcattcataggaaatactggaactcttaaaggaaccaaatagagtttgtattgaatacaaatgtagctccatagagaagattagacatcatgaattttcatttgagaatgaatcatcttgccaatttatatcattttcctgcaaaagcttattggcttggtcatgtactttactagtcaatgaccagttattatggagttgtcagaacttggccaagaccataagctctatattacatgcaaaatcttagtattattactatttatacaacttcagcgttgtgaactggtggcaccatgaactccattttcttcgtgatcattgtcacttcatcaccttgtactaactctgcacgtggtttttgacaatttgtttatcttttaaatttacccctgaagcccacctgtttgggcatccattagttcttagactcatgaagatcttcacccactgacttgacattgtctgttctcaatggttgtgatctctgccctcaaataaaatatgatgttacagtatgtatatatctcagtgagttgctgttgaagggtctcataaaaatgtgatgacagggaagaaggaaaggcagttttccaccacaatcctctccaggattctaaagtttaaggacataaacagtaagtcagaagcagccgggctataggtgctgccctttacttctaccgggataacagggaatgtggattaaaagggggctaagggctcatgcctgtaattccagcattttgggaggccaaggcgagtggaccacctgaggtcgggagttcaagaccagcactgacaacataatgaaaccccatctctactaaaaatacaaaaattagccgggcatgatggcgtgtgcctgtagacccagctcctcaggaggctgaggcaggagaatggcttcaacctgggaggcagaggttgcagtgagctgagatgaagatggcgccactgtactccagcctgggtgacagagcaaggctccatctcaaaaaaaaaggggggtgggtgctaagtacaaagaaggaagttattactacttttatccattcttttaattactaagcagttagtgctgttgtgtggactttcttctttccctcctagggaaaaaagactaaaataaataactataatgcaaagcagtgtgaactatatccattatgatgcaattggaagttctggatgcaaaacatcaaaattatgttctgacaatggctagcagtatttacatatctataaaggtacagaacaccagcctggttcatactcagcttatcaaatctgctacctgttgttgctattaggactataaaatagagatttgttaaaggtggccatgccatttatttactttatgataagaaattgtacagaggctagatattgagtcttgtgatctcactccatgatagactttacagtatcaacttagtaacgtatcatacagagcatgtcgtcgtcaccgtttctaaaatgttcagtgagccaagagcaagtccacagtcacagggcaggtacagtgagtttcctgtgtgcagaaacagaaacctctgaatcttgcacactgccaccaggggtcagggaccgggcgggaggagaaggcactctggcagaaaggaaatgttatattaccctgagaagcacaggaatcaaaattcctgtctcctcttcttgaaagcagctcactgctagctgagcaaggttcgaaggaaggacctcagaaatgttctgccagcgcaaaggtatgtgtaagtgctctcttagtggctttaaataagttattttggaaagtcagatacagcggacattaaagggcacactttatgttgcattttcaaagtccagatgagctgtatggatctgtgacgatgcagttggaggttc

SEQ ID NO: 40942 - DNA, 2300 bp, Homo sapien
tgtagattgaagagaaaaaggaaagaaaaatgaatgttcatatttgatggcctatgattttctgggtcatgtagaaggcaaagtaacatgttcaagtgatgaatttggtaactttaggataatgatgacagttcagacaacaaatacagagaataaaagagaacactgactatatgaatagaaggattttagagacattacgactcagccgagtttaaatcaaagattgtaaggcattcagtcatcaaggttatacatttttctccagcagctctagccttctatgaaatagaagcagaaaaaaaacccaaaacagatgggttaactacctgtaaatctggatttgaactggtagaatgaagcttcctgcaaatgttggatgtaaaagtgcagatctaatcaggtaaaatctcaagcattaattggatatgcttataacaaaccggtaaatttttagaagatgtaaaacatatcttagaaaaataatttaaattattaatgagaattagactaagtcattgaaatttgatttttaaaacttaccgagcctctctttcattgaactcagaagtagtgtgaatggtaagtcttccttgtcaaatggaatgctacttagcagctgtcttagctcgttccagatgctataataaagcaccatagactgactgactggtttataaacacacatttatttctcacagttctggaggctagaagtccaagatcagggtgccagcatagttggtttctggtgaggaccttcttctggtttgcaaactgatgtatttttgtatcctcctgtggcagaaagatggagacagctctctgggtcccttttttataagggcactaatcgcattcatgcggcctctatgctatgaattacctcccaaaggccccatctcctaataccatcacattggggttaggattttaacaaatgaatttaagggaaagcacaaacattccgtccactgcaacatctacaaaataggtccttaggaagtgcagaagtctggaacagttctttcccaagccacaaccctgaaaacatggattgctgggtatgcagattctcctgggtccctttcccataaacaccgaattagacactctgaggatgcagcccagacattctgtatttttcaccaggcataatggtgatggctgatattagaatggtgaaatttatcccacctagtaagaatctaaactgaaaatggtgatgatgcaaaaaagatctgtcaaccagttaaaaaaaaaaaaaaaaaaagagggtgtgtgtttgtcaggagggatagtctttagtagtatggccaaaagcttaagcctgattttcagggctctattgttggagtgggtagttcatcaacttcctaagtaattcaaatctttttccccccaatatattaatatattggtgattccaagaaagagggtttaatttatttaatgcctgggaaaactaaaagaactacaaacagatgtgaaaggaagagaataaccacatctcacaggaagcaaaatttctgtcaaaagttactgttctttccctgtctaggttctttgtccctgaaaggtagatccgcaaactaaatccctcaataacgttgcctaaacaggactgggatcatagaatgtccaacactaacatgagttcataatggcacaacgaacttaaaatgttactattcatgttttaattatgattgcagtcttacgttgaaggtatctccgccgtccttaaacataaaaaaaaaaaaaggaaatacaagctgcaaaagttttatgtaatgcactccaccctcttttttccccaagccaacacacacccttcaaactttttgacagttattttcagacccctcctaggctcccgaactccatgcaactccagcagtctcccctgggccatttttagcctctgctctgacctggcgggaggctgggtgtccaccctttcccctgcagtcctgaaagtccggtccgagcgcggacggggcggggaggggctgggcgggccaggccagctccattggcgccaggcgggtgggggaatgcgctgagaggacccgtccagcttgcttaaaagccatcagttttctgaccccgcatcggttccaggaagaatacacctatgtgacaagctaagttctgcctcattttgcatttagaagccacaagaaaaacttttcgaaaacttttgtccgtcttttgctcccccgacgcgtggtttcctgatggtccgtccccgggcagagagagggacgccccctcctcctccccgcctcttgtgaggc

SEQ ID NO: 40943 - DNA, 2300 bp, Homo sapien
attcaaagaagaggaaggatatatacatatatggagagagagagagagagagtcattggtgagattctgttgtcctccttttctttctttttctttttctttctttcttcttctttttttttttttttttttttttttttttttgagatggagtctcgctctatcacccaggctggaatgcaatagcacgatctgcaacatccacctcctgggttcaagcggttctcctgccttagccttccgagtagctgagaatacagacacctgccaccacatctggctaatttttgtatttttagtagagacggggtttcatcatgttggccaggttggtctcgaacccctgacctcaagtgatacactggcgtaggcctgccaaagtgctgagattataggtgtgagccacgatgcctggctttgtccttttccatttgcaatatggtactttggggttctcttattctgaacaatccatcactgttctacaaggatgctgtatagctcttccctttcaaatcactgttttgtcattcattgtcagctggaaagtgtcacctggatttaaatatttaaagatatttcttcagaaagaaatatctttaaattctgccttatggattgattaaaaacaatatttggcacaaaattagataaataaaacaaatgtatgccaaaaatgaggtataagatttgattgcttttcttctgtcttatgctccttgggaggttgatttcaaaggtattattatggtattacattcaacagtagtaacatcattgacataaatgtttagcctttcagcatattaaatctgaagagtatagcacttttctaaatatatatcctgtcacgtttgttatgtttatctcttacctaagggtcttctaattctttaaatgtacagataaaatttctcaaaacttttgcccggttccaacaccctatagatgcagtatgagtgcatcaccagtagatgacactattgtatatttaataacaaactagattcttgtttttttaagatgaatcagatacaaaggcagcagagatattgacttcaactaattaatacttcaaaaatttatccatcctagttatagaaattatgcatacttgttgcagaaaaattggaaaatactgaaaagcggaacaagacaaagagttacccagcttcaccattcagagatagccaattatttttgtgttgacttactttacaatctttccttttcagcatattttacatggttctcaaactatgtatgtataaatgttaatgcttttttcattaagaactcatataattttcatttatcacagacttcttgtaaccatcattttaaattagcaacttacatttcatggtatagaggtttacactccctctttccagaacttaacttttgaacattagtgtttacatatacaaatgtcattaaatctgaaagtctagacccagttatgaaccattcatttgtctagtatctaaacttttcacctgaacaagttctcttagaggtattaaagagtatagttgttagcctgaagattttctctatatacttttgcttgagttttattcagattggttttaagccttacatttgagccatatattttaatttaagctctatttgaatgtaaataagcactgtgtgtgtgtgtatatctatggaaatcagtttatttttactttattgggagatttaaaattttaattaaacatttctctgtgtttattttccatattccatcagtgagtaaattttagtttagaattacagctttacccagggtttatgtcatcaagttcccttcaagtggattacttgcaaggaaatcttactttgatatttcctaaatattaagcaattgatataaaagtttgacttaattacttgatttatagaattacttggtctataaggttaattatttggtcatattgaataaatcagattttttatattctttggagatacgtgctacatccttttgttaaaaagtctttttagtgatactaattctgtgttcagtgtgtgaaaagtaaaataccacaattttaaaagtctaattatttttaattttgtttaatgacagagatatagatcagctatcaggaagggacttctgccattcaaagaaaatgacaggaagtaacactgaggaaatagactcaagaatccgagatgcaggtaatgatagtgccagcactgctcctaggagcactgaggagtctctttctgaagatgtgttcacagaatcagaactttcccctatacgagaggagcttgtatct

SEQ ID NO: 40944 - DNA, 2300 bp, Homo sapien
gtgtcagaatttcctatctttttaaggctgaataatattccattgtatgtgtgtacattttgtctgttcatttgttgctggacattttggttgtttcaaccttttggctattgtgaataatgctgctttgaacattagtgtacaaatatctgtttgaatccctcctttgagttttttttgggtatattcccagagtggaattctggatcatgtggtaactctatgtttaatttcttgaggaacctccgtactgttttccatagtggctgcaccattttaccttccctgcggcagtacacaagatttgggtcagtttttaaaataccgaattttcttttcatcatgcagttgagatatcctgaagacctaagggctgtgttcagtagatattaaaataattcatatattaatacttgaaccaagttctataaaagatttaatatttttcttctgtaatatttttttaattcaaaactaatgcatgttcagtaaagaacatttggcaaacataggaagattctagaaaatttataaaaatcttctggaattcatcacccagagatgatcattgttaacattcaatatatctgtctttcttatagaacaaaatcatatgtgttaatttgttatttacatcaaatcaagattatactatactgttgtatcctgcttttttatgtcatgaaccttttcctatgtgattacagttctttgaaaacatggctttaaaggccctaaaatttatttaaccatttgcttattaagacatccagttgttattaacgatctgtattgttaagacattttaaagaatgctgcccagcattcttcaaaacatcaaagacagaaaatgcatctgatagttatcttatattttgaagatctttgactgcatctttgactacatctgatagttaccttatattataaaacctttgaaaaagataaaataatctgtttaagctgatgatgtggtggaccaattttgttgtgggggttgggggtttaatggggttaggggaggttattataaccaaatattaaaaggacaaaaattgatagatgtttttaaacagtcatctctaaactgttaccatttggtttcttctttttttggaataattagttttaagtaattttaagttacttaatattctgtaatagagaaatattcaaactttctgatctttatgactttataataaaattatgtaataaatataaaagtgtctagtccaattatgagaagaatggtgaaagctcatcgttttaaccacatgaaaatagtggggttcccatagattatctaccttgtgtaatactgcacagaaaaagccatgatgagtacccaggtctcctgactataagtgctatttcctccagtgtgctgccttggtaagctaatcaatgtctgggttcctaaattcacctatatattcagaccctcagtatactctatcagcacctctggttgaaagagttagaactaattcgttcttaattaactgtccaaacaggtggcagaatctaacatattattgactgttttattacaattttgtatacatgtaaaagcattagaaacttcattaaatttttgtctgaaacaaccatgttaagtatacctttaaaacttctacagttatttagatgtcattcaaaaagactgatagagaatatgtagaaaattatatatatattatgtgtgtgtatatatatatgattgctttagtatgggtgttgaaaatgtaacaatgtttctgaaacttttactttttttcttaatgtccttagacataatttttattcattaacttggctcttttgttaagtttagtcatgttgtatctgtgactttacctttgaaggaaaaaaaatataaattaagaaaatgtactttagcaccactaaagtgaggttttattctgtaactatttgtcagaattttgaaggtaaagttaactaaactacctaaacttggtgtgtgagaattgaataaacactgtttgcatctcaattctaggttctgcacttttaaaagaaaagcaaaggcatcgattacataagttcttgtgtctcagagttggaaaaccaatgaggaaaacgtttgtatctcaagcaagtgctacaatgcaacagtatgcacagagagataagaaacatgaatattggtttgctgtgccacaagaaaggtaaaaaacccatacgacaccttgagagcattattgagattctttgaactaaaattattttgtgtgtcaaaataccaatgataaactattgaaacatagtttatgatt

SEQ ID NO: 40945 - DNA, 2300 bp, Homo sapien
cctcacctggcataaaataataaatagtgagtagggtaaattatatattatagcttctatcataccattcccaactcaaataggaagagatataaggtaatttaataacttcagttcgaataaagtaaaggaaaaggattattaaattgaatatctgaattatgagaacagattatgttcaacttgtaaactggtagtgttttcaaaagtgctttgttttatatcccatcatgttataataataacaattgacatctgcttcaaattcttggatatctaggcaaatttaaatgacttagcaatatgtattataaatactacaaaaacagaaagggcaagaaggagacttactgagctcattttatgtttgcctgacactgtatttataaatttggatgacttcgagaaacagaaaaccacactcagaatagcttaaacctgttgtttctcgaagtgtagttcccagaccatcagcagcagcagcacctgggaatttgttagaaatgcaaattctcagaccccatttgagtctgattaattagaaaccatttttggagcccagcattctggtataacaaatactccaggtgatattgatgccggctaaaacttgaaagccactgatttaggtctctaatgactagttctgtccagagatgagagccagcctcctcagaaacacatggctggaaggatacctgagcaaaatcaaggccacttcaggaaggagttgtaagggtggatattgaataggcaaccaacagaatagactatgccatgcttggtggtttttggttttgtttttaatatctcatttaaacctcattttggaacacacgtcatatttgttattttagaaaatgtagctggaagttatgacaagctttcaaaatgctgcttccaccaccaccaccaccaaattatataatattgctgatggttgttaggagagtctgtgatggaggggtggagtgtgaccacaatgcactgtatgtagaagagaactttcctggtgtgaagataatgatggtgttcctatgagggactgtgggagagattttagggtaaatgtagtggggctgaatgagaggaataggggaaatggttggtatgtgggggaggtagggtgttactgtggggtgtgctgtgccctgtgtgagtgcatgctggaatgtggaggaaggagatgggagtgggggtttggttgggatgcagtattgcgtgttagaaaggtagtgtgtgtgtgaaaaggtggcatcatgtgtgcatacaacaaagtgaagtggaaggagctgctttaccttaaaatggaagaaattttcaaatgtatcatcatgatattgatattctgattaaaactgaattctagatagttttagtttatatgtatttgtagtttatatttaatctttaaaaaattcacttctttgcttatattcaaaatatcactggttagtgaagtatatgtaggcatagtgaatataactaccttttcaagaaattagatgttagaaaatgcaatttaaaaacagactgtgtaacaggcagagggattttcaggtcactttgaatatttgtgtaggatttatttgtagcatattggcttggtttttacacagtcattctgtaaaattttagggtggaagagtccacaaaaggcatcttattgcttaaaaaatgttcacataaaagatacaatcttatagtactgttagctgtaagtaaggaacataattttatgactatatgaacaaataacaaaatgttcattcaaatcattcatgtgctttaagagactctggaaattatatttactacttttttgttactgggttacttttagtatattcatgtactgatgtttggaaatataggctctgtgtctttaaacttttgagccctttctttgcacatttgggtacagtgcaaccaaacttaagcatgggaaattctctcttccctccccagctttacagcctccactcaggactatcattgctatggatactacttagtgattagctctctctcttgtcaatcaaatctttgtctctagcaaactgttttgtcactgtagtaaggctctagtgctggaaatttatctttgacagaggaagaatgcttttgaaaacagttcttacgtgattttatgtaacttaatttgccctggaaaggaaatgtctcgtctctggtatgggaaaaaagggagaagacatcaaccaattaatcataaatacactctggtaaatcttagtcaattattttaatttgtatatatactagtcttttcatggtgacat

SEQ ID NO: 40946 - DNA, 2300 bp, Homo sapien
gggcgtggtggcgggctcctgtagtcccagctactccagaggctgaggcaggagaatggtgtgaacctgggaggcggagcttgcggtgagccgagatcgcgccactgcactccagcctcggcgacagagcgagactccgtctcaaacaaaaaaacaaaacaacaacaacaacaaaaaactaataccaacttttttccaaaataaatgtctcactctctgaaataattaacttttatacctttttgtgctcttaaacagcagttttcaatcagtatggttacttgcatgcaagactgaaggaaaggatatagttttaaagccaacagacctgttgaatgaaaaaaaattccgtcttactttaagaaattattcattgctgagccctggacatttttatctggtttaatacactgcatagatgtttctctttctgtccacatgcttgtctttccagtccttttaaaaaaatattatatttcagtccctcttgtgagagttgaaaaactgtctttgcctacatgaacataaagtcctgctaaggaagattgtgttactaaaaacaaaaggggccagacgtgggggctcacatctgtcatcccagcactttgggaggccaaggtgggaagactgcacaagctcaggagtttgagaccagcctgggcaacatagcgagactccgtctatataaaacaaaaacaaaaacaattagctaggcatggtggctcatgcttgtattcccagctgcttgggagactgaggcaggaggactgattgagcacaggaggtcaaggctgcagtgagccatcatcacaccactgcactccagcctggggacacagcaagaccttatctcaaaaaacaaaacaaaacaacaaccacaaaccaaacggtaagggtaggcgggatggggataagaagtgagctaccgatagctttcatttattctgtccttagaattctgtccttagatgatcttttcaaacaaagtatttcaaaatatgtattccaacaataatttctttctttctttctttcttttttttgagacggagtctcgctcgtcacccaggctggagtgcagtggctcgatctccgctcactgcaagctccgcctcccgggttcacaggattcttctgcctcagcctcccgagtagctgggactacaggcgcccgccactacgcccggctaattttttgtatttttagtagagacggggtttcaccatgttagccaggatggtctcgatctcctgacctcgtgatctgcccgcctcggcctcccaaagtgctgggattacaggcgtgagccacctcgcccggcctccaataataatttctaaaatccaatgtgtatacaggttttaaaaacattttttaatgattggaccaaaattttgactccctttttgtattttaatatgagttatctatacaatagttcaaagttgggactagaaagtaattagtctttgactatctggactttggtctttctcgtatctgggcttcaattttctcatttggaaaatgaagattggatgagttgattttctaaggtctatttctaatggagttgaatgaaaaagaaaaaggcaacttaggatctttgataactggaataaaaggaggcacacgctttgaattacacagagatggatttgaatctcatattttattagctgctggaagttagattttattttacttagctataaagtggaactaattaggagctgtactgagggctgctggggtttaagtgggaacaatcctataatgttcccaggataatatgtatgcacctataaatggtaggaccatattaaggtcagacaaacgtaaggctgagcacatgacttgatctagtaatttccactctggcacttggagaagagagtgagcatatcactgttccttaccagcagagatgtccctctgccgtgatgaaactggagctgtcatgatttataaaaagaacaccatcagggcaaaggcgccacatcttggcaagaaatgcttcacatagtttccatcgtcactaagctctccttcccaccccgcaccctgcttctatttaaatcccaggcactccactggaccacactcattttagccagtgtccaggctatcagcagagaaagacaggtgggcagcatggctccgggcgaaaaggaaagcggggagggcccagccaagagcgccctccggaagatacgcacagccaccctggtcatcagcttggcccgaggttggcagcagtgggcgaatgagaacagcatcaggcaggcccaggagccta

SEQ ID NO: 40947 - DNA, 2300 bp, Homo sapien
tcatattgtagggacatgggactgagatccactgctttgatctaccattctaatgaggctaagctttcttatttcatcccagactgaaagttgttctaagattgaggctttagttcatttggtaggtttttgtcaatgattctatatcttcataaatctctaatttaaatttggcaaaatacgtattaaaaataaaatgaagttgcacaaatattactttcaattttatttaaatcaaataatgttgtgatgatatgaagaactttgcatagaaaccacatgaattttaaagacaaaattcgaatacctaattatcctattctgaaacaattaaaagaatacacatgttaaattgccataaacatgtacgtattacataatacacataacaatcataaaacattttatactgatttattataaataattggaaacaatatttcatttctcaaacccagacaacaaaacagtaaatatcatgctttctttttttattattttattttgtttttgtaatatgagtttggaaatagtattctttatccaaaaactggtttaagaaagtgtctgtaggaacacaaaaggacaaaatactcattttctttcccttaaatgaaaacagttgagaagtttttagaaggagaggcttacctgctatgaagaagccaccaagaatagaaaaatggtataatacctgcaaatatcacttgtaaggcaaaaaggggtagaatacagacacataaatataaaaaagacttgatggtaaactttaaaaagtatttttcttaacaatgtgaatagctttattttctcaaatggaggaaaccattaaggcatagtggatcaagtcaccaagtttgaaactggtattgctaccttgccaacaactgtctcttttatgagaggaggcccagtagctttatttcaattttctcatcccatagtgactcatgttttaataaaaactgtttactgtcataaccttggacacttacaggcagagaagacttcttgataaaataatgcagtaacttcaagcaccccaaaaattcacttaaaatacattatcccataggaatatttccattgagttatttatggcaactagcagtcagaatttcttagtcaggtgactatgattaattttctttttgtatatatttcccttacatataatagttttgccaatttttctcccctgataataatttttaaaaattaaaaattgcctaagggaatggactgaaggagaaatatatgaagaatgatgtatttcattaagggatatagtagatttctttgagcatttgtgttatttgcatcaattaaggacaatgttgcatattccagattaattagctattaggttttttgcagatataaacatgctatgtacaatgatatttataattattttattttttatagacttcaaagtgtttcttttatagacactggaacagtgtgaatctggtaagcatgtttcagttaattagcaaaatttaaattagcaagacataacagggtgagtattggagttctaaaaatatttttaaaataatgaagttacatgtatgtatacacatgcaagtagatactgtaaaatgaactgctccagagtacttgcttttacttcaacttaacatactccaaaatattgctttcctgtataatatcaaaggaaatattaaatgcatgtatattattttaagaacttgatgatatattttacattcttttaactttactcaggctataaatatatttatatatcattcaatcagtttttagagtaaatgaaaaccatagtatgggggtggtaagttttcaccacatacatccttacttgattatgttcatttctttttctgaaaactgtatcaaaaatcagagtaatggagtttgtttctaccacacacttattgtccatgtactacagttcattatggcttacaaaaatggaattttcatttgaagatgggtaagcagaaatcaactagtaagtatgatactggaattaggcttctgaaatccattaacatttaaccaactcagaggacaatgctgttctaaatttttatcaaaattgtgcaacagtataatttgttagtaggtttgcatagatataacaccttttcactggtataatacatcttttccaaaggattatggcaggcttgtttctattcttcatgtatattctctttttcactctttttttctgttttacatgaaattaaccatatttatcatctggctaccatagttccaaaataaggtccagtagtagtttgaagcac

SEQ ID NO: 40948 - DNA, 2300 bp, Homo sapien
acagtacctgacactggccgggcacagtggctcatgcctgtaatcccagcactttgggaggccgaggcgggcagatcacaaggtcaggagatcgagaccatcctggccaacacggcaaaaccccatctctactaaaaatacaaaaaattagctgggcatggtggcaggcgcctgtagtcccaactactcgggaggctgaggcaggagaatggcgtgaacccaggaggcggaacttgcagtgagtagagattgagccaagatcacgccactgtgctccagcctgggcgacagagcaagactctgtcttaaaacaaacaaacaacaacaacaaaaagcaaaacaaaaaaacagtacctgacacatagcaaccatgtcataaatgagaggtatcatgactagtatgattgacatcatcatcaccatctaccatgctgatccatccacaaggtttctggcatctaccaggatggcacagcttctgccacatggacttctctcgattccctcacagtcttttatgccatttaagccttggacccacacttcttaatctgtgtaaaagacaatcagatgttacactttgtcccccagtacctggtgttggaagatttggctcttcaaacatgctctattttataatttaagtattgaatctaaaacactccctagtgtcccctttttgaaaggaatgattcagtgctgtatttctccaaggtaaattaagtgcccattctggtatgtggcattttaataacaccttgtaaactaaggacgggttgaaccttctgaaaacagaactgagaaaaccgagtaagcctttccccggaggaaaactagtatattagacactccataaaatgttaatgctttttatttccagtcagttggtaggctccaaaaatgcttctgctttctctatcatttttaatgtgcaatatacaaggggaatatcctataaagagctcagggagaaggaagggcctcagttaaagatttcaacactctgagcaaagcatcccaactcctttcagaagaccataccatcagccaaagggagtcttccttttgttaccatttatacagtgacttgggaacttgtagtgtcattaagcctcatcctgaagcttgagttgagaaataaaggaagctagtggttatgatacaggaccagttatcaaaaatcacaagaattcattgtgactttagatagatcacttttggctcctgtggtttctgtgtcaatatagttttctttttgtatgtgtgtgtgattgagaatgtatattgctgttttttcttttttcacctaacatattttgagcattttctaatatccttaaaatgattaaaaatattttcaacagtttcaaaataagagatttttttctttcttaatgtcattgtacataaacctttgtgtttctgattatttcatatttttctctttatttctgattttgcagatggtcaatatactattcttgatcccacagaactatcgtgaaatttagtcaatgttaacgttttgaaaaccccaaataaatgaagcaaagtgaataaaaagtagtttctacgtgttgtttgtttttttcctgaactattctgtttcctcttaggcccatttctttagtgaaagttatactataacttctttagagtgtagctatttgggtgtaagttagctaccttggatataagatacacccaaggaaaccaagaaactaaatcatagttaaaagcaaacattactctgacaatatctggtttacttattttttatttgacatgttatatgtgtaactcctattctgaagaatacatattcttaagtctctcacttaaaaatatttttacagtgaaatgtaaaatttctcatcttaaataaattcaggaaccaattgaattataagggtttttttgtataacattttttcaaatctaagttttattttcacttccttgtagtttattagaacataaaatcttagaaatggaaggaaaacacaaggaagagttggacaccttaaaggaagagaaagagaaccttcaaggcttggttactcgtcaaacatatataatccaggagctggaaaagcaattaaacagagctaccaccaacaacagtgtccttcagaagcagcaactggagctgatggacacagtccacaaccttgtcaatctttgcactaaagaaggtggtaagaatgtcttcctcactttggtattgttaatattttatttcctttgatcaagtaaatactcaatatagctttctacagtgcattgattgctgtgtaaaa

SEQ ID NO: 40949 - DNA, 2300 bp, Homo sapien
tacacagacacacacgtggaggaacagatttttaacagtctcggctatttaaaaacacaggagcactttaatagaaacctcaccactcatccattagtcttctgccaattttctgctgtatttagttcttcgcaaaacacttctaggtgtcgggtttggactctcttctttccatggataattttcaaatcaagcattattggaaagtgttcttagacaacctgcattttgccagtgcacttcatctttgtggctgtgcataggttacctgtcactgtgtgtgtgcgtgtgtgcgtgtgtgcgtgtgcgcgcgcacgcgtgtgctggaaaaggcctgaatcactttggagagatactctggttttaacagtgctttttcttctaggtacgtcacttctcctggtttaggactgtaaatcaatgcagctggagcgcttttgaaattgctttcattccttgcagagatttccaaaagcaggctggcctggtggtttgaaacaggctctgagtcagtttgcctgagttcacatactggcgccatcacttgccagctctgtgaattacatcctgttagcctttctgtgactcagtcttcccattgataaaatggggttaaacggatgatatccgtgatcttaggtttgttggaatgattaagtgagatagtgtgtaaggagtgcttcgcctggaaaacagtaaggtcttaatgcatgccattattattgttgcacaggagtgatacatgactcaatgaggagacacgcaaaagttcaagaggctgcaaaagtggttcaaatattttattgctgtgtttggcataacttgcttccatatctgtccaatcagaaatttgttatttggtgtggaaaggactgatgaatctcggcaaggtttctttccccaagtaaatcgcatttgttctggaatttgttttgacctctcctctaacttctccctaaatgcccatctctaaccactacggaccttcacccactgccctgttctccttccaagacatgggagatgacagctgtggcttctgttttcacaccatgactgcagttgtctaaaagccctcccagttcctaatgaaaatcccaactcataattcaggttttctgcatctagtaaagatctcaaagccgttccctaaattctacaattattgcctgtttatgtttatgggtccctttgttcaaatgtttatacgctgcctgtgggaaatcatcttctgataatttttctttcttccttcacagaagcacagagatgtctcctgtacagcccattgctggctgttagcacacctgatatatgcttgttctcacatagtatgtctgtgcagccacaggaggtttttatgtggaacttccacaccagtgttaaagacagccatagccaccaaagagatccttgtaaaatacaggattaggatataccacaggaattaataattctcaagccactgctttaaattgtagccacattgtttttgtagggaagttgctcaatttatatacacagaacatgaagggttgcattctgatcaggacaccagtttcatttaagaaccctataccaaaaggtacttagataaccctctttaatatgcacatactatattgctttgtgcaacatattgctttgagcaacaaatgatgctaattttcttgctaatttgatcctctctgattattttcttcaactcctaaaagtctaagtgaatacaatgaaagaataccatctgtaaaaactgttttttaacatatttttcctcagagtcaagaatacatgttttttaaagacatttaataatgatatgggtttatcattctctatcaaaaataattccattggacattatgccaattttcttcttagggtccctcgactaaatagtaactttaaaaacatactgctagtttgctatattttagtaggtcagcatgcacaccaaaagtgtattaaggtggactgctctatttattgatttgccatgaatctgctaaaggctcaaggcaattgtctgtggaaaggggcgggagggccatacatgatcgaggtcatgcgcatctagccaatttgtaagacgatcccgccgccctaagccatcagcaatccttagtataggggcacactcatgcattcctgtcaagtcatcttgtgaaaggctgcctgcttccagcttggcttggatgtgcaaccttaataaaactcactgaggtctgggagaaaatagcagatctgcagcagatagggtagaggaaagggtctagaatatgtacacgcagctgactcag

SEQ ID NO: 40950 - DNA, 2300 bp, Homo sapien
tgcccaggctggagtgcaatggcacaatcttggttcaccacaacctctgccttccaggttcaggcagttctcctggcttagactcccaagtagctgggattataggcattcgctaccatgcccagctaattttgtgttttgtttatttatttattttttgtagagatagggtttctccgtgttggtcaggctgatcccaaactcccgacctcaggttatctgcctgcctcggcctcccaaagtgctgggattacaggcgtgagccaccgcacccagcccctcattgcttgttttggtcaggtttgtcaaagatcagacagttgtagatgtgtggtcttatttctggatactctattctgttccattagcctgtctgttcttgtatcagtaccatgctgttttggctactgtagctctgtagtatagtttgaagtcaggtagcatgatgcctccagctttgttatttttgcttattattgccttggctatttgggcttttttttggttccatgtgaattttaacatagttttttccagttctgtgaaaaatgtcaatggtagtttaatggaaatagcattgaatcgataaattgctttgggcagtatggctattttaataatattgattcttctatccatgagcatggaaggtttttccatttgtttgtgttatctctgatttcttgggtagtgttttgttgttctccttatagagatctttcatctccttagttacctgtattcctaggtattttattatttttgcagcaattgtgaatgagagtttgtttgtgatttgactcttggcttgactgctgttggtgtgtaggagtgctagtgagttttgcatgttgattttgtatcctgagactttgctgaagttgcgtctcattttaaggtgtgttttattcattctctttactctttccttctgtagtaactactaatcatgtattggaacgtttctgtttttttcttacatgcttagtacctttttatcttgttttgtgctacagttatttaaaagtgtttttggttatgtcattctcttctaccattcaatttgtccatagaattttttgttaagttttagaattttcatttcattgtaatgtgcacattcttgctttttcccatgtgatttctagttatccctttatctcttcagatattctgtagatattcattttaaagactcctttagaatgtccttatttctggttttttaggtgtgaagttttcttgttactgatattgttgactgttcctcatgaaggtttacttgctcatatgatttgttcatcttgatgttaaggtagcatttcatgaaagtctaggtctcaggattgtagaaaatatctagagagtaattctatatttatttattttttctttctgggttttcctggatctggacaaattcttattttaacttgtcaacatcatatagcccccatgctacaatgataattttgatttggatcccagccttgtggacttggtgttctgatgtctcatgaattatattttctcttgtgcttacctgctgtgtgctcccaagctagggtcagaatcccctgctctagccagttagggcagggggtcatggacaaacagccccatttactccatctacataaagggagctaagtgctagatcttcacataaatatttcttggcctgggttgaggaccttgccctaagttctacctctgtctggtctgacatccccatgagccattcagctttagcttctggcctcaactctgcctctgagtttcctctttgtttctaagtttggttgtgtattaacaactttttgggtggaggaggtagagggaagaaggggagggatattttatttagtatttctatgtgagtatagcagaaagaaaagaaacatttgtcttttcagcaggtgtatttaccaaaaatctgattatactgataattaaacacaatttttgtttttcttttacagctagttatgtatcaaatcccatttgcaagggttgtttgtcttgttcaaaggacaatgggtgtagccgatgtcaacagaagttgttcttcttccttcgaagagaagggatgcgccagtatggagagtgcctgcattcctgcccatccgggtactatggacaccgagccccagatatgaacagatgtgcaagtgagcatttggttttgtctatcctgtattgctggatatgcaacttaggagaggagctaagttgaagattttgaatgatttttttaaaaaaaatgtgtttgtaataggtgatagaaatagtttaagctt

SEQ ID NO: 40951 - DNA, 2300 bp, Homo sapien
cttcctgcaaaacacagacaagatgtaaattaaaaagtggcagagttgtggcatattgcaaaagtttaaagggagtcatcagtccttcagtcagatctccctgcagaaaggttggcgctgaggttggaactgaccctagagggctggagaggaccccttgggggtgagcagccgggttctgggacccagcaaggtcagggggcgtctccccagctactctttatctatcccccgcactctggaaagcccgaagaggattcgctccaagttaggcgcgctgttggctgtcaacgttctttaggacctcagggaaaccgggacgtttctggctttaggacccaggaactccgaggcagcctagacttagatgccttggaccacagcaccacctacttatagaagcatcccaagcctcagccggtctgcatctccatcggaaagtgcgcttgccacatcccttcggatcacttcgtcctcccgagagcgttctgccttctacagctcggaaagaaagaaatcttagctgtgaagtgaccgtggagaaagcgcaggaagcgacacaattggttagggaggcagagagtgtgagcgggcgcaccccttgcctggggaccgcgctcgcgggcggggacggagcatcccagtggctgcacccgccgctccgcgctcctgcctggcgtcgccaaccccgcggcggccgctggaattccagagctgccaggcgctcccagccggtctcggcaaacttttccccagcccacgtgctaaccaagcggctcgcttcccgagcccgggatggagcaccgcgcctagggaggccgcgccgcccgagacgtgcgcacggtaggcaacccacaccaaggcagccgcagctgcggcgcttgggtacaccgccgtggactccaaatggcctaagagcgttcttttagccctgcgctctcagtgcctttagagttctttcctttccccggagcgccggcacaacgcattatgccgctgggtcggagcttagggctcggcagaggttgctaattcactgattataatcaccttcctctccaactcgtccgcagctgcccgctctggattaagccgctccgcggctcgtgctaggcagtgggttcgcttcctccttccctctcttctttaaattgggacgtgcgaaggcgcagctgcctccccggggctctctccatcccccacacaccctgttttcgcttcttgtctctcaggttcgtggcggagagatgctgatcgcgctgaactgaccggtgcggcccgggggtgagtggcgagtctccctctgagtcctccccagcagcgcggccggcgccggctctttgggcgaaccctccagttcctagactttgagaggcgtctctcccccgcccgaccgcccagatgcagtttcgccttttctcctttgccctcatcattctgaactgcatggattacagccactgccaaggcaaccgatggagacgcagtaagcgaggtgggtccctctctgccaaaggtgcgtggtgggcttcaggggtggcgtgtggaggcgctcactcacgccctggctccgggggctcagatggtcagggctgtgctctccaccccagcttttgcgggtccccagtccccacctttaggaccctggagctctacaaaacactctgttttctgtaccctggaggcgcggggagccggagcgagacgcgctgggagctcggcgagccgggcgccaatcgggcgctcagggctaagtcgtgcggtccgcactcatgttcgccgccccacctcctcatctaaacttgtctctttaggacgtatttcttatctgacatgcattttttttttgtcgtcgttgttcttctctctgtcctcctaaccatcttccctgtagctcatttgttttatcttccccatccacgtgcgccccaaacccggcctcagatctcttcggacttgacctagcatagtgtgtgtgtggtgtgtgggtgtacccaagcgtgtgtctgtattccggagcttgggaggggtaccaagtcgagggggaggacctccctttccagaaaaaggccaacatagatctcttttttctggaaactgcgacgagatgggaactttctgaattaagcagcaattcccgcgctggttttctggggagtcctcgcctccagaggtttgtttttaaaacaggccccacttcgctctctccatttgctttgcaaaagcagccacaccggtggaggcttctgttctcaatgaaattcacttgcggctttttaactgctccctccctctccatc

SEQ ID NO: 40952 - DNA, 2300 bp, Homo sapien
gttttaaggttcactggtgtcttttaagaggcagagatagaccaggagggagcaaaagaaggaattaagaattttcctttcttccagagcctattcttttcttactaaacacattaaccaattttctacagaagtggtactgtcaaaattcttcctcatgaactgaatctgggggttcactaaactgaaaagcatctctggctaaaaatgcaccaactgtacaacacaaaagattaaaattaaaattatggaaagttgtctttgaagggataagggtgaagtggtctgtaaatttaactaaggaaggcagtggctaaccctcttctttctacacaaagaacccatcactgatgagtttgcccttacactggttagataccatagcaaacttcctagtacaaatagaaaattgattgtaaaccagaacatgtagaagtgaaagagaccttggacagacttcctaaaaatactgccaaggaaactgagaccaagaaaattgcccaaagtgacgcaggtgattaatggtagcgctacctctgcttggtcttgtgtttacttttgcctttaaatattttaaaagacactgatgaccactgatcttgaatggatctcaaagctttgcaaggaggcaggggggcttacttagggaagacttcctttctcccatagatttaactcctttataagtataattcatttgttgtgtgcatatatgactatatttggaaagaagtagtatttatggtgctgaagagatattcagcatcatatcaagatgatcaagaaatatcaagttatgccaaacactggggccactccctacactgaaatgtttccaaattctgtgataaaaatcaaaggctcaaaagtcaagaaacagatccactgtttctgcaatgtgttttgtgaactctatttgtgccctgtgggccagtctcagtgatggattttcttatctatgaaatgggaccaatgacctcaactcagatttacttgggtgttctcaggcatgcatcaaaggcatactgctgaaattcttagcacataaataccactatgtaatagtgagtctgtaaaatagttatgaataggcaataatggaatagttaataaatatgagtattgcaatattctttttatatgattgtcttttaagtcatcaaatttctgaacatcttctgaaactgaaggaatagaaaagggaatttaaatagtataaaatgctatcataataatatggtaactgcgggcatatctatagacattcatactgccacggttagtggcataaattcttatcttttgcttaaggaataaatacattttttcctacagtagtgaatgcaggacagatttcaccagaatgaaattggatggcatcaagtctatttaatgtaacactttgttaaacagaatattttccccaaacccaaagcacctaaaagtttaattcaggagactttggaaatgagaggaggattaagaatgaaaaatactttagtgggaagtgaactttttaaaattatttttaaagaatcaaggccccaacttcttcagcacttcaggcaacggatcacaggtttttgttttattggagaagaaacaaagtaaataacagttctgaggatgaacaaaagctgttgggaatacccatttcactcctcaaagtgggggcgcgttttatgaataatttcagccggctaacataccttcctgcaaaacacagacaagatgtaaattaaaaagtggcagagttgtggcatattgcaaaagtttaaagggagtcatcagtccttcagtcagatctccctgcagaaaggttggcgctgaggttggaactgaccctagagggctggagaggaccccttgggggtgagcagccgggttctgggacccagcaaggtcagggggcgtctccccagctactctttatctatcccccgcactctggaaagcccgaagaggattcgctccaagttaggcgcgctgttggctgtcaacgttctttaggacctcagggaaaccgggacgtttctggctttaggacccaggaactccgaggcagcctagacttagatgccttggaccacagcaccacctacttatagaagcatcccaagcctcagccggtctgcatctccatcggaaagtgcgcttgccacatcccttcggatcacttcgtcctcccgagagcgttctgccttctacagctcggaaagaaagaaatcttagctgtgaagtgaccgtggagaaagcgcaggaagcgacacaattggttagggaggcagagagtgtgagcg

SEQ ID NO: 40953 - DNA, 2300 bp, Homo sapien
taggggtaggcttgtatgtaaatgccatttagagaagcacagatgtgatcgaataacattattccctaattttgaaacattttgtagtcatccttagccagaacctagagaataggtgactttttttccagagttagtgattgacactgaattgtatatagttggagaaattagtttgaaagaatcaatgatagaactgaagagaaaatctttgaaatagctaaaaatgatatccaaactaaggcagaaagtgacatcaaaaagggtattacaaaaattagaaagggcagaaagtctgagatgatgaagattttaatggtaatggtggaaggggttatcagttttaagttggaattcttggagatgaggggttatcagttttaagttggaattcttggagatgagatacatgatgaaaattgtcataatttgaggaataaaggaattttagggctcaagcttttaaagagtcatcagtatggcattatatttgtgttgaatgacagcagaggaagagacagcaaaaaaagattcttaatctgttaaaaagtaatatgttttcaagaggttgatagacgacggatcagcagactatagcctgggaatcagatagcagcctgtttttgtgtggttttggggctaagaatagtttgtaacagaggaacatttgcaaacattagcaattatagaatattaactttataccccaattaagtgaaataatttctcttgaaaaagcattctattcttattaatagacctgtattacaaaaacttttactgttattatttctgtttcaaaatttttaaaaaattgtggaaatttgattctcgtttttcatgtgagtacttatatagtattttcaattgttgcttcttgatacaaagtctgaagtatttgctttctgcttatgaggcagaattgagaggcatatgtagatttgagaacaggacagtaacacctgatggtagaggagcaaggctattgaatctattgtggagagagacgtggcaaattaaaagttactagtggagtggggagaggtagcgtgcttggaaaagaatgtttttatttaagattagtgtttctatagggcaaagtgatgagaagttaaggttttttaggtaaattttttatcagatatgacgttcattcatacaagtacacaaatataaatgtactggtcaatgatacatatttttttcaaaatgaatagcgaatacatttatgtgaccaccactcagattaataaataaaacattacagacatccttttttttttttttttttttttctttttttttgagacagagtcttgctctgtggcccaggctggagtgcagtggcgcaatctcggctcactgcaagttccacctcctgggttcacgtcattctcctgcctcagcctcccgagtagctgggactacaggcgcccaccaccacgcccggctaattttttgtatttttagtagagacagggtttcaccgtgttagccaggatggtctcgatctcctgacctcgtgatccgcctgcctcggcctcccaaagtgctgggattacaggcgtgagccactgcgcctggcgacatccttaaaccttcatcttgacccctgttagtcactactcacaccccctaaaggtaagctgtagtctgatgattcattttgcctgtttttgatttttatataggtggagttaagcatttaccaccatgtactgctttgtatgacatctttcactcagcattgtttgtgagtcatcatgtttttaggatagcagtagtagttcattgatttttcagtgccgaatgttaatctattatgagtatgctgtggtttgttttctcattttaacattgatagacttggctattacaaatagtgctcctgtgtacatttttggaagtgcactttgactatatgcacccatttgttttggatgcctcgaaacaattgctggatcaaaaagtatgtttggctttgggagataaaaatcttacaaagtagttgtattcctgccagaagagaataggttccagttagtctacatccacaccaacactggtattgtcaggattttttaggtttttattgtaatttttagtatgcatttccttatgattaatgacgttgagaaccttttcatgtgtctgttggccatttggttgtcttcttttgcgaagtgcctatcttttagccatttcaattgcaaggtctgtcttgtcttactcatttataggagttctgcatgtaatttggaaggttcgattttgctctcatggctaaataccctttgacc

SEQ ID NO: 40954 - DNA, 2300 bp, Homo sapien
tcccagctactcaggagtctaaggcagaagaatcgcgtgaacccggcaggcagaggttgcagtgacgcgagatcgcaccactgcactccagcctggcaacggagagagattccgtctcaaaataaataaataaataaactttacatcactctccaaaggcctacctccttcttttactcatatacacattcaaaaatatttattgagtgccaactatatactgggcattgtttagactttcgagaagcagttattatatttaaaataatgacaaaatccctgatcttgtggaattaatacaatagtcagggaagaccaaaagtaaataaaataagtaaaatactgtaaaacaaaaaaaataaagcaggaaagcaagatgagaagttcttgtaggcaggttagttacatttttaaatagactggtcagggaaggtctcattgagcagatgacatttgagcaaaatatgaaggagacagggaaagagctatgcagataactgggagaagaacattccgggtagaggtaatagcaaatataacaggacaagatgaaagcaggatgggagtagctgaggaactgaagggaaatctgtgtggttggagtcaagtgagcaagaggggaacatttaggagatgaggtcagagaggtaatgggtccagatgatctactggcttgttaggtcacttataatacctactacatcttttactctaaatgagatagcaagccttggagacctttaagcataatttgacttttaaaacttcactctggctgctttatgaagaataaagcacaggaggaagaggggaagcaaggtgattagtgacgaggtgattcccaaaatcaaagcaggagatagtggtggtgtgcactagagttgaaacttcggaggtggtgtgaactgattgggtctgaatatgccgtaaagattagagttaaaaggttttttggtagatttcatgcacagtgtaagagaaaaagtcaatgatgactctaaggttttgagtctggggaactgtacagatggagtggccattcaccgaggtgaagagtgcagctggagcaggtttggtaagctacatggggaaacttggtttgggacaagctcacgttgaaatgctgggtacatttgagtctgggactaatagtcagttttgcggctataatttgggagttgtcaatgtgcagactgcatgcaaaggacgttaccatttagggcattggtctagatggagaagaggtccaagatccctggggctcttcaaaatgaaaaggcctaaaagatgagaagtaactagcaaaggacactgcagagtacttagaaaaaaaccccatattccttaccataatcatgacctgacccttgtcaaactctttaaccttactccccagtacacacaggccattcaatttttgaaacgcacacactaagtcccttcctgtctcatggtcattgtttttgctgtacgttccaacaatcatgtttttaccctggctctagttttaatcacctccttctcttaccacagctctcagctaacttgttactctatcagacttttctctaatttccttaattcctatctgagttttctctaaccatcctaattaaataggtccaacccaaccatctccaccaaattatggctcttactatatctgaaatttgtttcacttattttctgtctaaaaacccaccctcactttaacaatcgcttacaaaatgattagcgtatgccaaatgaaaaagcctagatattcttccctgtatgtaacttcctggaaagcaggggcctcctcatgttgtcctttgccgcatcccaatgcagtcacattgcctcagcaatcaattctgagctttcaatagttattaacggaatagactgcaagccactgactggtaatcgaaggccagcattagaaagaggataccgacaaacctacaaatagagggatctgtttccgtcactcgcgccctaacgcaaagggtgggacaacccgcgcgcatgcgtcgttgtcctctgctctccagggtaaaccccgcccctttctttaggccagttttaccacagcacatgcgcagtacaggatctgtctgttcgtttgtcggcgctaccaataaagttttagtgagcacagactcccttttctttggcaagatggcggagtacgacttgactactcgcatcgcgcactttttggatcggcatctagtctttccgcttcttgaatttctctctgtaaaggaggtgagggggtctttgggcgcaaggaaggcgtgggggcggatgaggtg

SEQ ID NO: 40955 - DNA, 2300 bp, Homo sapien
ttgctgatagactagatatgggaggtggtgccaaaaaaaggaatcaaaggtacttcctgtaattttaacttgtgcaattaggtaaatggtttcctcacctatgacagggaaaaacaaggtgggaatgcggaaggtgacagcaggaatccgcagttctgtgtgggatatgttaactttgagatgcgtatcagctagctatctgagtacgtcaagcaaccagactgggttttgggaaggtttatcagtttgggactgatcagcatataaacagtatttctagacataggatggtacctccatgagagtgccacgcaggggctttagctgcagcatctgtttttatcttgattaacaacacaaggtagctattttctttttacacacatattattagatttttatatatgagcctttttgatgtttagagagaaataagctgaaagtcacccagctactgaaaggtagagcctggattcagatctgggagttcttgttcttcctattgcaccaggttgctttactggagcattaaaatatgtgaatttctgagtattttttaactttttgaatgaaagatttttaaaaagtctgtttagaaagaatgccagctcattcagaattgaatccaagtatatacattcactagtcttctctgttgttaagtgacttctctggggtctatggtttgatggtttttttcctttttttaaacaaacaaacaaaaaaacctctgcggttgactggagccgacaggtgaggaatggagagatgttggtcaaatagtacaaacttttggttgtaagatgaatatgttctggagatcgaatgtacagcatggtgactacagttataattctgtattgtatactttgaagtttgctgagagatttttaagtgttctcaacacacacacacacacacacacacaggaaatatgtacggtgatagatgtgttaattagcttgcttgtggtaatcatttcacagtgtatatttacatctaatcattactttgtataccttaaatatacacaatttttgtccattacacctcaataaagctgagaaaaaaaaccctccactcttttgacttgtgggatagtattatttctacttctcaaatcaactgccccttctttactgaccaataactttcggctgcattgcagtgatttttagttttttctcagcttacatatttcctctacaatctcatgtccccattgcttcaaatactaaatatacgcttatcatcctcaaattttttacttcctgtccagacatttctccttaagtctaggagatgacgtccaaagtttcctaaaagcaattagtctggtgggaaaggaggctcccccatccacccaggagtaatgaggagcgaagttcaggaactgtgaaggtctcattcgtacattcattccttataagtacttacatactcgcgacagtttgaaacctagtgtggcatgcagacatggatgaagcaatgacaggcacgacgagcgttaatgaagggtataagctagcgcgagggcattcaagggaacttcagagcgcaaaggaagaatcccacttagtctctcaaaactttggagtttatccgtttagtcgattaaaaagtgaacggaaagcaaatcccattacggaaggaggaaagttggggacaaataagggattcgtgcagaaggctgcactgcggccggccatgaagagaataagggtacttaagggagtgtgaagagaatgaacaagcctaggtagaaaaaactgaaaagccaggattgacggacactaaaaacccagcatttgttaaaaatccacgtcaacacacacacacacctcaccccgagccagcaccgtagccccgccagcagccagggtatcctgagattgcgggagcgccacgcaccgcccacctagctccgtccaccgtccagctcgctccgcccagctcgctccgcccccttccccgaaagcccctccgcagagccgcgtgcacgtgcgtggcggataccgccccctctgctctcttggccaatgagaaaaagctacgtaactctccaccgcccggtggcgggtcacgtgactgcgtctccccgccctctcaccccgctgcctctaggttctgggaagatggcgaaggtctcagagctttacgatgtcacttgggaaggtaacttcgggtgggggcgggtgcggaaagactaaaagcgctgggaagccgttcgggagtacccgctgctttcggggagctgggttctctggtgtctttttggtaccagagccctcactgtacgg

SEQ ID NO: 40956 - DNA, 2300 bp, Homo sapien
tgctgtagtgatcatttttattttgtttccttgggttaaattctttgaagtaaaattgcttgattaaataagatgtacattttctgtggttttgataaatagttcctgattgttccctagaatggtaacatcaatttacttgcacaccagcatttactagagtccctctttaacaacactggatactatgattcttttttaatctttacaagtttgataggtgaaattggttctacctttttagttcatttttacgagctctttttataaaggagagcaaccatttgtcaaaagtatatccttgttatatgctttttaaatactgacttcttaaaattatagaaactttacatttttagaaaatcagattcatcaatttttaacattatcatgtctgctgtcctttaatagcttaaaaatatatcaccttttccccctacttcatttgcaattttatttttttgcatgtatttctaatatttatttcatcatcaaatttaggttataccttatttttaacctaccattaaatttacttatttttttcaccatgtggtaccaccttcagttttgctttgtttggaatctaaagagtttattgaaacagaggtgaatgtacacttaagagaaatgaactgagaaatctcaaaaaatgaagatttacaaagatgtaggagcacctaaaaatatttttttagagaaaatgataattatggtcagcctacccttttatctagtatcacaaaactctttttggtcttaaagctagttagttacaaaatgaccattttttttttctaattgaacacttagaaggaatatttatgtttaggtgactggaaatgcatatctacaggtttttttgaaactgtgaaaattacaatcagttcacttgattcatttgacatgtttgagcaagtcattataggaggcaggaattttttgatggaatgttaaattatcgtaggatatcagttttagcaccagtcttggggacacagtggcaaaaacgtagcagtttcgaaaatgtcagatatatttaacattcgatattcctttctgcatatgaacagttgtaagcttttttaagtataataggtcgcaggcagctttggtagcctatatctagaactattttttttctttaagagacagagtctacaacatttcccaggctagacttgagctcctgggctaaagtactcttcccacctcagccttttgtgtagctggcactacaggtgtgtcactgtgcccagctctggaatttttaaactccaaataaatatctatagtataattttcatatagccctatttaatgtttctatagagagaaaaagggatatagaattgtgccatgtaacctttttatatttttaagttacttttataagtttgtttctgatttatagtttgtttttagttattccagggatatatgttacatccattgaccatattgagacacttgttctaaagttttaaaactacagttaatttttttgtgtcagcactaccaatatgtattataggttaagtatccataacctgaaaatctgaaatccacaatactccaaaatctgaaactttgagtgccaacatgatgctcaaaggaaatgctcattggagcattttggatttgggatttttgcgttagggatgttcaaccagtaagaatgcagatattttaaaatctgaaaacttctgaaatctgaaacatttctggtcccaagcattttggttaagggatacccaacctttgtaagcaaaaatacattcacattatgaaagacaaatttttttacttcatttgttattgaaactagatactatacagcaaggaacagttagtattatacattaattatgattgtgattatagttccttttcataagtccagccttttaaaattccatatcaacggaattaccacaattctttaaggaaaaattgtgatgttggtaaagtaacacacagtaccaaatactgtaacctttagttatatatacttttgtaaggaagagaagaaaactttatttagttctagtactgactctaatattgtaataacaattgttattctgttttaagtagattcaaattatttttacttctctattcttagtcttgttgagtcactgtgtgtaatgaattaacttctctatgcacctagaatagtactggctatgtattatccctgacaagactgaggaaatagtcactttctgcgtggcctaacaatggcctagaaaagctggactagaccatctgttgagctccttctagctctaatttta

SEQ ID NO: 40957 - DNA, 2300 bp, Homo sapien
ccttggaaaagaaactacatcttttcaagcctcaatttctacattgcaaaatgggtgcaataatactgcctcccttgtgaagttggtgtaaaaattaaagatgataacataatagcactaacaaaaaagtattattgttatttgttctgcttttacccttttaaatatactatagaattcttcttctatttttagaaacttcagaatatttgaagctagtttattgtttcctctcagtattctcctatggctaaatagcctaagttcctaagtttttcctcgtcaacataaattcaagttccttctacatcttagtttctctctttatttctttttgcatatgtagtactaagaactggatgcatccctgtagatttggcttgacaaactagtccttgaagtgtggatggaatagggcagtggaggaaagatattcatgctggagaaccgtgtagtaagcaaaggagaagtcataatacatctgtcatgtttatcaacaaatgggcctcactggctacaaatataatcatatgggggaaaaagaattttaaagagggagcattgtgaactcctgtaatcatgtgactatagattctatccaatgtaatgaaataccaacataattgtcattaaaggagatagatctctcttttgaaagcaagcaaccacagtatttatgtgagctacaagcacaatgtcataatacatactataatccctaatcccttttttctttttttcttttttttttttttgagacggagtcttgctttgtcgccaggctggagtggtgcagtggcacgatctctgctcactgcaacctccgcctccggcttcaagcgattcccctgcctcagcctcctgagtagctgggagtacaggcacgcgccaccacgcccggctaattttttctattttagtagagacggggtttcaccatgttggccaggatggtctcgattttctgacctcgtgatctgcccgcctcggcctcccaaattgctggcattactggcgtgagccatcgtgcccagcccatccatactataatccttttttgctcccctagaattgtcccaacaggatgctggaaaactggagattatctgcaagctacacataccctgggctttcagtggctgttggctattgcagtccactctggttgaaagaggctggtgacacagttaccttgtcctatcctaagagtcacaactcagaagattcaaccttcagatttcctttattcctgagcccttttattctggccttctggtctttcttccattcattccatatagcataacgcttagaatctgttggtgttcatccccccccccccacctctgctaagtattagttgtgtgacattgggcaaattattctactttgtaactcagttttgccttctgttaaaatgaggatttttttttacagtactttaacaataaattgtgaccattaaatgagataatgtatctatagtgcttagaagagagcctggcaataataagcgctatttatgttaactgttattttgagtcattattattcatacattcaacgaataccactgtgctaaatacaggggatgtgttggtacatcggacaatctcttaccccttatggtcatatttcttctgattttgtgagacacgcaatgactttcgaatctgactcctggatgcaatttcagaagctgctgttggtaactgtggatgaggcacttaccctctctgagcctgtttccacatctgtaaaatgaggattaataaaatctacttggaagatttgttttgactattaaaaagacaaaatatgcaaattatctggcacatttgaagtcgaatatactttccttttcacagtcttgtggccacacctgaggctagggaactccactctaggcttagaaaacagtgctgtcttcttaagtgctggggaggagtaagagggtatggcgggaactcatctgcaggaagggtaaaacccagaaggcgtgggaggagacagagacaggagggatgcagggaccgcccctggcctacaactcccgggatgctccgggagcgccccgccccgccccaccccgcccgccgtggcgggcgctgcccacccggcggagccgagcggcgtgcagaggctacaagtgccgtagctggtgattgggggactttctccgggaaccgtgccgggagagcgcgcggtgctggagccgcaccgggtggccgaagcagaaggtgagtggcggggagtgggatggggtggaggctttgaatgcaagggtgagagccctggag

SEQ ID NO: 40958 - DNA, 2300 bp, Homo sapien
catttgatgtattcagttggtatcttgagaaaagatacatgttttctgagcttccattaaaaaaatagatttaagacaaggcatagtgcctcacacctgtaatcccagcactttggaaggctgaggtaggtgggtcacttgagcccagaagttcaagaccagcctgtgcaaaataacaagaccccatctctacaaaaaaatacaaaacttagctgagcgtggtggtgtgcacctgtagtctccgctacacaagaggctgaggtaggaggatcacttgagcccaggaggtcgaggctgcagtgagctgtgatcatgccactgcactccagtctgggtgacagagtgagatcctgtctcaaagttaaaaaaaaaaaaacaaactgtagatttgcccactggctactttagagaaataataatgctgaagtgtacttttcttcaaaagatgtgtctattaattttcatttcagaggtttggtaacagaatggcactggtatagatttttactagatgatttttccacctagaaataaactgagacaaaacattgctaggtggttcatgtgactggaaatccagaggacaggtgaaggtgaaaagcacccagggccgatagagagattctataaagtggtccagaaataagagttgaaaaacttaacagaccctacgcagtttaaattgatgttcttagctcaaagaggccttttaaaaataattgttataagcatcagaagattgcagctgaaatggtttgaaatcaactttaactaattttccattcacaaaatatgagaggaggaagccaattgtactgattcacttgagaaacagtacaagggttttcatagtagagaaagaggttgatttcagctcagacagatatttcaagcttcaagggccatgtctagactgagaaggatttgctaaccccaaagtcctatcaagcaaggagtgtaaatgtatttcagagcagctcaggtactagagtttctgcagaacttagatgataagcaacgacaaagccagctgcttctagacccctggcttatgatttcagctttccaaattaaagactgtctcatcagcacatttaatagtaaatcctccaagagcagaagactctgaatcagtgaggactgactggcatctgtgagtgtgtgtgaatgtatgtgtgtgtgtgtgtgtgtgtctctgtgtgtgagagagcgagcgagcgtgtatgttctcattaggggacgatctatgatttgacagcctcactgctgctgctcctgctgctgcttctgcttctgccgcggctgtatggtttgtcattagttggaaagggctgtgagggtttggagaaactgcagttttaaagactgagcactgctaagtggtctccctctcaaatagagtagacaagattttctgcaagattagaaacttggaactattaccacttcatctacccagaaaatcaggcagcgctacagaggataaggtaagagaagaaattgtcctctcttgaatctgtggggcagggggcatggggaaatgtcatctcaaaggcttgctattttataccaaagacatctcaccctctgagagcaaaagaggcaacagctaaatttgtaacaagcttgattattgagcttcttggctttttcctctggtatctttttcttctttattatacttttgccaggcatctaagaggtgtattcatatttatttttcagttagcagatatttagtttttttcaactgggcactgtttcaaaacaattagtttttactgtttctctttccttaagcatttttctccattaagagggaactggtccctcttaatgtgagctggtcaaaacagttactccattctacactagagatgcaataaaagaagttttaagaagtacacatgagccctattcccatagaaaaatgggaagtgaaaggagtggaagtgacggttatttgtgattgggacttgatcagaaattgtaacactgttaatgaatatgtactatgacccttcacagggggatggaactgctgcaataaaggtgggcgctggaaagaagatgttttgagaagtcagtgtttccgagaaactttaagcttctaaagatggaaaacgagacagtcagtgaactgaaccaaacacagcttcagccacgagcagtggtggccttagaataccaggtggtcaccatcttacttgtactcattatttgtggcctgggcattgtaggcaacatcatggtagtcctggttgtcatgagaaccaagcacatgaggacccccacaaact

SEQ ID NO: 40959 - DNA, 2300 bp, Homo sapien
aagacggttgtcacatgctgtcaaatctgtaggaagtcgaaacacctctcgtggttttcctaaggcagtgtcctaaaaagaccaaacattatacattaatctcttcctcttcactgatccacacacacaaaataaatatctgcggtgtggtggtttctctcctttttaagagttggagtctaattcctcttcctttgatgtgagctgtcctactgattcagttttaacaaaaatatacagtagatgtgacagatggcatatgacttctagaactaggtcataaaagactttacatcttctacttcactctctctcttggatcacacattctgagggtggctagctaccatgctatgaatatgcttaaggtagccccatggacagacccacatggggaggaaatgatggctcttgccaacaatcagcattccatgagttaatcatttcgaaaatgtatcctttagtcctagtcaaggcttcagatgactgcagccctggctatcgttttggctataaactcatgaaaaaatcatgagccagaccacccacctgaactactccctgatttctgaccacagaaactgtgtgatatggtaagtggttattgtttcaagtcactaagttttgaagttgtcgtatgacagaaaactaatacaatgcagtaatctagttttcattctcttaattttagagttaaagatcagtatttttaactcactagttagaaataccacatcatgttcaaaatgcctacagagacaccagtctgcggtatgaaaacactacatttagcctactatgaatctaggtttttgttaacaaattttaattggtctatgtacttataatgtaaagttatgagttgctgctagggtttgaatgtggtatcctccccaaaagctgagttaaaacctaatcaccaaagtgatgttactagaagttagggcttctgatcattagggctccacactggtgattgggattaagtaaccttggagaagggactgaaagagggagtttgtctctttttccccctccgccttctgtcatgtgaggacgtattatgcctcctttctggaggatgcaatgttcaaggcatcatcttagaagcagagactgaacccttaccagacaccaaacctgccagtacctggatcttggaattctcagctccagaactcagagaaataaatttctgttctttataaattaccaattctcaggtattttgttacagcagcacaaatggactacaacagttacatcattaaaatgttttacaagagaatatatttttaaaggtctataatttagaagataaacttcctctcatataccaaactgcattcaaattcaaccatttgtttttcttgctaaactttacaagtttttctataggagaaaagtaatcctttatatccatatttcattactttctcctagaacttagatctatatatgctataatatttaagtaaactgtatacaatgtccttactggccacaaaatttttggtgacccattttttctttctaaagcacctaatttagctttctccgaaacagcacctttccttcctttcatattttactgctttatataatattaaattaaataataaatactcaatggcaagcagagctcacattaagtttgtagaatgatcaaatctgagtatcagtgatctaaaaccacaagcaagaaacagaatcataccagcatagtattaagtagcctattagtagtaaacatcaagcttactgtggtcttccatcagtatgttttacagagagaacagagactatcaattaacccatttggtctgttaagtggaggtcaattaagataaattttactgtaggtcacatcatttagagcatgatgtggtatttccagttagtgaaataaaaagaaaacagactagtccacaaatgctactgggacaccagagaacttctgggaaaaaattaaacttattctctccctcatatcgtaaacaaaaatattccatattccagtagatcaagtgtctaagtgtgttaaaggaaaaggaaaataatactgttcttataatctcaggatagaaaaagtctttctacatgtaaataaaaggcatgtaagagaaagggagacaagtatttgtcataaatataacccagggctaatatgtataacataaaaaaagcccttaaaacttaacaagaaacatgattatttaaaatgtttagggggatgggcagatcatgacagacgggaggcaggactaaattgcagctccaactctgatggacagagcagc

SEQ ID NO: 40960 - DNA, 2300 bp, Homo sapien
gttgaggtcattccattcatgggaaagcatgaggaaagggaaataattagtaggttgtatgctggacatccttgcactcttatattgctggagcaaaacgtctgggaaagtgagaggaaataaatcagtgagggccttgtttgccttttggatttcttggatttccggtcattcagtgtttccctgacatttttgtattgagccattacaatataaaataaaactcagctgctgtagttctgccaacttttctgtttactaggtggagatgtttcttaaaaactatcatttactcatctatcttttcataaacaaaaggatattttaacaccaaaaaagcaggaagcaaaatctcacaataaacaatccattgaatactttaactttagaaaaaattcacaaagttgtccttgttccgtactcatttcatcagcgttaatcttagattctgtgtttgggatgtacagctgcaggatatcaggtgccatttgaagatttttttttttttttttttttttgagtctgagtcttgctctattgcggaggctggactgtagtagtgtgatctcgtctcattgcaacctctgccttccgggttcaggcgattctcctgcctcagcctcccgagtagttgggattacaggcgcccgccaccatgcccagctaatttttgtttgtttctttttgtttttgttttgttttttgagacggagtctctgtcgttgaggctggagtgcagtggcgcgatctcagctcactgcaacttccgcctcccgggttcaagcagttctctgccccagcctctggagtagctgggattacaagtgcccgccaccaagcccagctaatttttgtattagagacggagttttactatcttggccaagctggtcttgaactcctgacctcgcgatccacctgcctcggcctcccaaagtgctgggattaacaggcctgagccactgctccgaccgatttttttttttctttgaagttccggggtacatgtgcaggatgtgcaggtttggtacataggtaaacgtgtgccatggtggtttgctgcacccgtcaacccatcacctaggtattaagcccagcatgcattagcaatttttcctaatgctctccctccccctaccccattctctgacagaccacagtgtgtgttgttcccctccctgtgtccatgtgatctcattattcagctcccacttacaagtgagaacatgtggtgttttgtgttctgttccttcgttggtttgttgaggacagtggcttccagctccttccatgtccctttgaaggatatgattgtgttcctttttatggctgcatagtattccatggcgtatgtgtaccacattttaagtacaagggacgtgaacagatacgggagttgaaaagcttacctcagactctgtggaggttgagtttggaagatgagatgactgcacacagcagataggaggcttttgcaatagttcacatgatgagtttttcattaggaattacttgaggatgatgaaaaagattattttgtttaaaaactatcatttctagagatagtgaagcataattgaggcgcttctggtaatttgatttcttttattctaactgaaggagttcactttagttccacaaacctttgatgggcaccttggctacctgaaacactgcatttaagatgtaaagatgatgtggtctctggtgtcaagaacttgatgcaatgaggcttattctcttgtcttaaataatgttattaagttgtaccaaaatttcctttgctacataagcagtaaatgtcactttgtctttttctattccaaagaacgaaacaaaaaacttatttttaatcaaattgtaattgtcttttgatccggcaatttccttcctaggcatttataaatatccttttcctagaatcttcatttagtacaagtctttttatatgtttttatatgtttcccagctatatttcacctagctaattcatacttcattctttcatgttggcttacatgttacttcctcagggattcctttcttgactagtcagaatctacactatagaatctgtattatgcgttgccatagtaaccagtacttcatagactttatcatacttcgtagcatccagtatgttttctttgctaagattattgattttgtattgaagggtcccatgtccatcgttttcaatgctttatctccagggttggagcatgcctggtaagtaggacataaatttgtctcacaaattaaacagctttatgaagacataattgacaataaactacaaa

SEQ ID NO: 40961 - DNA, 2300 bp, Homo sapien
agcccaaaagtgaaggcaggaaggctagtcaggaggctactagagttcaggtaagagataactctgatttggattagggtggaggcctagagatatcaaaatgtggagctgaccggacttgctaccaagcagacagtggctaaaagaaataaaccccaaatgactctggcacaagtgtctcttggtaccaacctgggctagtctagtcggctaaaggataagagaccacacggagaaaagtcaagaggagaccatgtgaaagaatcttaaacaagcttatagtctgagaccctacccccaccctccaaacatatgaggaagtccagccaaatgagcagagcttcccagcagatccattactgaacaaggatgcatcaatgagcccaactaggactagaagaaccactcagctgacccgtagacttgtgagcaataataactgcttcttgttttgagacactgaattttggcttcactttctaatgcactaactaaacatggtgataccatctactgacatggggtgactggaagaaacacggtggcaaagaggaaaaggaaaaaaataaaaagaaaaatcaagcttatcctctctcatcctagtcaactcttaacctacccttcaaagctcaacttagatattaactcctccaagacgccttcccagatccccagactagtttaggaaagatattcaagtactaccattgtattttgtacatatccctatcactgccttcccatattgttttacaattatctgtttacaattttcttcctaactagctaatagtcctcttttgttacggaaggtgtcttgttcattttgatattatcaggacgtaacacaaaacaggtactcggtaaatatttctgaatttaataaatcaattagcataaacttattttatactttaatgtctgttattataattaactgtagatcactatttctcaaagtgtgatctctgaaaacatgcatcagaatcagcaggggtgtgaattttaaaatgcagatctctgggctctatcataacgaaaatgccgttaagttgtaaaaacaagagtaaggatattctaccagctacagataaagcaaggagtagcagtgtgggagtaaatccacttttcctcactatcttctagagatgttctctaccagagttcttaatgtgccaggaactgagtaattaaaaatgctatgactggaatgtagtttctcttctaagaaacggctctcggtcagaggaaacaggaactgggggtcctccaaggaggtgtggtttctcaacgcacacgttcacaagcgatgctccaggaggaaggaatgttctcagcgtcccccgaaacagaagccaggctgtggacacacagcagccagagccccaggcactacccgcacgccagccctcagacctcagacctcagaggctgggctgctgacggagggggcccagggtcccgttaccgaagagcgcgcgaaggcggctcccaccgggttctgggatgggcatcattccccagaagcagcggcctccgtgagtccacgcaagccgccacggtggcttcgcttgccagtcagaaagaaagaaattgcgggaagggtcaggccggaggcagccgaaaggggaaaggaacggagtacgaagggcgccgccgcttcccacctgcgtcaagctccagctggtaacaaggcagcggctcaagagagagcttgtaaccctcgaagcggggatccaacagaggtctcttcacccgtagggagcaattagccgccacctccatcgctttccagggccgcagcgtgagaattaataaagcccttgttgaaaggtccgcgcttcacgcctcgcacagagactgggaagcggcgtggttcccatcccagaaaacactgcggtgcgaactgccttctgggaaatgtagtgtccgtgaaaaagttgagactgttgcatgctgggctatgtagttctcctggtacttaacgcgcgcgcgacggcaaggtctgaactctgttacccagaggccctagcaaccaggaggcggcccgcgctggttaaattctcacattataggcagggtggcgagaccccgccccggaaatgcgtgttctagctttctgtgtgcttaggtgcccgagctactgagggtctaagtccgggcagccgaagagtgtggtaggtaacggtcctcagcgcaagggtcatttcgtcgctgggaagggacggccctcgcccgcggtgatggtggtgagctatgcccgtggtcctcagggccgggacccgggcccagcccaggct

SEQ ID NO: 40962 - DNA, 2300 bp, Homo sapien
ccagatgttcggaatagaaacttttataatctcaattgtaattctttccagtgacatgtttcatttcttgtttagattcttacaagctaactattaaaggcggtgaaatgtaatttattaacacaatctattacttaccgttctctttctccagtttctatcaacttttggttaatcgctgctctcatctgcgcatctttgttcatcttgctaacctggacatcaacatgtactttcagatatagaacatttacaaagcattttctgctaaatcctctaggcaggcatcctaacatgtttaccattctattaactgaaggggtgatacatttcaagtgtgttaataatatcattactctttattaaacacttatgtgcttggcactgggctaatgcagtgtgggtttgcttttttttaaacatcacatttaattcccagaacgtattgttacatatttatattaataaaataatctgtattttactgatgaggaaactgaggcacagagatagaaagtggaaaggcaaaatttgaactcaagtactttgaccctaggagctccaaaactgaacataactgccgatcacttctgcagagactgcatccaaaaattgggagaagtcatacatactaaacatcaaaaaaagattaaatactattagtaaaaaaataaaattaccaggccgggcacagtgggtcacacctgtaatcccagcactttgggaggcccaggcaggtggatcacgaggtcaggagttcaagaccagcctgaccaagatggtgaaaccccgtctctactaaaaatagaaaaataagctgggcttggtggcaggtgtctgtaatcccagctactcaggaggctgaggcaggagaatcgcttgaacccaggagacagaggttgcagtgagccgacattgcgctgctgcactccagcctgggtgacagggcaagactctgtctcaaaaaaaaaaaaaaaaattaattaatcaaaaaaaataaaattactagataaggctctaagtgttttgctttactcttcactaggatgaacccacaattacaactgctaaacctaagtgtgtggatgtgtgtgtttacacacacactgctggtgggataagaagaaaacaaatctcaaactaattcctaacttacaaagtcctcaattgtcagtaaaaacagacaacccaaaccaaaatgatgttgaaagaagaggaaagttaggttttgaaagcgttaaagccacttaaaagtttaaattaaataaaacttggcgtaaactaacgttttcccacctaatctgtcactaacttgagattacttttgttgtcttccatctggcctattgaaaattcagactggcaatgagttaccagagttgattttttttttcttttttgagaggaacagggaaaaggagaagttgagtgagaactaggaaatgcttgcttttgtaattggaggctaacattttcaaaataactacaaggtctagtcagtaccactcctggaatattgaacttgatctcgtcttggctcctaaaatacggatagtgaccttggacaagtcacttaattcttaaaggcctcagttttctcactggtaaaacaagggcgctagggtatccctcccagttcagacattcttagggaaaatagaacagggcggagacagcgggagaggcgggagaggaggagccagaaaacaaagcgaggactggtttcaggccaactccggtagcacgccctgtcggagagccctacaggcccgcgagcgcgggtcggggacgctaacgaaagacagtacatcgaaaggagcctgggctgggcccgggtcccggccctgaggaccacgggcatagctcaccaccatcaccgcgggcgagggccgtcccttcccagcgacgaaatgacccttgcgctgaggaccgttacctaccacactcttcggctgcccggacttagaccctcagtagctcgggcacctaagcacacagaaagctagaacacgcatttccggggcggggtctcgccaccctgcctataatgtgagaatttaaccagcgcgggccgcctcctggttgctagggcctctgggtaacagagttcagaccttgccgtcgcgcgcgcgttaagtaccaggagaactacatagcccagcatgcaacagtctcaactttttcacggacactacatttcccagaaggcagttcgcaccgcagtgttttctgggatgggaaccacgccgcttcccagtctctgtgcgaggcgtgaagcgcggacctttcaacaagggctt

SEQ ID NO: 40963 - DNA, 2300 bp, Homo sapien
tcccattttaaaatattttcataacgttttcatttttatatatttttgaggtaataaaatagtatctctatgagcaaatttggtttatttccatatacagtactatgaaataagaactatccgctatttctcacctttcctgtgtactatttatgattgttttcattgtgataataggtagcagaatgatgagcatccctatcacttactttagaacattgttttataagagatgaagtgaaacaaaaaacttgtttgggtaggttttgtgattgtgtgcttatctcaggctcaaaactttacataattaagcccagctggttcaaagactacactttaaattcatcagaaagatgaaattgtctctcgaaccaaagatcaatttgaatccttttctcaactatacccaatttataccttttctcatactcccatactgttcattcacttgttccttcattttttcccttgcccattcatccacaaataagcatcatacaaagtcagagaagtcatttcctcctttccaggagaggcctgcaaaatttcaagaactactgtgttgaagaggaattatgcatagctgcttctcacagaaaaacagtagtgggggatctaagtcagagggatgtctgaatgttttagcaactaaagctgaactctgaagggcaaacaggaatgagaaacatatgagaaagggggcttctgggttcaaaggtacttacggatgaaacaacttcatagtggggattctttagtctaactagagaaacacgatgtcagatcaagaagggcctatgtgttaatgctgaatgagtttcattctacattgagaaattccaagcaggggaataaaataaccagacttgaattttactaaggccacttaggcaacagtgtggaatagatattggaggggtcacagatcaactaaggcaaagaaatactaagtctactacaataatctgggcttgaactaagacaattacgagggcacgtagtggataatttacagccttgctatattcagaagtggttctcaatcagcagcatgagcaccagttgggtactcgccagaaatacagaatcttaaagccatgccccttatcttcagaatcagcatttcagtaagctcctcagataatctatatagctaggaggtaccattcagaaataaggaatatagcaggggcaattattgggggaaaaagtcattattttaggtaaggtcagtttgaagtgaggatattctaaaaagttgatccatagcagttgggtgtctgggtgtggaggctaggatgaagtctggtttggagacagtttagcatttatcaacctgtatttgaagtcacggtctgacgcaagtttcctgggatttgctcaggaaaagtatatccagttagtgaggcagagggccctggagggagccctaggaaacaccattatctacaagtcccagacagcaaaaggtactccacaagaaacagaaggaacttccagtggtagcaaaagcaatgtgaggagtgggaagagagttccaagtggcaggatggtcaacattcgcattttccagcagaagtcacgtaagaatagacaagagtccattggatttggcaatcctgatgtcagggtaaagctaatgggtggagattaattcccattaagttctttcttgaccttagtatgtggggttgcaatttaaagattctgcattcaaagttcagatgagtagagtatgtggaaggagcttggtatggagccaacttgcaaatgttctcttccattagatggtaaattctttgaagcataaggaaggcacataaagatgagtaagacccagtcctaaccctcaaagtttataaacaatacgaataagacaactgtagtacaagatggggcattacaatttataaaatattatggggactcaaaagaggaatacaccatatgcagtcagaaaaggttgcttacttctcagctgttaacacagagaactgtacatactaaatacttaaactacattaattgcttttgcgctcaacaaatttggtgaattagtaataaagacaaagtcccattcatttcaaaatccaagcaaacttcaaactcattcatgagatatttattaaaataacacatttagggaaaaaaatcaatacaatgtatacatcattactgaaaactgtataccatcatacaaaaaaggattttattttgggaaattgttttctaatttatggcaagttttactttcagaaataaaaccacaacaacacaatctaattcaatcttaaaggctg

SEQ ID NO: 40964 - DNA, 2300 bp, Homo sapien
tttggatttcagataaactctgaacaatttttagcatatgtatgttctaaatcttgcttggaaatacttaaaactggaaaaaataatttgttgcttattttaatttcaaatttacctgggtggcctgtattttatctgtcaaccttactcccaacctctacctttcctccatcccccagcaagtacttagaacagaccctggaacacagatggccttgtatgatagatgaatgagtaggtggacagtgaccttgaacaaggagtttactaaaacaggcaactctttcaagaagtttaataacaagtaaactagagagtttgcctcaattaagaagaaaagaaaggatttttggtttgtgtttagttttttagtaatgaatactgtatatctttctaggaaaagaggagaaaggggaaagtgaagtaattagaagtgagataagggggatattgttagaataataatcagtaagatgggaagagaagagttttcacaaagagttcaaagaggggattgaccatgtcatggaagaaaaatacttcttcccgaaagagaggaacaaaaggaaaggaaggagggaaggaaggaaggaagggagggaatgaaagaaagagaatttaaaattttctacttataaaaatttttaaactaataaaaaagtgcaaaggatcatacctacacttaaattcaaacattgtttaaaatttgccagattttttttcagcaaaaccattttgaagtaaattccagacataaagacactatgaccccaaatacctcatcatgcaattccatcacttgaaaacactctttgactaaagtatgataccactattatacctaataaaatgaacgcttctataatatctttcaatacttgttacttaatccatattcactttccctaatttgttctgcaaacgtccttcatagctttatattattattattattttttacaaaccaggatccaatagaagcttatgcattgctatttgggtaataatcttttaatatcttttaaaaacacataacattttaaaatgtagaaactgcaaactaggtaggtggatcttctcatctttttttgttgtttgtttttgagacggagtctcactatgtcgcccaggttggagtgcaggggtgtgatctcagctcactgcaacctccgcctcccggcttcaagcaattctcctgcctcagcatcccaagtagctaggattacaaggcatgcgccaccccaccaggctaatttttgtatttttagtagagatggtgtttcaccatgtcagccagtctggtctcgaactcttgacctcaagcgatccgcccacctcggcctcccaaagtggtggaattacaggcgtgagccgctgtgcccagccccttctcaccttttaaagagtagggagaggtgggcaatcaagagatcctgaggttaagatattaagaacagtgagaggatttggaattagcccctggggagcattcagtggtgaataataaactgccttctccagggaggtcagagaaacttgcgtttcattcgtctgctatctggcatcccagaaacaggtcagcagtgctggacctccctccatgccaacagtaagccttcgccctaagtctactgattgtcaattaaagagagagcacaatctcatatgaatgtgaaggggtaaacacgcgtggggtttgtgtattaggtggtcttataggcccacctggggaggattaatgaccaaggcagacaggcagatgaaagtacgcggggaaagagagaaaagaaaagaaaagaaaaaaaacaaaaagaaaatagagaaggagacctagggagacctcaatgaccattgattcctttcgccaaaaggagtaaggcccttccacctatggggacagccttgggaaggcagcacccaggtttgagtgtggaggtttgattatcacggactggctcggggccggcttggttctcccgcgaaggttccagggtgtgtgtgtgtgtgtgtgtccgcgcgcgcatgcaaatcccagaggagcagcccgacagcaggggcggggcaggccacgggagggcggcccagttccccagctctcccgggacgaagcgggcccgccagcgagtcgcagtcccaggagccgagctccagcactagagccagctgcgagcggagggcaccaactccgcagaactggcttttcaatgggacacctgtggctcctgggtatttggggcctctgtgggctgctcctgtgtgccgcggatcccagcacaggtaaccctttgggcacgctaggc

SEQ ID NO: 40965 - DNA, 2300 bp, Homo sapien
gatatggggctgggacagagagcaatatggcagggacagcctttgggtggggtggttaggaacaccctcagggaggggttattccaactgcaacccaaaggataaggaagagctcgctgcgtgaagggtgggagaaacctagggagcaacttgtgcaagtgccctgacatagaaagggtgtggcatgtcaaacaatggagagagaatcatcaaggcccttatgcattctgaggtagatataattattaaatatttaattaacatttattatgactactataacagatttagattgctctaggccagaatgtgataaaggtaaactacgataaactacatgtatatgccatggtatagtttttctttcttcccatggtatgaattttcatcactggaaatagttataattggattgattaatttgtattattcagctagctatgaataatacaagacaaaacagaatcttgacccagaagtgctacctcaggattagaacagaaggctcaagctatataacttaatgcctagttttagagggctttgttgatcgtaacatggcaaataagaaggggaatgcataacatgattattgatagtgagtgatggtattaataagaatgaagggctatgattgtgcatattttccagtgggaaaatatcaccaattttataataatatccttcataaaaatttgcattaaaaggtattttctagaaggcatagtgatgaaaactgaagaccgtctgtcctcccatacacttgatgaaattatttcaatttaacctagctttcactttggatacagacctgccacccccatcccagcccaggggcttaatggcattggtgcatcctcgtcaactcagagaccatccttctacccctttcttcacagaatctagccaactatatcctctacccctactccccatgaaatagcaccatgtgtcaagggtctttaaaaggacaaagcgtgcattttttttcttctctaccatgtaaaatcttatggggaaatggaacggtttacattttagacaaaattagggaatatcacaagtagtaattcatggaagtatttctcttctcttttcagtttatggtcaaatgattctttttggcaatcatcacgagaaaataattatactgtacctcacccaggggcaaatgtgattatacctgaaggtaaatgcgtaaacacaaatgaatgaaatgtttgttttctgcaatattaacactatggcagggtagatgtcacagttttatcagcacacctttccaaaagagcaagtgtggagaagtggactctattaatgcatcccggatactaaacctagccttctggggtttctgtggatttaaacctgaccattaattaacaagagcagattttctgggagagataggaatcaggtattatatgaaaagacatgtcataaacactcaaaactaggactcactgataagcttgtcaatgttttgctataagttgtagtttatggattatgttatatttcttaaagtattgttttataggaacatggattgtagctgacatagatatgccatcaatggaaagactcattatttggggggttctagaactggaagataaatacaatgtaggagctgcagaatcttcttacagagaagttgttttgaatgctacctacatatcactgcaggtaagagtgagggccttgtagtttatatctttattaatctaattctaaaatgtgtatttactcaaataataagaaagaagcatattcaattggtgtgaataaaaacacaactggctctatcccattaaatgcaagtctcagttaagtccaatatatttctgttctcctttaaattatggactaaacatttcttaggagtagttactataggattcttgagtctgcagttggcccagtttccattgtgtatagaatatctatgtcattatgaggtcaggctaaaccaacagcttgttccaacaaagagtcctaggagttctgaaacaagtaaaagaatttaagccttttgttctttaaataaaacaaacagtatttaaaaaaaaaaccaaagggacatagatggaattgtgaaagcaagagaaaataaatcaaaatgttacagttattcggaacaatccccacattccttgtaaaccccagatggtcttgaacctgtaccagcttaatcagctcgattgtcctgtcagtcttgtaatattgttcatgaaaaagaattgcttagccaaaaagctattaagcagcattaaaataataagcagttagcattatta

SEQ ID NO: 40966 - DNA, 2300 bp, Homo sapien
tctggtggtttcctacccccgtcccacacaagctttggggagaggacaggacttaaagttccctgttcccaagaggtggtccctaaacccaatcccaaattattgacttgtgatcccaattatgggcttactatttaacaagtaaagatgattttaaaatattattttataggtattactaaagtaaattttaaatttgcagtctttagcgagctttgttttctgttttgctattgtgttgggaaacaagtactcagtaactagctgtttctggaaaagtatatacatttcgttttgtttcatttggaaatggcaaatttaataaagaaaactgaagaatcaggaaaaagaagaaaatatccttgggcataataaattgtctaaagcaatcaactctttaagaaaaaaaatttaaacacgtttatatccgaatataggttattttggattttttttttttttttttttgagtcagggtcctgctctgtctcccaggctggagtgcagggcccaatcatggctcactgtagtctcgacctcccaggctcaggtgattcttcccacctcagccttctgagtagctgggactacaggcatgcgccaccaaacctggctaatttttaaattatttgtagaaacggagtttcgcccgttgcctgggctggtcttaaattcctgggctcaagcgttcctcctgcctcggcctcccaaagtgctgagattacaggcatgagttaccgtgcccagctagataactcgattttttaaatccaaaaaaaatttagaaattttatattgaaatttaggcattagaattctagagattaaagttagagcaggtgtttaagggactgaaaggggttgcatggcctttgggaaatgcaattaccggaaatgatactgtagtaatgcaatagtaatgcagtagtagtagtagctgcagcaacaactgttatctatgaatgtttgctatgtgccaggctctgtgctaagagagctttgcaagcattactactgcatgaagtaggcactattatggccattttactgatgaggaaattgaggtgaacagattaaataattttacccaactttacacagaaccattccagagcacgagccataaacacatctttcccgtcttggaaattaaattattaataaaaaacgtggtgcaaattggaaagaggacggttgtggtagattatcacaaagttaagtgggtaggtggttgctgggtcagggtgggagaacaaaggcagctgtaataaaaaaaaaaattaaaggcatataaagaaaaaggcttgttgagaacaatttgcataaactgattttggccttagaccctattcacttctccctcaccagtcactttgcaactgtggagcatagtattctgagggtcccctgcacataacaacccctttcatagcatacaagataaaaagaagaatcaggctgcaaagagagaagcactgaaggaaagaacatctcaggttgaaagaagggcaagtccagggtgcatgtgaggaacaaatgcatggacacggtgaagtgccacttcttcatttctagttcaacacaattcaattaaaaattactgggaggaggctacgtcttgaattaaactcagcattccacatctttgaggtggcggaatgactgaggggagggggtctgtctagccacatccaaatcttcctgagacagagggagatccctcatttgttgcagtgtattttccttggtcgcatctgacacaggggttctgtgggttgaacagaaagggactttgctggaggggaggcactctgcatagaaggaaagtagggacatctggcagaagcaggcgctccgagaataaacagtcaaagcagctcgcaatagtcccaaaaagctacccctcaccgaacctggcgtgcctgtcgccgcttgccccgctcccagggctcattggctcccagtctcgacgtcagacccgtagcctctcacctattgggccagccaggacctgaggcggagtgcagaagcgagggcctggagacagccgagagccgccttcaaggagggctgggggcggggctagaggaggggctgggggcgggtttcccgatgaaggggcggccatggcagctgcgcagaggcaacgcaggctgctacggagcgcgcgcccggctttgaatgagcggggctgggagtgagcgggcggagcgcgagctcgaggaagagacaggcagcgcgcgtgagcgcgccttgtgtgcgcgcgcggcccgcggcagctcggagcctccgccgggcgg

SEQ ID NO: 40967 - DNA, 2300 bp, Homo sapien
taaagcaatcaactctttaagaaaaaaaatttaaacacgtttatatccgaatataggttattttggattttttttttttttttttttgagtcagggtcctgctctgtctcccaggctggagtgcagggcccaatcatggctcactgtagtctcgacctcccaggctcaggtgattcttcccacctcagccttctgagtagctgggactacaggcatgcgccaccaaacctggctaatttttaaattatttgtagaaacggagtttcgcccgttgcctgggctggtcttaaattcctgggctcaagcgttcctcctgcctcggcctcccaaagtgctgagattacaggcatgagttaccgtgcccagctagataactcgattttttaaatccaaaaaaaatttagaaattttatattgaaatttaggcattagaattctagagattaaagttagagcaggtgtttaagggactgaaaggggttgcatggcctttgggaaatgcaattaccggaaatgatactgtagtaatgcaatagtaatgcagtagtagtagtagctgcagcaacaactgttatctatgaatgtttgctatgtgccaggctctgtgctaagagagctttgcaagcattactactgcatgaagtaggcactattatggccattttactgatgaggaaattgaggtgaacagattaaataattttacccaactttacacagaaccattccagagcacgagccataaacacatctttcccgtcttggaaattaaattattaataaaaaacgtggtgcaaattggaaagaggacggttgtggtagattatcacaaagttaagtgggtaggtggttgctgggtcagggtgggagaacaaaggcagctgtaataaaaaaaaaaattaaaggcatataaagaaaaaggcttgttgagaacaatttgcataaactgattttggccttagaccctattcacttctccctcaccagtcactttgcaactgtggagcatagtattctgagggtcccctgcacataacaacccctttcatagcatacaagataaaaagaagaatcaggctgcaaagagagaagcactgaaggaaagaacatctcaggttgaaagaagggcaagtccagggtgcatgtgaggaacaaatgcatggacacggtgaagtgccacttcttcatttctagttcaacacaattcaattaaaaattactgggaggaggctacgtcttgaattaaactcagcattccacatctttgaggtggcggaatgactgaggggagggggtctgtctagccacatccaaatcttcctgagacagagggagatccctcatttgttgcagtgtattttccttggtcgcatctgacacaggggttctgtgggttgaacagaaagggactttgctggaggggaggcactctgcatagaaggaaagtagggacatctggcagaagcaggcgctccgagaataaacagtcaaagcagctcgcaatagtcccaaaaagctacccctcaccgaacctggcgtgcctgtcgccgcttgccccgctcccagggctcattggctcccagtctcgacgtcagacccgtagcctctcacctattgggccagccaggacctgaggcggagtgcagaagcgagggcctggagacagccgagagccgccttcaaggagggctgggggcggggctagaggaggggctgggggcgggtttcccgatgaaggggcggccatggcagctgcgcagaggcaacgcaggctgctacggagcgcgcgcccggctttgaatgagcggggctgggagtgagcgggcggagcgcgagctcgaggaagagacaggcagcgcgcgtgagcgcgccttgtgtgcgcgcgcggcccgcggcagctcggagcctccgccgggcgggcggggagggggaggggcaggtgagtgtgtgcggttcgcgcgtgcctgggaggggctttcctctccctacccccatcccgaccccagccctagcctctggggcattgtctgcccttcgccgtcggccctccgcctagccgcgcacttcccgccctcccaccttcctttcgcccttccaccagacctccctcgacgcccgacagctgctctgggtactgtttccgggtcagggtgacctctggggtgaggaaactgcgactgggagcgggacccaggcgtgcagcattcgccatgctccgctcacgcgtgggagactgggctgtggggtaccggcccggaaagcacgcagcctccaaagccgccttcctcagggaaatttgc

SEQ ID NO: 40968 - DNA, 2300 bp, Homo sapien
gaagtccagagccatggtcagggaatcgaaattcacctgagtcactcatgaggtgtcatcttcactcctctgtctatgaccttctagttacgtattcaggtttgtagaagggttcagggtcagcagaattttctttcctctttgtggactgcgtttttcttgtccaccagactgaaggatctgggatgggctgaagaggacagcattgggtttcacagttcatggccatgacaaacatggaatctcagtgtctcctttgaaaatgtttcctatcaatgcctataatgagtttgcacctatacatgttagcatttgaactactaaatgaagagaactgatatttttaagcatgttgcttctttttaaaaagttagctcttacaaactgtctgataatttatttcctgatcaatattcagaaagcacctgaaacagcgccagggtcacagaaggtcctcagtggaagttaactcgtaataaaattccccaggtcaaaatatgggatagctctttacattcctgcctaaggtgtaatagctaatcttccatatttctcataatcagattaagaaatagtctggttgatgccagacttagaagtgaagcatggaaaagaaaatgcacaccagggtacatgttcctttcagctactcatgaagttctttctaccatgggctgctgaagttggttttgtcacaaagccatcagcccatctgttccgtataaagtgtcctcttctcacgaagagaagagcggcgttcatttgaatgatttcaaaaggaaataactttaactttagaacttggttacgttttatttatgtctgatttgcaaggttgacagccagttgaaattatatttgattgtaaataagtgatcatggttttgaagccaagtgtacccacatgcacacttgcattcacatttacacacatttctcattaagatgtcagttggatacagctgtaattaaaattgcaaagaaaggtttgtcagaaagcagtactactatatgaaagctatcttgttttctctttttttgccatcaagtaatattcctgacatagaactttatcctgtttaagtaatttcaacattctcaagatgcttccttacactactgggtgtcaaatctctgtcaggattaatggtgaagtttgaacaagtttatcctctaataatactctacagttgagttacccttaatagcttgtggaatgtactcacatgcattctttgatttgattttcacatcaattctgtgaggaaggtaggaaaggggtgggtgtgtgtgtgcatgtgtgtgtgttttgatccccatgttaagtggctcacttgcctaagttcctactaagtggcagtgccaatgactcacacctggtttatttattcagcagtcctttagggaacacttaccatgtatcaaaagtaggaggatagaaagaacaagctgtttctgccctcaaggttgccctagcctagcaggaaggacaaataagtatgcagttgtgacgccatgtgataagtccaatggtagaagtttgcacagagttttagggagcattaaggagtgtgcctacactggcctagggaaggaagaatatagagaaggctctttagagtacgttcccatcagtctcaaagtaggaagtatcctggtatccaggggcttagagaagggagcaggtgaacattctaattagaggagattatgagttcaaaaacctaaggatggtcaagcatggatccttcaggaaactgtaagtgatttggaatgctgtagtacagagggaggagggaggagtgaggagtggtggaggatggggttggatggagtagtgggattggaccttgtgagccatcttaaggaggctggcctttgttctggaggcagtgggggaccatcgcaaggctttgaggaggatagtgaatcagattccattttgaaaggccactccagccacaagccaaccttctactggagggagcaaggcaagaggcaggagaaccaagatggggctgttacagtatttcagcagttaaatgacaaaggttgtcttaagtcactggggctagaagaaaatgaaacaaaaattttaagtaatcaaaattaccaatgatgcatttatgtgtgctctgtttatcttgccctgttttctcctcctcctgtatggggtaccaccttcccccatcctccaaatgaaccgcattaattttcttaccctgacatgaaccaaatgcaaatatttctaaactgaaacaggtggactagaacaaaaaccatatcttgaaaacagcctc

SEQ ID NO: 40969 - DNA, 2300 bp, Homo sapien
tgcagcactgttcacaatagcaaagacttggaaccaacccaaatgcccatcaatgatagactggataaagaaaatgtggcacatatacaccaaggaatactatgcagccacagaaaaggatgaattcatgtcctttgcagggacatggatgaagctggaaaccatcattctcagcaaactaaacagaggaacagaaaaccaaataccgcatgttctcactcataagtggaagttgaacacatggacacagggaggggaacatcacataccagggcctgtcagggggtgggggctaggagagggatagcattaggagaaatacctaatgtagatgatgggttgatgggtgcagcaaaccaccatggcatgtgtatacttatgtaacaaacctgcatgttctgcacgtgtatcccagaaattaaagtataataaaacaaaggaaaaaagtcatagaaacaagaagttagattttacattcgaaattataagctagaataacatatgaaaattcaggtgtgagattccaataaactgaactatatgaaactgctgtgtttgtaggtcacaacagccagaaatgtaccaccttctacaattcatcctaatagtagaagtgtagttctaggctataagggacccagtatgggcccattcacaatgcacctgcagtgcacacgcttcacgcctctggtggcctcccgagggtactgtacctgagcagaagctgttgctgctaacggtcctcgctgagcgcccagagctgctggggttgaactctctgctctcttcctcagagaaaggagactcagaggctggggacactttgtgctgttgttggggcatatggggccgaagaatcaaccggggaattcggcttcgagaaatctccttgtcatgatgctgcactctgtgctccttctcaaaattggacatcaaaaaagaaaacaaaaggaaacgcgtttccctctcttaactcctgtcggttccttcaaggatcaatttctaagaaatcacatttctgagtattgagtcttcacagagtagtccttcttatctcagttgctgaaatgagcttcaaaactcttccaatgagttaacctttctaatctactgaatagcacatgtctgtgtggcacacacacacacacacacacacacatatacacacctccactcactagctggaaggccatcctacttccctatgctggtcctgactcaccttcccaccctgacttctatcacattcaagcttctgcctcccaaaggctctttattaacaccacactctggcttacttgatagccttcagacttccattttgctttccctaaattagctgtgacagtctgacttgttttcttgtctcctcacaaagttgaaccctatacctggaacagttatttcctgatagctcacacacaattatctttaaaatccctcctcttctggacaggatcttaattattcgttaatatcctggtacacaaggcttgttgccaacagaaaagcaaacacaaatccgatactcgggaagatggctccaccttttacatcatctttaatttttgttttccttacaggacatccataagaagagatttttctttctccttaaaaacgcagcatgaagtaccctgccatttcgtggttttaaaaatgcgtaacagtaatattttcacaatgttttccaacttataaagtgcttttccaaccattttctcatttgatctttacacaccagactgtacatagagagcacaccaatgaatgtccctattttcagatgaggaaacaggctaaatggggtagagatgcttaggcaattctgcacaccatgccagaagtagaacgaaattcaaatccagtgctttgcagggtcaccaccaccctgccttatgaaaatggattcctaggaggagcgttttgcaaaaattccactgcttcctccaacctctgccactgaaagggactctttggcttaggtaacaaacaccctttcgaaacatgacctactgttccttccaccggcttaccaggaagggtcacggccaaaataaacacctctgggaggccggcacatggcataaattgaagggtaaacctcagcaatggggaacttcggagggccctcaggcatccactctacccgggggccgccagccgcacgcagcctcggattcgccctgcacatctgccgcccagcaggtaccatgcgccagccactccgccgggcacaccgcagaccctgagctaaggcagggtcactgacacgcgggagtcctcttttcccagtcgcg

SEQ ID NO: 40970 - DNA, 2300 bp, Homo sapien
tcgagcactttgagaggcctggacgggatgatcccttgatcccaggagttagaggttgcagtgagccctgatcgcgccactgtactacagcctgggccacagaacgagatgccgtttcaacagcaacggaaaaaaaaaaaaacaaaaaacgaaacaacaacaaaaactttaggcataaaggcactcaggctgaagggaccgattggagtgctggcttgaactcgtttttctgagttcaattccagtgctcttcccttagcagtgtgctggagctacttcctggagccgggcagctgcagggcagcgctggggaaaagactgttctctggctacatagcagcctggcttctccaagccggagggagctgcgctgaccactgaaggcctttctgatgcaaccccttccaagtagaatccatcgcagcctttcagatcccggaacccagaggctgtgtcggtcctgacgcactggcttggctgggctccggtacgagagggatctctgcagctctcgggcgaggcagttgtggggagctgtaggctgacttaagacctggaggccaaggaggggtggccaggggaaaactttctctattttgtctctctgtgatgtcgcagcttttctcagtcactccatccaacgccacccacttcaaacctgagatcaagtgcaaaaaaaaaagagggtggggtcacccctgggctggagatgccgctagccgcagcctgcctacaccgggccgagctccttggagagggagggacaccggctctggctgggggggcgcggagtgccgtggggaaatcgggcgggtggggcgcgcccaggcgcggtcgagttgccccgaaggccgcaggtgagggagggcgtgggaggcgccccaggagctgcctctagcgagtgcggcaccacgtgtccggccggggcggggtcgggcgtgccctcggagcccagagcaatcggcggcagtggcggcggcggcgcgttggagcctcaccaagagccgccgcccgcagcccgcgccggctcagcgcagtctcctcgctccgtgctcgcaggtgcctcctcctggacggcggcagcggcggcgcgaggagccggcgggcagcggcgcgatggggcccctccgcgagagcaaggtaaggagcgcggggcagtgcgggcactggagggcggggaaggcgggcactgcggggcgagaagcggcgggatgagagctggaggggtgacatttagagtctggggaaaggtggaaggaggtggtggtggggtctggagaaggcaggaggcattgcttaggagttgagatccaggagatggggaggtggtactggaggaatagattttggagaatgacatgattggagggttaatcccacctcctgaaactgggactgtggggtgtagctttcagttgatatcctgtgtgtgtgatgtgaatgaaaggaatttgatgcatccgcgactgggaaaagaggactcccgcgtgtcagtgaccctgccttagctcagggtctgcggtgtgcccggcggagtggctggcgcatggtacctgctgggcggcagatgtgcagggcgaatccgaggctgcgtgcggctggcggcccccgggtagagtggatgcctgagggccctccgaagttccccattgctgaggtttacccttcaatttatgccatgtgccggcctcccagaggtgtttattttggccgtgacccttcctggtaagccggtggaaggaacagtaggtcatgtttcgaaagggtgtttgttacctaagccaaagagtccctttcagtggcagaggttggaggaagcagtggaatttttgcaaaacgctcctcctaggaatccattttcataaggcagggtggtggtgaccctgcaaagcactggatttgaatttcgttctacttctggcatggtgtgcagaattgcctaagcatctctaccccatttagcctgtttcctcatctgaaaatagggacattcattggtgtgctctctatgtacagtctggtgtgtaaagatcaaatgagaaaatggttggaaaagcactttataagttggaaaacattgtgaaaatattactgttacgcatttttaaaaccacgaaatggcagggtacttcatgctgcgtttttaaggagaaagaaaaatctcttcttatggatgtcctgtaaggaaaacaaaaattaaagatgatgtaaaaggtggagccatcttcccgagtatcggatttgtgtttgcttttctgttggcaacaagccttgtgtaccaggatattaacgaataatta

SEQ ID NO: 40971 - DNA, 2300 bp, Homo sapien
acacgaagataatggagacaaatagtggacagaagtaatcagattcaagaccgttattacttgggtggcatagagatcacttggtggtttatgctatgtgtgggtcaggtgaatgagagaaaaaagtccacgatgacactgaggttctgacttggctaactcagtggagggtgtttctgctattaggtccccagtgtcaattctcaattctaagtagggaactcagaagcatccattaactttaaaagtttgttcttatctcacagtatatgatcccaggctcataattttaggaataataagttgtatgaatcatcctggaccatcactttcctgaggtccatatttgaaacagctgtgggtgtagaaagtatgaattaatcacctcttcttcccaaataaagaatcttaaaattaccaacctcactgcttgagagagctaagtagattgaaaaggcatgaagatttatggaggaagctctcttttggagttataggaagaagggaaattgattccactaatcctctggcttcaggctctctctagactcacaacatatattcttaggcttgagagttgaggactcagaaatgctgtttggaggatggatgaaaggggacaatgaccctcagttttcgaggagcacagtcctcctatgtaggacactggtgcataaggatcagagtgtcgcactgcttggaatattctccaattctgaataaagggtatataagtcattatacatggtgaattccaccaccagataagatttaagggtagcaattgtaataaatcaaggcccttggcccagctgatgtaccctattctaagtccccagttggacagattttcgagctttcttaaacaaatttgtgtgcatcacaaatgctttttctgcctgtcatgtaaaaggcatcaacaaatattgactggatcatctggacctgacttagctgccctttggaaagttctgttcaatcagctggatagagctgtttgttttcctcacctaaccctcacagctatcctagaggtaggtatcactattattatccctcaatttaacaagggtaaatttgaagttcagaagggtcaagaaccgtaggcgtaggccacgcatgcaatggcatccgcatgtaattcgagcactttgagaggcctggacgggatgatcccttgatcccaggagttagaggttgcagtgagccctgatcgcgccactgtactacagcctgggccacagaacgagatgccgtttcaacagcaacggaaaaaaaaaaaaacaaaaaacgaaacaacaacaaaaactttaggcataaaggcactcaggctgaagggaccgattggagtgctggcttgaactcgtttttctgagttcaattccagtgctcttcccttagcagtgtgctggagctacttcctggagccgggcagctgcagggcagcgctggggaaaagactgttctctggctacatagcagcctggcttctccaagccggagggagctgcgctgaccactgaaggcctttctgatgcaaccccttccaagtagaatccatcgcagcctttcagatcccggaacccagaggctgtgtcggtcctgacgcactggcttggctgggctccggtacgagagggatctctgcagctctcgggcgaggcagttgtggggagctgtaggctgacttaagacctggaggccaaggaggggtggccaggggaaaactttctctattttgtctctctgtgatgtcgcagcttttctcagtcactccatccaacgccacccacttcaaacctgagatcaagtgcaaaaaaaaaagagggtggggtcacccctgggctggagatgccgctagccgcagcctgcctacaccgggccgagctccttggagagggagggacaccggctctggctgggggggcgcggagtgccgtggggaaatcgggcgggtggggcgcgcccaggcgcggtcgagttgccccgaaggccgcaggtgagggagggcgtgggaggcgccccaggagctgcctctagcgagtgcggcaccacgtgtccggccggggcggggtcgggcgtgccctcggagcccagagcaatcggcggcagtggcggcggcggcgcgttggagcctcaccaagagccgccgcccgcagcccgcgccggctcagcgcagtctcctcgctccgtgctcgcaggtgcctcctcctggacggcggcagcggcggcgcgaggagccggcgggcagcggcgcgatggggcccctccgcgagagcaaggtaaggagcgcggggcag

SEQ ID NO: 40972 - DNA, 2300 bp, Homo sapien
caggcattaattcatttgacagttatgtattgagtgtcaactgtataacaggaattgtactaggcactgcctacaagctttggtgaaaacaaacaagtaaatggggaattctgaggagatcataacagctctcttgggggtaaaaataagtgtcctggaatcatcaggggaggtttcctggaagaagctgtctaaaatgaaacaatgtatctttaagagttgaggaggataggtggatgtagtgcaagaaatgttctaaacagaggcaggtgcagcagtctcgacgaaaaagagaatacaaaacctccacctccgagaactgaaagtgctacagtttgagcagtatccatttgtatgtaagggaagagtggcagggaccaaagggacaggttagggaggggagggagtatctacaaaagagaggagtggcaagaaatgagatcggagaggtaaacaaggcggccagatcaggaaagccttgtgtgccacattaaggagtttcagtattacctggaggacaatcaggaaatcattaatgagttttcacggagaagcatgacttgatttagcttttcataaaggcttgtggaaaaatggagacactgatcggagagaaaggaataagaggcaaggctgaaagcaagagaccttgagttagaccactattgcaataatctagggtgactgtggtttacactctacacgaagataatggagacaaatagtggacagaagtaatcagattcaagaccgttattacttgggtggcatagagatcacttggtggtttatgctatgtgtgggtcaggtgaatgagagaaaaaagtccacgatgacactgaggttctgacttggctaactcagtggagggtgtttctgctattaggtccccagtgtcaattctcaattctaagtagggaactcagaagcatccattaactttaaaagtttgttcttatctcacagtatatgatcccaggctcataattttaggaataataagttgtatgaatcatcctggaccatcactttcctgaggtccatatttgaaacagctgtgggtgtagaaagtatgaattaatcacctcttcttcccaaataaagaatcttaaaattaccaacctcactgcttgagagagctaagtagattgaaaaggcatgaagatttatggaggaagctctcttttggagttataggaagaagggaaattgattccactaatcctctggcttcaggctctctctagactcacaacatatattcttaggcttgagagttgaggactcagaaatgctgtttggaggatggatgaaaggggacaatgaccctcagttttcgaggagcacagtcctcctatgtaggacactggtgcataaggatcagagtgtcgcactgcttggaatattctccaattctgaataaagggtatataagtcattatacatggtgaattccaccaccagataagatttaagggtagcaattgtaataaatcaaggcccttggcccagctgatgtaccctattctaagtccccagttggacagattttcgagctttcttaaacaaatttgtgtgcatcacaaatgctttttctgcctgtcatgtaaaaggcatcaacaaatattgactggatcatctggacctgacttagctgccctttggaaagttctgttcaatcagctggatagagctgtttgttttcctcacctaaccctcacagctatcctagaggtaggtatcactattattatccctcaatttaacaagggtaaatttgaagttcagaagggtcaagaaccgtaggcgtaggccacgcatgcaatggcatccgcatgtaattcgagcactttgagaggcctggacgggatgatcccttgatcccaggagttagaggttgcagtgagccctgatcgcgccactgtactacagcctgggccacagaacgagatgccgtttcaacagcaacggaaaaaaaaaaaaacaaaaaacgaaacaacaacaaaaactttaggcataaaggcactcaggctgaagggaccgattggagtgctggcttgaactcgtttttctgagttcaattccagtgctcttcccttagcagtgtgctggagctacttcctggagccgggcagctgcagggcagcgctggggaaaagactgttctctggctacatagcagcctggcttctccaagccggagggagctgcgctgaccactgaaggcctttctgatgcaaccccttccaagtagaatccatcgcagcctttcagatcccggaacccagaggctgtgtcgg

SEQ ID NO: 40973 - DNA, 2300 bp, Homo sapien
tacatgaaactgctaacagaaggaatagggataattgatgttaaggcaatgagataatgagtatcttttttcttttctaaaatttttataacatggtttagtatccttttttaagaaaaaaatagttatcattttaaaaaggcatattttttctcttgataagcagaagtagctaaaaaggacacatgggcagatgaaactacataggccagattcccaaattctagttttattttcctacaaattcttctgcagtgcgttagagaggagctgggagtacacagcaaaggctagctttactcacaaggtcacaagatttcaggtataaaggacagtggttcacaggaataacctaggaagtgggaataaagcagcaatcaaaactatcctcagctctacaactgcaccagtgacccccacaccaacagcccaaccattccctgctgtagctgccatcatagtagttggttggcctctgggggtgctcagctccatttggcaatagtgttcttgctctttgagaagagacactcaaagtcttcctcttttgcacctgctctcattttctcagcagaaataaagacaaagttattttttaagatgtttactagaaagtggaagcaaaaaatataaaatcatggaaataaagtgcattatggagaacatattgtttttaatgtaactcaaatctaccattgttctgctttccaggaacccagattacaattttttttctaagcctagactgctatggatgctgagtgaacccctcagagcctccagcctgtgtatctgctctgtgtctggcatgtctgagaagcatcctctctctatagctgccctcctgggttcaggcaactttcagctgcttttcccacactttctggtttcttggggaaggaaggtgcttctctattagccccagaattcatctactggatttaggctttccttttcatgtcttacagataacatcctttgccttttctgtacacctgtgagaccaacagattgtctaatcacatgaagcatttcactaggtaaatgtcaagtctcagtttcccctacttagatggcaacctttacacgcatactttccagagcgtcttaatttcaatcattctgattcattttcctaataagtgtacacctacttgtccaacaatgtgtccccattttgtttaatgcaatcaccgtgcctatgtttttgacaaatatcctaccctattttcaaagatgaaccaaaggccacaaacaaaaagccattttgggggaggctatctcatgtctgctctcccataaggcatcagaggattagacccttaccatccttcaacgttccaagcccccaacctctgcctcttcccctggacttgcccttaatttctgttattcactgagagaatactctgactgaacactcgtttgtcgggcagagataattgacacattctgagcccagtgaatgttcaagcatggcctgcctcaggttacccactgccctctctgccccaagcacctctatgccacctcctgggggagtgatcttgtgcaattctagtcatttcagttttacagcatcaaagtacctcaacctatagtaatgataacacacatacattaagacaagggttgggctgggcacggtggctaatgcctgtaaccctggcactttgggaggccgaggcgggcagatcacgaggtcaggagatggagaccatcctggccaacatggtgaaacccccatctctacttaaaataacgaaaattagctggtgtggtggtgcgcgcctgtagtcccagctactcaggaggctaaggcaggagaatagcttgaacccaggaggcggaggttgcagtgacctgagatcgcaccacactgcactccagcctggcgacagagtgagactctgtctccaaaaaaaaaaaaaaaaaaaaaaaaaaggaggagggttgatcaatcacacatgctcttatgggaaaacaggcagctctctccctggtaagaaaaatatgggtctccaccccaccccaccacacacacaaaaaaatctcacgatgccccagaatgcagtttctttccttcgtgacgtgttgtgaagcacgtcagctgctccttgttgctgtgcagatcacccaacattaggtcaccgagagagacagcagctcttgctcacacagctgataggattaggagatggtgctttgtcagccctgattgagcccaagaaaaccccctgcatacacaggtgagatgtgaggaagagtgaatgtgagggaccgtgatgtgtctgggttgt

SEQ ID NO: 40974 - DNA, 2300 bp, Homo sapien
ctcacatatacactctcggtgcccttaagtcttcagaataaaaatagaatgacatttccttccagataggtagcaatccccattctaaaggaaactgtttacgtgcaagggcatgagactggttatctttaacctaatagtcttacattttcatagcactttgtgtacacttttttttttagcttcacaaatgatcttataaataactagttggaattcaataaaaacaatccaggaatacctgatgcagaggtcctggaagcctggattatggatagaaggaagacagaaagccgagttcctagagcatagttcgaagagaacataagctaatctggtgaaggaaatattgagcagagagcagttttgaccaaagccaaaggagggcacttatatccctttaaggccaaaggaggattaaactcaatggttggactttgaatagaggtagaaggggaggggtggggagggagggaaggaacatactaagacctcctatgtcacagtttggcaaagagggaagggaagggaaggggagggaaggggaggggaggggagggaaggggaggggaggggagggaaggggaggggagggaaggggaaagaaaggagaaaagaaaaagaaattgttgggatgggttgcattgtgttatgatatgtattttcagtgggggagggatttctagggcttagaaaacactacagagaagaaatcttcacgtctaagccttacagtgagaagtagaagagatgaccagatagcaaaaatgaactggaactaaaaatgaaacgcttaatgcatttaacatgtgccaagttaagtaggaatatgagattgtcgggtttccattgcataaacttgcgctgccaagtttcctcacacatgaatgtaagtaggttggactttaagctaactgtgtgctaaaggctagtgaatacagtaaggaagggaggcagcgaaaggagaaggggtaggatgcagaagcatcccttccttttgtgcagaaacttccttcaggggtgaaaatgaagagtaatctcagagtaagcaaacaacatcaaaagaatctcacctagaagagtctttagccaaactgtggtagtgactctttcacccttagctatgataggacgatgtaactggattcatcatgaagagccttaggaaagctaggcgttctttatggggctacctggctgggactctggcaattctgagggagaaagcccctttgcaacagtctctttagaaacctattttccgagaaaagcaggtagtgggattgattattaagtttgcatttggactaagaaattagaacacattatcctttccagtctggggttcccgtcagccctacctaaagtcaaaacaaattatatctctattgcacttgctattaaagaagtctggagaatttttgttaaacccaattgctgctatctcctgagaactagaaagtgaacagccacatttatccccagatcaaagatcaggaaacttagacagagacacactgttcagatgaggcgcccaaggtcactggtgaagttagaaagagcttgaagctgcaggtaagtcttcgccccctagttttgagccgcgcctccttagctgtccccagacaggcaggctgtggtcgcgagataaattttcccagggagactgtcctaaagggcaccttaggttcacgctgaagtcagtgttcagggctcttcctctccagcgtgaggacaagggtgctccttagcagaggggtgagtgaagacctcgagggagactggggtcccaggccctcagccgcccccggggatccgctccagattgtgcaacgcaagccctcctggcctccgccggggctccctcatctggcaggagcccagagtctctgcagcgcgccacccacgctgagagcggcttcttcaagaaacagatcctgcagcataatctgccagggccctggcaacaggaaccggtccttcaggcagcgagcccagggagcagaatcctggcgcccccggcgcgcggccctcagcgtgctcacgccgctgcgccccacccagcggtgcctgccctttggtcccccgcccttctctccattttgtcctcagccccagcagccgcccggctggctgcagaggccgaggggccgagggcaccggagcgcaagggattccgcggcaccacgtgtccaagccgggctaaggcgggcggagcgggccgggcccggctccccgggcctgagcgcaaaccagcagcgacgcggggtcccgtccgcaccggcacccggcccagccgg

SEQ ID NO: 40975 - DNA, 2300 bp, Homo sapien
gagtgatgaaaatacctcattaaactcctgtccttcattagaaacttgtaaacaaagaaaataaaaacaatcacactgatttatcaacaaaaaataatgtttctagaattttgtttatgaaggcagcctctgacatgtagtcctgggtttgatttgaactgtgtggccctttgcaaatcacttaatttccctgtgcctcacttttcctttctgtaaaatggatatatgctacctcatagtgttgtcattatgattaaataaggtactgcatgaataaagagcctacaaatttcctggcataaagtaagcacccattaaatgttgggtgttttcattaaagcttgaaatttcactgaggaaggcactgagaccctcaaagtaaatgatagctagacgtcccacagccagttggcaaagctagaactaaacagtcacgtttctgtccaatctatgaaaaagcttattctactacatcaggctgcctgcttatgtctttatatatactacctaatacgtgtgtgtgtgtatgctttctaatatatacttatatatgtaagtgtatccataatatatgctttccaatatgtattctatatatacatactagaaaacaacgaagatgagtgtggttcactctctctggcaaagacttgaaaaatgcatgattctgagatgcctgctgaaaatgtgaaaaccttgaaccatgccaaatgaagcagttaatataactgccctaacctcaagtttagcacactgatccagttggaaattttgctctggagcatttacaaaagcacagatccggggaaacgggaatcaaatgcagtaattctgcaagtgtattcaggatgaatgtaatattgagtgtcaccgggcacctcactaccccccgcctccacccccgccgtctcacctccctcccttagatcctgccactcccctctgctggtgctggaagcactgggcgagtggctctcagagctagagcgggcggggcggacacgcttagcgtaagcgcaggggccaggagcccggagggaggtggaggcggggcaaggcaaggcagcaggcgctgggtagagctcagctggaacacagtttccctcctggaccggtcgagtcagacctcacgtgtagactaagaggatcaaaagaagagtacgttacctgcggcgccggttgtgcgcagaccagatgtgccgggagctgcaggtgagtcacttgctcttccctcccacccccacctcctcaccccgagtccaacaggttggctggagcgcagcttccaggggccccgtgggtacacttctagtctcacctgggcgctggcctcggcttctccctttaccgagggaggccgtcgttactatttaaattcctgccccagcccacgcttgttctattccttgtctttttgcctttccttctaaaatgagagctccgctgtgctcagaacacctgctctccgggaaacttgtagggacagaaatggttaaaaggaagggtgcctcaaaaaagtgcctcaacacgaggtggaccctcgacagggtgggagctgacagtgacactcctagttcttagtgacccactgggtcttcaataaaaagtcatcattaattattcttgtttctcaaccaggaggtcagaacctaagggagacggcggaagaaaatggagcgtcagtgatcatcagactagaatgagagtgaattgggagaaaatggtgcggccccctcacccagagaaccctcccccacctgctcacacccccagcgaacaccccgggggaggcctatgaagcagcagtaaaagaaaagggaggaatataaattctcaagttggaagggacccggttaccacttcctttgctttctgaactttttgttttggtctcctgcgggcaggagtgagtctcgccatcccccttgcttgcttgcttgcttgcgttcagctaagagtcatcttctctcctcttcctcctcctccgccccacatctccctccttcctcccttccccaacccctccacccaccaagtagcgagtcattcaatctgtacacctcctgggctgggaatcgcaattgcgaagttgggaggcggggtgacaacgtttgggaagggccagggcgaccggcagtgtgcacagggactgtgtcgggcttggacctcacctgatcctctctcttagcgcgacccttcctctgctccctgtctcctctttctgccacttgtgcgctgcttccgcgcactcccggctccctagcggcaggaggaggaaggcgcacagcgggtggagaggg

SEQ ID NO: 40976 - DNA, 2300 bp, Homo sapien
tctctgaaaaatctcataagaaaagctgaaacactgcttacacattactggaatatgtgtaaggctatagaaatgcagggtactgatgttgtagatgataaattacaagtttgtgttttgaactgtgttgctaatttaaagaatttatggttttaggatgctacactgtatgaagtgcttttgttcgttaaaatggtgaaactattcaagctaaagtatctatcccattttagcagataccacatataattttccccagaaggcaatattgtatcagtggttttctgtcagagttcagttctgtttaactttctaagcaattgattactttaatggtataattttaaaataaagtccaaaatgttgtaaattgaactaatctaattcattttattaaagatatttatctatcctaatattaataagtgacatattgcttagagttatctttgcataaatcagtattaaagatattttaattaataatttgttcacagagtaagtatttggtaaatcttttctgagataaacgtttaagttaccactttttttcaaaaacaccatttacgttttagatctatgatggctccctagttgatactatttatttttacccatcaaccagatattgtgcttatttttctgctttttctttatatttatatattgtccattgtctttacactactttatctctgtggataccattctgatgacttactaggagttgttttacattattttcactttagagttaaaagcagtgaaatggtaaattaaccccaaatcttttaactagtgattaatccctatgaagtgactgcctgggactttgaatgtaatctacagatttagaaaaactatcatttttaatgtaactataaaattgattttatgagaattaaagtcttatcttggagtgactcatagtaaattaactctcagataactgcttatacatgcgaacacacagactcaccccccgcccccaccccacaatgtattaggaaattaggaaactgctactaaattgagtaataaaatggtacacagatatttaaaagtgaaatactaatcttaaaattttgtgtggttattaattttacatcacatgaaaataaggacatataatgaagtattccaaatacacaaggcatataaaaaggacaaatggaaagaacattttcaatgcttatattttcaacccttctctctctctctctctctttctctctagctcgctcactctctctctcaatgtatattaacactatggcaattttgattaggattatttaagaaatgataaaacgactaggtaaagactgagtaaatctttaacactaaaatcaaaagatgaacgcctagttatgagcaatattcttatcagaaacttaagtcagagtttctaaattttggtcttttacattttatttttatgttttcatatacgaggaatatgcagttcattcatctttgatcattggtcattggtagagaaaataagagagagaaacctaggctatcagaactgtattataatatttacatgtcctagcacaccacagttctactttaacaaaaacaataaaaatattatcagtaatcaggaaattcagaaaaggaaacatgcaaattgcagaattcagttttttttaaattttggttttatgagtctgttgtcatttgagttcatagtactgtcagttacacattttccattagcttggttattaactaggtttggaaaaacttatgaaatatccttaacctatttaacgtctccaaattcactgataaaaaagtaacactgtactctgcaactattttctttttcatttacacttttttttaatgactggagtcagataagaaatatgaattacaattttactccatctgtgctaaaacaccgcatgcacaaaaacaaatgcctaccaggcccttggactaactggtaaacttaataaatgtttatgggaattggttaacttgaactgtactgcattgcaggtgatgctactgggacatgtggcgatccaggtactcccggccatggctctagacaggaaagcaatttcagaactaaaagtactgtacgttatgcttgtgatactggttacatccttcatggctcagaagaaagaacatgtttagctaatggcagttggaccggaaggcagccagagtgcaaaggtaatctcaagcagaaattaaatatattgcaactactggattttagtgtgtatctaaatccagatgagtactactaggaaaattactcttactagtttattctg

SEQ ID NO: 40977 - DNA, 2300 bp, Homo sapien
tgaaaattaatgttattactgacaagattattaggtttggtaagtcctgttgtcaccggtacaagattgtgactgcaagttgtccggattcttggctttttgaacaaagaattggacaaaacgcccagcaaagcaaagaaagaatgaagcaacaaaagaacgaaagcagagatttattgaaaacaaaagtacactcccagtgtgggagcaggccgatcagtggctcaagggcccagatacagaatctttttgggtccagatgccccctagaagtttcccattggccacttcatgctcaccccatgtagatgaagtggtagcccgcaatcagtctgatctgaaagcagccaaccagaagctgaagtgaagttacaaagatcacactcctgtgcaaatatctgattggttgcaaaaagcaaccaattgctttttgcaaccaatcagaggctaaggtgaagttacaaagttatacttctgtgcaaacgaggactcggcctgcaatcagtctgattggttgcagacagccaatttctcatctgctgggccaaaaaggtgaggggtttgcagatggagttgcctctggtcctcttattactaagttgtggaaagttagggttttcctttcaatttagtttgaggaagttggtgttagacagccttaggttccctgcctccagacccaattctcccacctcactgtattgtatataacattagaatgggaactttctcctacacacttaaaatctattttctatacttattaaactaaaaaacttggagtagaaattgaaagggtatatttaatagaataatatattccaactcctaatgatcaattcctaatacacatttgtcttaagttggaataagaactctttctaatatatttttgtgtagaatattttttgtgtagaatatcaattaaaatgaaaaggacacattaagaatgaaagcacttaacattttaaagaatttgttcattaattctgaaatctttagtcctaaaaatttgagttatattgtaataaacaacaggatagtttatttaacttcgaatgtgattttttatttgaggaatataaaattttaacggtttggtagagaagtagtctttgattttcagaaatttaaattttactaattagaatacaattttgaacttcttaattaaaaagttccaaatattgatattttatgagaataggccctgttcataggtctaacatttatttagtaatgtttatttaacactactctgtgaaaggcaatagccaaggctttgagatatgataataatacaaacaggaactttgatctcatacaaaatgtagagcaagagaagtatgaacaaataaataggcaattatactgcattgcccaaattatcccataactgaagtacaaagttcattttatattaaaataaaatttttttccagtgctttattttacaaactaacttctttgaaattaactcaacagaagtatattgtgatctgtagaaaaacaattagtaaaacaaactgtaaaaaggctcagaattaggcttatacatattcttattgcattctgtgtgcttgtaacataatcaagaagcaattgcattctctggaagagaatcagaatgcattggattaaaattgtagctttaagaagagtttacattttcattaaaacataatttagttgggttgcacaagtaggtgaagaaagcatgcgtttttattaattgtactaacattttaaatatgaaaattgtagacatgagaagaaatttatgtcacaggtcattgacagcatttatcataaacctgaattgctatttataatcaactgcaagtagcatcacatctatttttaagttgcaaaattgctgtagtaccctatctgtggcctctgaaatttggaaagaaaaaatgtctttctttttcctctttccagcctatcagttgcaaagctgtcctgatccacgcccgtttcgaaatggttttgtaattggtaatgattttactgtgggtcaaaccatttcatttgaatgtttcccaggatacacattaattggaaattcagctctcacatgccttcacggagtcagtcgtaattggaatcatccacttccaaggtgtgaaggtatgcttctaacttgaagctatcttttaggtgatgtcatctgtttttaatattgttttggcactttttacttgtcttcctcttccaatagcatgctaaatatatagtctctcagctgaagatattttttaaacccctaaggctctataatgaataacgattttatc

SEQ ID NO: 40978 - DNA, 2300 bp, Homo sapien
tgcaagtttttttaaaattccatgcaaaagacaataatagcatggtttgtttacccaaatgggttcatgttcattataatttacttctccttttgactacactaaaatattcctactgtagaaaataaaagaccccttttcattaacccactatttcccagagtaatgatttttaaaatgtaaatgaagtgttattagtatctcacttaaaacctaatgataatacacagtttttcacagaatggaatccaaacttcttgtcatggactacaagctccttcatgatccctttctacctcctcaatttcattttgtaacattgtgctttggggcacattgcacttctttcaatttctttaaagtagggtttctcaagtttagcttcttatgaagagctgtcttctgcactgaagaatgtttagcagtatttctagcctctatccactagatgccagtattaatcacacacacacacacacacacacacacacttcagtgtgacaatcaaaattgttttcagccattgccaaatttcccatggtggggagtggcaatatctcccctagctgaaatccactgcattaaagcagcaaacattcttgcacgtagacattctcatacaaatttcctctacaaacaaggctctttttaggttcgctgcatggctgccttcttctctttctataaatttcaaaaacacatctcttattctaaaatgcctttcttgtccactataacgtaaaactactatctaccctatcctctgaggattaaatactattcttttctttatataacttaccacaatatataattaaaatgtttacttatataatatttacctcctcaactagactatatctctaaacaaggaatgtcagtttggttcaccatttgcataagtttgtttcattatcgtatattcaggtcttggcacaggactgacactgaggaggcattggatacgtattttttgagtaagtgaatgctaatttgagttgaatttcctattcataatacaggatcttcacattacaccatattcagaagttcacaaatgactcactgtgcttagcaaaattgtcataccaagaataaatgccgttctaagggttatgcctatagtagaaaatgatgttttctgtctatgttatattattattattaatctcataatggaacttttggagaagccagaaaaatctatttaaagagctgtaatcattgtatcagccttatttatttgtgtatttattgtattccctcagtagtttatccatttaaatccaaacttatatgaccattttgaaaatcttccaaaaaagcaagcacaccattttcaggcgtgctcctcgtttattttttagaaaatatattttaatattttttcatccaggtgctactttgaaagtattgaataaataacttttggcagataaatcattactcaacacaatctgctataataattttgggttgaaagcttatttttaggcttaatggtattgaaccccaatacagatctcaaagccagttagcatgattgaactgaattgcagatggtccaactccaagtgtggtgctttgctaaaattagagtttctattgtttgtaaaaataaatatttgcaagttttataaataccgtctaacacaaactcgtagaaaaattgaaatgtgtaccttctttggattaaaaatatagctcaaatgaactaaaactcagctttcagatagctggcacataagacaaaatcctaggaaagctcccaatttgcactgtaatgttagttctctagatttcacttttgacttatcagcatctccaaaaattgataagaaatagataaatcactttcagatattattttacaactggaatacttcatgtgtatactgaaataatttattcttttctgtattttaaaaagaaaatgatgttaatgaaggtaaacttctttatttcagcatccaaaatatttttaataagagggtaggctccacggtttgtttttgtatcctcggctggcccttcggtctctcgcgcgctcgaacttccggccattggagcggatgtagggtttgcagggtttccggggcgtacacccctcggccctttggaggaccggagagccggacgacgccgcagcccttgggggagtccagcgccagctggcgaaaagtgaggctcttgccccgcgccccgctccgctccgccccacccccaccccaccccactccctagaagatgtggctgcgggcccggctggtcatgcgcagcgcacacacctttagtttggg

SEQ ID NO: 40979 - DNA, 2300 bp, Homo sapien
gaagtaaattcagttgaggtgactaacctctgcacacttggtaaggaggatttttgctgagcatcctcattaagtccaagggcctgtttacatctctaactggttgtccagcccagcaaaggcaacagcagcaacaccacacgctgacatcttgactgaaatcaatgccagagcagctgccaaggtggcttagcaggctaatgtcgttttccatgttgatcctcccagtctctgtctagtccctaccttgttgcccactccccttcgaaacctgcatatgcagacaatgaaagagagcactgaaaagaagggacaatgttctgcctgagggctcttaaagtatctctctgaatttaatgaggtcagctgggcgtctacagcttttaccttttgctacagctccctacccaggacagaaatccctctctaacacacaaacacacacaggcgtgcacacgcatatgtactgcaaaaatacacttgggaaaacacctacgcatggcaaatcactctttgtatctttcataaacacgcacacttacctctcactacagcgcgtttatgctctcgcgcgcgcagacacacacacacacacacacacacacacacgaactgggagaatcacaggcccacacacaatgccacgtaccccgagagatcagaagccttcctacgcctgcagattgaactcactcgccactcaaacctatggacactcgcagtgtgcccacttcccagagcggaactccttccagattctaacgccttcctctgctgagcgggcagctccaacgcgagccaagggacaaagctggccagggtaatgctgtggtgcacgggaccaaacccattatttgtgcacagtgcagggagctgcaaactcaagttgggcagtcctctagactaagccttgttgatagacgctcacgcccatgatagcctgaggcagttaaatggagccacacgcaacagcaatatcctgtttcagaactagcgctgtggcactccccactgctgagaggggaccagattcccgaaaaggtcagatcaccaatcagttgcctaatctaaggaacttgttcattgaaagatttgggccaggaccgtggtcgaaaaaaatcaaggagcacgacatactggtcccggggacacagctcccctgacaccaagggatggcaaaaacagggtcccttatacatgcgaaggaagaacgggcggctcggagacggccagtagatggcgcaagaactcttcccttgtgcaatcttaacccttgcgtggtgcatgggggaagcagatccagatgtatagatacatacatttttcgttttgaaagaaacctcctatttacatatttggtaccgattcagaattaagacaaatgggtttgttctagataactaccacagataaagtagtttaactgcggcacacacaaactgaaaagggggttgggaggatgaaagggagaactatttgaggaaacgacattgacttccctccccaccccacccccgcccaggccacggatgaaatccgtttcccgaatcataaaaacccggtgaagggtttacacgtagttatttgagtatgtaaatacatgtgttcaaatacattcttttccgtgtgaaggcagaatttattgagaaaattctctgtgatttcctttttcaattaaatcacaggataataaatgggagaagcctgcctgaaatatactgcaactacagtagtaacacatgtcccattataacgacgtgggcatcgatggagcccgattcattatcgtcacggtttccccaaaagcaacacagatcctccgattaaaatattcctttgacatgcttctgtattcgcagcctgcaacggagagctcactaacattatttcttgggctgcttttacaggcagaattgatctattcggggaaaaaaagcaagccccttaatttcaaatattgtgtggagtttatcagagagcagaggtgggctttaagaggctcactagtggtttctggtggttgctataacgagccagaattggggtagattttggtggaggggaaaaaacgcacaagaaaagacagaatccagagtagcggagactttgtgcccccgttggagagatggttgagtcctcgtcaaggttgctgtggtatcccagaaacaccattcactccgagctgtgaccgcgcaccaacaacagcaacaactccactgcgccgggctgaggagcaggaattaggagctcgcgaataatatgaaagggatccgcaaaggggaaagccgagcaaaggaatc

SEQ ID NO: 40980 - DNA, 2300 bp, Homo sapien
gctggttgatgctctgtcattgacagactgaaatctatgtgattggggttctggttatagacattgcctaatgtgaaatattacatcctttgattaaaggctgtggaaaacttctgtaagatcctatcttaatgtacagtaaatgttgagttgtttatatattaatgcacatttcttagaactataatactggacataaatttggaggttgccccagttgaagaagctattggccagagagattaagtaatttgatcaaggtcacatctctttttaatagcaaaaagaatacttcaatcttagtcctgtacaatagaggtacaaacatatctctcagtgtactacagcaatattatttgcatttcaaatagagcctttacgtgattttgagatgcctgagacttttctcatgcagtgatttggatatgaacagcgatcacacgtgtcatttttgaacagctgttgaagaaggcagaagatgattatgccacttgcttaatatattacatctggttgctgggaaaatttaaaaattccctggtggttggaagagaaattgttttccctttttggagtatttcattcaaaaaactctattttaactctgaattttggctgctcagtggtggcttaattgtactgcctattgaggtgcacactgagaatggaggaaggattttatgcaaagtgccctttgaaggctttcatagtcctgattccatgtaatttcataatttgggaaagaaagcagagttgtagtgattttttatggtggaattattttattttaccattcagacatcatgacctactcatgtgagaagttgggagccctttgcaatgaaacagaaccttaatcaaataaggcatggaagatttttctttttttttgtttgttctagatggggaaacattcaaaattctttatttacacggttcttctttgctagtatttcctgcatactcaattcatctttttgtttgtttcactgtgctttaattataagccattttgggtggtcattggagcacctttattttacctaaaacagagacctcatctttgcctgcagcctcattgctgtaggaactgaacagaatatttccttggagaacatctgcattgagtaatttttgagcaagtgcctctagttttgacagtaacgcttcaccttttgaaaagaaatcccatgtgatttggatgcttctgtaggaatgtgatttgaaggaggcaatagtaaaatgtactgtgttgaaaattgttttcttagtttaaaaaatgtattattaagtctttcaaattatagtgcatttattacttaccttcacctgttactttggcctacagtgtataacataatgagcctctcaaagagtagctgttgagaaatgaagagtgaatttatttggctctgattattcaagtgatttcataataagcaggagtactattgtattttttgatgtggaatacttggcagtaccctccccctcccctgcagagggcccattgaattaatgacaccttggaagtaaagtccatttcttctgttctccaggtgacttcaggtggaacattcattggcattggacggaaaacaccagattgccaagggaacaccaagtatttccgctgtaaattctgcaatttcacttatatgggcaactcatccaccgaattagaacaacattttcttcagactcacccaaacaaaataaaagcttctctcccctcctctgaggttgcaaaaccttcagagaaaaactctaacaagtccatccctgcacttcaatccagtgattctggagacttgggaaaatggcaggacaagataacagtcaaagcaggagatgacactcctgttgggtactcagtgcccataaagcccctcgattcctctagacaaaatggtacagaggccaccagttactactggtgtaaattttgtagtttcagctgtgagtcatctagctcacttaaactgctagaacattatggcaagcagcacggagcagtgcagtcaggcggccttaatccagagttaaatgataagctttccaggggctctgtcattaatcagaatgatctagccaaaagttcagaaggagagacaatgaccaagacagacaagagctcgagtggggctaaaaagaaggacttctccagcaagggagccgaggataatatggtaacgagctataattgtcagttctgtgacttccgatattccaaaagccatggccctgatgtaattgtagtggggccacttctccgtcattatcaacagctccataacatt

SEQ ID NO: 40981 - DNA, 2300 bp, Homo sapien
aaatcttggggagcagaaggagattaggggcctaatccttgtgataaattgtactatttaactttgctaagatgctatagcctcagattttatcagttagataccagcttcagcagttttaggtgatattaaccctttcaatacaaaacagtcttactgttcgaatacatatttcaaaattgatttaatatttttagttagtcatggctcaagaatgtttcactcagatccttatttttttcctttaataaaaatgcttctcactgtgccgtgcatatttccataaaagtcagcaagttaatttatggcttaaaaaaagaaaataaaaggtctatatttaatatgtgaatacattttacagtggaaattggtggtggacagtattaaatgactccagtgtggaaatatgcaggtggtcattagtagctgactatgagatttactgaagattttgatattaattttcccggcatgcagtactatatataaatctaactctgttctcaaattaatttaaatggatgataacatatgaataactccaggcatatgaggctcattgtcttctctctcctttaggaaatatattgtttgcctcattgtgaaactgtattttgactactttttcacctgactagtttctctattgcaaaagaattattggttttctactcataaagagtgtatgggaaacggtaccaaaatacttctggaataaatgtgctacaaaaaaaaaatcacatatctgcttgactaggtatattaaataaagaccatagagaaaaaggaataaggttctaaaagcacctacttcagttttaattttttaaaatgattggctttttcacttctgataatagtatgtttggaaaatatacccatcttttctctaaaaagatgcaataatcatttagtgaaaaatattttggaggaaatcacttcatcttcggctctcagattcatgattgtacctaagattctaattttaatcattttgtagtttggaaaatgaaagatgcttctccttttagcgcaaaattactttaaactgactttcaccagaggaaaaacatgccacttaaagtcacccaactgaagaaaatgaagtccaaacgcccaagaaatgtttactttgtttttaacacctactatactttgaatcctgtcatggtaatgttttatgcattgttgatctttagaagtcaaaaaaaaaaaaaaaagctcaatccagtgaactttatgttgaggcaatttctcttaataatgagagtatatggagatgtaaagtaggtaaaaaagaatgtcacgcttaattcagagttccttatctgctactaaaacccaaactgcatgtattaatcttgcagcatttgaataatgttcccattttgtctgttttgtggtacccccttaaagcacccattgagtttctggcttctctttagctcagaaaaccatagcaacctcagtccgcacttctccaactcaggatagagttcaagttgttctcctcaagccttcttgccgtgaaaatcgtggggaatcctgatcaccaactaggtgtcctaagacttcttgccacagataaagggcgggggagggggcgcacacgcacacacacatcctgcgtcgtttaattgggagagagaagggaaagtaacaacagaaaaggtaaaaggactttgagagttctttaaattgtttctgttagcatctctgagtgtctggggaacgtcggtttggcggccacgcactgccccccacctgccccccactaccccaaggtaagtcctcgtctttatcacattattcctaacgcgttcggatttttcctccttttccagcccgcacgttcacagacgggaggtgggggagggaggaggggggagaggcggggcgggaaggtagccgggtccctgcaccgcgccgctctcatttgcggcgctccgactcgggcgaagttctcgcgcagccggctcgccgcggccggggccggtcccggcgggcggcggcggcgggtgctcggagccgggcggggcggcggcggcggcgcggggacgcgcgctgtctctttaagggagctcggtctggggtggcgctttcctccgcgaaggctcctttgatattaatagtgttggtgtcttgaaactgacgtaatgcgcggagactgaggtcctgacaagcgataacatttctgataaagacccgatcttactgcaatctctagcgtcctcttttttggtgctgctggtttctccagacctcgcgtcctctcgattgctctctcgccttcctatttc

SEQ ID NO: 40982 - DNA, 2300 bp, Homo sapien
agatctcaaactctgtgctgggagatccactgctctcttcaaagctgtcagacagggacctttaagtctgcagaagtttctgctgccttttgtccagctatgccctgcccctggaggtggagtctacagaggcaggcaggccttgttgagctgcggtgggctccacccagttcgagcttccaggctgctttgtttacctactgaagtctcagcaataggggacacccctcccccagccttgctgctgcctcgcagttctatttcggactgctgtgctagcagtgagtaaggctccatgggcatgggacccgccaagccatgtgtgggatataatctcctggtgtgccatttgctaagaccattggaaaagcacagtattggggtggagtgtcccgattttctaggtaccgtccgtcatggcttcccttggctaggaaagagaattccccaaccccttgcacttcccgggcaaggtgatgccctgcccttcttcagctcacattccatgagctgcacccactgtccaaccagtcccagtgagaagaacctggtgcctcagttggaaatgcagaaatcacccgtcttctgcattgctcatgctgggagctgtagactggagctgttcctattcggccatcttgggatatcaagaataaatgtattctgaagggtaattatttggtctcctgatagactctaagccctgatgatatgaatgtattatcatcttcttacatctttgtactgcctaactcaagggtagtctacactttcctctattatcctacatcacatttattactcttgagttgcttagaatttagattccatttccaccagtttattaatgtctttaaaattgctcatactcacaaagaaccattagtatttcttttgttcctctttctttctttctttcttttttctaaatgtgtaagctctccatattgtttagttctggttttttctcctgattggataaaaacagctaatatttaaagaccattcactatgtgccagatattgcactaaaatcatcattagatgctactttgagttctttcccagcccagatgagagcaaggggccctctaggtttggctgaggcagttaaactgattcactttcccttgaaaccaattccaggtgtagttccataatataaaaaagaacagaggagcttgcttccacaaggaaaatcatttcaattattcatattagatgtgttgtttactacagaatcacatttggaaattatatgagaaaggaacgtctttcataacaaagtatatgcccttgactgttattaatatttgcctctttttttccccttcagctcagtgtgaagtggatttttggtcatcaggcaaagaaatacttttggcttgagttatctacttatctgtccaactggtaatattaaccaagcaattatctttgtgttgtgtagacctgacttaaaaatactttaagaagcatcatgaaaagttttgctattccactgatagagggaaatttattagaggaattcaaagaccacaaatatggaaggtgtaaaaatgataacaaaagacttttcttgtgtgtccacttcagtgtgcccaaggtttgaattggaagaaagtagagacagaaggggtgaattgacattctacccaaagacatgtggggcttattccaggataatattttaactcagcgtttcatcttctgccctctcttgcctccaagtttcagaattctccgtcttctttcttccttttatctttctcccatcttccttttccctttcctccattttgcttttcactgtcactgaagtcagagcagagccagagtgttatgacaataggctagaaagagagaagagagatacaccggtgtttttattccaactctatatcttttttcactctcccttccagcaagtgttgaatgttaactatggaaaagacacacatacacacacacacacacacacacacacacacacacacacatgcacagccttattctgtgccagagcagaactctgaaaattgctgccaagtggccgtcacccaagagaccatagaattcctggcaccaggcagaatctgtggctgtggccaagtgattgttgctgaacttacctgtgtcgaaaggtcagccttccagtgctaaggctgggcacaggcgctaaggcaaattggattgtgaatggaggccctgaggcatgttctgcactttgcaactggtctggcaggctccactcctccaccttctaagtctgccacaggcatgggaaacacctgggcagc

SEQ ID NO: 40983 - DNA, 2300 bp, Homo sapien
ggcaaaaccccgtctttactaaaaatacaaaaattagctggacagggtggtgggtgcctgaaatcctagctactcaagaggctgaggcgagagaatcgcttgaacctgggaggcggaggttgcagtgagccaagatcacaccattgcactccagcctgggtgacacagggagactctgtctcaaaaaaaaaaaaaaaattaacataactattaatatatttgggcttaagattgccatttaagttattttttattcattctctctgttttcatttctctcttttctttttcttcattcttctgggttatttgaacattttaaataatatattgatttatttacattattttgagtgtatctctttgtaaagcttggatgaggtcaccataaaagagaacaaaaataggggaaagaagatgttcaaagtctaaatttggtgctcttcaatatttaaaggttgaaaaggggtagaaaaatcagcaatgggaactgagaataaaggaggtagccagtgagataggaatgaaattaggaaccgaagtgacggaaatgtcaatgcttctgggccctttcttgtcaaggtgatcatattgatttctaattcaaattcttcatattctctggccctctctctctctctctctcagttgtacctcttacatctagtgtatttcataaagagggcccacatgaactgtctcaggacagatgaaaataacccattgtagtatgtttagcacacgtggctgcaaaaccttagttggatattttcaaggacaaaaaaattgcaaaatattttaaactttactttgtagttttactgctatgaggatattggtattgtaattctgaaacaaaactgtgttatgtatgttgtaggataaagcaataaataaatgtattattgtttataagtagcctcactgttttctaatgctcatcattccagctacctagtggtaggcaaaaacctccagtctggttcttccatgcgagattttctttcttctttttgtgaatgttctgttaccaatttctagtgtaattttaccaggatcaacctttaaaacctctaaatttgtggactttctgtgtgacctagggtttggtgtattttaataaatatttcatatacacttgaaatgagtggatattaacttttcattttgtagtgttaagaatttgtaacatgtaactatttctcctcccagattgaaatataacaccagatcccaatgacaaaacaacaaaaaacttcagggcaggatatgccgtttattgatttaattatttcatcagttctgtatacatatttattgaataaacatttcaaaaataagggataggaaaaaagtcatttggaagtagaaaagaatgtttcaaattacttatctaaaatggcttcttacagttgtcatatattcttttaaggacttgagatgtgtatttcagagtaatgtgtcataaatcagcgtgatttttagaaaatatattctgtatcatccttcaacaatacctcagataacttctttggtactttactcaggtaaatctctacatgaagctaatagcaaaaggctactatttctggtaattctgataaaagtttctatgtcttaatttctatataatctaagtggttacaagcagctatctaaaattacgtaaaacaagctgtgcaatactggctcatcgctaattaacagaataatgtcggacaaatcacttatcagttttctaatatgcataatgcgagttagtacagcacttcattgcaagatcagaaatgaaagcatttttacataagagacactacagaaataatgcgaactgtaatgctattatgacggtttgcctagtggtgaatgattaaacatttaaaaagtttactttcatcttagatcattccatcggaaagaggtcgaaaatgtacagtaggcatgcacaaaggataccgcctggaaagaaggtaaaactggaaaacaggagggaggcggggcccaattttggcttctccttccgtctccgcccctcgaacgccggcctgcgagtgacgtcacgcgagacttgtacttccgcttccggtaactcacgtttctctttcttcctgtctgcttggaaagatggcgtcccgcaaggaaggtaccggctctactgccacctcttccagctccaccgccggcgcagcagggaaaggcaaaggcaaaggcggctcgggagattcagccgtgaagcaagtgcagatagatggccttgtgagtgctgttctttttcctctggcccacgtggggagcgcagt

SEQ ID NO: 40984 - DNA, 2300 bp, Homo sapien
aaaagtgtattaagtggaccaattaataaaaatatcttattggataaacgatgctttattacaaaaaaggtccttcaggaacactaatgagcataataatgatttggggagattgtaataaatgtcacttcctctttgaatagtacccctctccctcaatacttattctgaatcagaaatgggcattttaaacaagcacactaagagctttttctgcatatcccaggaccttgttttgagaaacactgctgtaatagaaaactctatttttttctctttttgtcttcttttaatttagcagagacaggggctccctattttgcccaggctggtttccaactcctgggctcaagtgatcctcccgcctcgggctcccgaagttctggtattacaggcatgagccaccatgcccggccgaaaactttgttttaaacttgataatcaccattatagaccatcttcatgttttcataataaagatagggtgcaaactggcactgtcatatacatagagcttggggaaaaaatgtgctgtagcttggtaaattaaaaaacgacaacaaaaactaagataagactaaaatccctagtgctgcaccacatttttcttagtactgaaaagtggccaaggagctggtagataaatctgaggctatttaagaaaaaatgttttaactgttttgcaagactcaggtggtatctcgtttctctgtctgtggtgggcgcatagttggagtagagagttggcatacagggataaaaagaggattcaaattgaaaagtactgagcaattacactcaaagaccttgaatccaaccctgcaaaagttttcatggcttccaattcctaaattcattttaagtttaaatgaaagcaaccatctaagtgatgtgctgggactcagatcagggctaacattatagatcttattccaatttcataaacctacatattgaaataaaaccccaaatgcaaacaatgcattcaatcacgttgtaaatcattttctgtgctggttctttcaatctttagccaaaactagatctgggacagattccaggcaaggacaaaaatgcaaaattccatactccccattctttgattattttaccttgaagtggatactcgacagttagccacgggagaacttgaaattttctgattcattctcctcattaatcaaattgaccaagtaatttttaaacctccagtcagctttgtgccttcctgttactggcccagtatgtagtcttcctatgtcagagaccatgcacataaaaagagtacttgaaacttatctagacctacaaccagtttgacagtgaggaagttgaacccagctttcttcgggagttgcccaagatcaaacggcttgggtttgtggcaaaaccaggactcaaggttaggaattctgactctaggcaaacgaagctcttgagagttcttccaaaacactccatgcgagtgatttaggatggtcctaaggcaggaggaaatgcaaaatggtggcaccctttgccctgacaaatggttcctgagtgacgttagtttctatggtggtgtagcaagaacatttgaacttcaggcacgaaaactgggttccagacactaacaaactacgtgcccttcgtgaacgtgcttaatttctttatgggaaagcagccagtacaaacctccccactcatagctatccaatatatcatttccttctttcacttgggaattataaacattcaggggaataatgtaaggtaaatcacttaggacagtgtctggaacatattaaggctcaatattatcactgactactactatactgccagtctttcagagaagctcttgctacgcgcctctaaaacgtaggtaacacgctaaatgtattctcgtaattttcttttaccgtggccccagactgcgcatgtgcgcccccgtgcggaatcgcgcaccccagcggttttccagcgtacgcacaagttccgccctaagggaccgcccctttaagcgcgggcactgcggtggaagcgcgcgctggtctggacatgacgtaaaccaatgggcaggcccggaagacagaggcgtttgcttccgtggccaaaggcgcttcatttccgggtgaaactggcattgagggtactggggcgtgcgtgaggcgtttactgatgcttcctggtccggtggcctcggtcccggtaagccaggcatgaagatcacaaggcagaaacatgccaagaagcatcttggcttcttccgcaacaacttcggagtccgcgagccgtaccagatcctgctggacggcacc

SEQ ID NO: 40985 - DNA, 2300 bp, Homo sapien
aatatcatagcactatatttaaaatgttaatatttctatggcacacaggagtatatggacaaattgcttgtagacaaaagcaatcaattcaggagcaaagactactgaaggatttgttagacagccctaaagactaaggggatcaaaactttgggggtatctgtaacccagccgagaccctgcttgagaaattctgaacaaatacagatagctgttcattaagtaatcgtatgtgaggaaaaggagactattaacacagtatacacagaaaaagcccatactttgttatggctgtagttagagatgggggtttcctacgttgctcaggctcacctcaaactcctagactcaggcaaccctcctgtctcagcctcctgtgtagctactaggattacaagtgtgagccaccttgcctggcttaaaagtccattcttgtgcttgtgtgagtgtgtataaagaactggatggatgacactgcacatgttaacagtgattattcgtgagtagtggtattatgagtcattttaattttctttttttgctttttaaaagtaaatattctacaatgaaaaaactactaaatttcttaatagttcttcatggcctagcctcaatttgccttcttcctagtttcactcccaaatatattctgtgctgcaacctctttcccaggcatttcataactccatttcgtgtgaagaggtctccacaacaagaagtgtcattcttttctgtcattcaaaatagttcttcctctcagaactgaacaagtgaatgggctcaaatgttatctgaaatctgtcacaattctctcctctctcctcttcatcccgacaagcttccatcctaagtgttcccacatttcaatgaagtggggaaacatcagacctagagtgaaaacacacactgcagactgacttatgcactttactggccatgagggagcagtatgtggcatataggaggtacttaataaagcgagttgaataaacaaatgtgcttgggcagattccttaatctcaagtactgactttttgccctggacatcaaagatggtaactcacaggttcactgtgaggcttgcagagttttggtttaaactaagaaaagctatgcaaatgacagcaaccatttgaagacgggtacactttggataccgaaaaatgctctagtacactatactcgtttgagcttacagcaatcttctaagcagttatcatctttattttacaaatgaggaatccgaggctcagagaggctaaataacttgacagaaatcacagagctggtagaactgggatcaagattcgaagtcggatctctctgctataatgtgctctcattcgccaggctaacgacacgtgatattcacagggcactgtccaatctgcctctattataggtattcgcctgaccaccttcacctctccacttaactgtcaactccacgtgggcggggcgttttgcacctcctgagctcgcaatgaaggtctgtgagcaacggcctcgcctctacaacacccgacggaccctctgtgcctcctccccagccccccgggcccaccttgtggtgcacagctgcgtctcccccatgaggtagcggggcagctgctcccgcagctggatgcggccccgcagcgccgcctgacagaaggtgccgtccagcaggatctggtacggctcgcggactccgaagttgttgcggaagaagccaagatgcttcttggcatgtttctgccttgtgatcttcatgcctggcttaccgggaccgaggccaccggaccaggaagcatcagtaaacgcctcacgcacgccccagtaccctcaatgccagtttcacccggaaatgaagcgcctttggccacggaagcaaacgcctctgtcttccgggcctgcccattggtttacgtcatgtccagaccagcgcgcgcttccaccgcagtgcccgcgcttaaaggggcggtcccttagggcggaacttgtgcgtacgctggaaaaccgctggggtgcgcgattccgcacgggggcgcacatgcgcagtctggggccacggtaaaagaaaattacgagaatacatttagcgtgttacctacgttttagaggcgcgtagcaagagcttctctgaaagactggcagtatagtagtagtcagtgataatattgagccttaatatgttccagacactgtcctaagtgatttaccttacattattcccctgaatgtttataattcccaagtgaaagaaggaaatgatatattggatagctatgagtggggaggtttgtactggctgctttccc

SEQ ID NO: 40986 - DNA, 2300 bp, Homo sapien
tatttgctgccgtgagacattcaagactctcagagagaaagcttatgatttataagttacaatataataaccttacagaagctttagtagttaaaaagcatttgactcctaaaaagtaagtatgaaaatgaaacatggtttaggataagcagtcagtttcttttgtaagctacttcaatgtagttttataaaaaatcaaaaaagatatatactgtaataaatttttccttgtggggaagtatagagatataatctcagtatttctttttgactagaaaacttcagccactgtgtattttcatatttaaaataagctactttaaaagcatatatcttaaattgtcttatttgtattgctttaagcctcagcaggtagagcagatggaaataccacctgtagagcttcccccagaagaacctccaaatatctgtcagctaataccagagttagaacttctgccagaaaaagagaaggagaaagagaaggaaaaagaagatgatgaagaggaagaggtaaactaattaataattttcattccagatttagcaaaaacctccaaccagctttatttttcatattggggctaacttaattgatgctgagcatcagagttatttaaaaatgttagaatataagcaaaattttaccatattcttcgtggtattgatcatcattaggaacatcaaattttatgcttcgctgtaactcattggctctcttgtggggttttgaaggacatggaattgtccttacactgatttcttgcttggcttctaaattgcgtgtagctgcttttactatcttgtggtcagtggacgattcttactgctgttattgtctgcttctgatataaccttttctgtatctgtggtggcctggaaatcagataaccatatgttttccacttgtctgggttttgtttttgtttttcttttacttggaccagggtaaagcataactttgctaaaacacttagactgagtgaaggcttaaatgactttttctttttacaaagtaagaggtgttttaggaatcaatttctttttcctggggcatgtttacactgttgaaggtcttttttcttctttttcttcctaatttctggatcattgaggttgttgtttaagacttagaatttattcttctgtttgatactctatcggatatgttacttaaacctttaaatttaaaataaggtgtcctttaggtagcattgaagctgtttaaatttcttcaagaccaaaaaaggttatggattggataaattttcagtagcatctgttcttaattctaataatagtgcttatctttaatatgaatatcttattttaaagccaaaattagtttcagagccacttctacctatgtgtgaggatgtgccattatctcagacttagttgtgaatgagtattaaaatagttgtggtttctgttatggctggtatatagtttcaccatagcctgggaacatcacaactgctgccttgcacccaccttggactttaaaaagtcatttaggcagcatgtggctgagaactaggttgctcaagtgaaatatataataaggagtatagcccattcattttaaaacaccatataaatcaacttaggtagtctgcaggctctttggtactgctccacaatgagattaagagtctgccagaacattagtcatctagaaaatcatgttgcaatatttatgtatgtatatttagttgaaataaacagtatatttagtggtacagttgatttatatcctgaagttctttaagaggggccagtaaccaaaacctccatgatcagcagcagtccacagaccacatagtgtgtgtagatagcatccttatagcgcaatatagaagcatactttcagccaaatgtttgcttgcacatagaggactttgccttgtaatttaagaaaaacagactcttcagtttgtactctaaatgctaagtgattgctcagcagcattaagtacagttttctattagttcaaaatacacaatctcaaggtaatttaggagcttttaggagatgtagaaatacttcatttttcattggacttgttttgtcagctttttgggggtcatttttattcaggatgaagatgcatcagggggcgatcaagatcaggaagaaagaagatggaacaaaaggactcagcagatgcttcatggtcttcaggtattgccgctgttgtctcagaggaaaatgcttcatcaaaggcttttgccattgttccctgaaaaaaaaaaagttagatgctggaaacagaaagcatacctttgtcaaacttttt

SEQ ID NO: 40987 - DNA, 2300 bp, Homo sapien
gatctggcaccgcccaccaagaaattgatgatgtggaaagagacaggaggagtagaaaaactgttttctttacctgctcagcctttgtggaataacagactactgaaggtaatatagtttgcagaatttttacttcatatacattttgagcatctaaaaaaaaaagattctaaaacctttgaatcatttttgatcaagtattttgcaactgtatggcacattttcttttttctcccttaaatcacagtgtactgggcataacttcatctgaaatatatggataagtgagacctgcatttctaaaagatgtaaaatgaattttccttacattaaaaagccactgacgtgtttaataatacttctctctgtaataaattattagttatatcgtcttagtgtgttttacatctgaattcttgaaatgttttctgaatgaaacatgagtggttctcctttttccacagtaaagaattctggcttcaggaggttttttgttgttttgtttttttgtttgtttgtttgtttttccatttataggctcttttctgctcacattccacagtattccaaaataagactcacaggtgtctggtgaatgaagcagtgctgttaggctactattctgtctgaagttgagatatgcacagaacctattgattttaccgtgtatttagaatatagtaatatattctaaatctaaagtatcccagagcaacaacattgtgctctttattgtaagccctatcatataattatttttaagaaggtccttaaactatttattctttgactcagtaatttcattattagaaatttttcctaaggaagtaattcaaagtgtggaaaagctatctctgtgaaaatgttgattacattgttctttacagtttaaaaagagagaagcctgaaattttaaaagtagaggaatggttcaaaatgaaatattatgtagccattaaaagtagtttaaatgagaccagaagcagtcgctcatgcctgtaatcccagcactttgggaggctgaggcgagtggatcacttgaggtcaggagtttgagaccagcttggctaacatggtaaaatcccgtctgtactaataatataaaaattagccgtgtgtggtggtacacacctgtaatcccagctactcaggaggctgaggcacaagaatcacttgaaccgggggcgcggaggttgcaatgagctgagattgtgccactgcactccagcctgggcgacagagtgagactccatctcaaaaaaaaaatagtttaaatgatagctaataaggttaccatatgtaagggaagaaaacacaatttaaagctattttgtatgagaccagttaggatgagttttaattgatgaatatgaaaataaactgcaggcagataaatagaaaagcccttaaggttgtgagataatggatacagtttttttagtttatctaaaatgtctgcagttataatttgaaaactcatttaaaatcattttcagatggaatgaaatgtgaatatgataaaagccatgctaaattatacacttatatttattagaacatacctttggaagatagaaatcagtggtgactttttaattagatttattttataattgaaatttttcttttttttttttttaatagctctttacacgctgtcttacaccgcttgtaccagaagaccttagaaaaaggaggaaaggaggagaggcagataatttggatgaattcctcaaagaatttgaaaatccagaggttcctagagaggaccagcaacagcagcatcagcagcgtgatgttatcggtttgttctgttggaatagttccttgatgaagttcacatgagtatttggcttaaaatttacctttatactgtcagagtgaaagaaatgaggaatcaaagatatactcaaatgtttgggcagggaaatgcattggatctgattgccttatttaagtatgaagcctcctgtctttccagagttttaaggttcagaactggcagggtagatagtctgctaaagaattgtcctacattgtactgagggtaggacttgtccttttaagatcccctttcccctttacgtatattgctaaaaattgagtaaatctttatggagctaaaattttatctggccttcttcattaaagaaagcattatgtatgtcttagtgtactagtttaaaaaataaatggttctataatactgttcaaaactgtatgacctatgttttctcttcatatgaccaattgcagatgagcccattattgaagagccaagccgcctccaggagtcagtg

SEQ ID NO: 40988 - DNA, 2300 bp, Homo sapien
ctccaaaataattaaaatactagcatcaaagatcactgggccaggtatagtggttcacacctatgatcccagtgctttgggaggcttaggtgggagaatcacttgaggccaggggtttgagactagcctgggcaatatagtaagatcccgcccccccatgtctactaaaaaataaggaaaaaaattttaaagatcactaatcaagatcaccataacaaatataataatgaaaaatttttaaatagcatgagaattaccaaaatgtgacacagaggcatgaagtaagcttgtgctgttggaaaatggcaccaacagacttgcttaaggcactgttaccacaaacctttggtttgttaaaaactcagcatctgcgaaactcagtaaaacaaagtgcagtaaaacaaggtatgcctatatgatagccagtcagcattcaaatgtccccagttgacatgtcggcttttttttttttttttttctcccagttcgagttgaggctaaacaaagtctacaaactgcatctggttgatatagcttatgggtctcctgagaatctattacagctttgccgcctcctattttttttttccttgccatctattttttgtacagacttggtcagttgttttgaggtattaatgttctggatatggctgatagtgtttagattggtgtttagcattacatactttttattttttatttagtatttttaaactatatgagagattattctttattagagaaagaaactgagtctcagggaagtcagggaactttagagtttacaccgcctgtaagttgcagggtcctaatgaaaacccatgcctatctagcccatgatttctaattttttcctctgtacttgatttagtgacttctgcatattacattgtatttgctgattattgatgcttttcaaatttaaatacaagttaatttccaaatcacttacattcttggattgtactggaatgtgtgaaagtattaaatattaaggcttctaaaacttggtgggttatacatatatatttttttaatttttcttatagagagaattgggatttgtttttcttatacatagacttgaaactaaaatgtatttgaccttcttttaaagtgacatcgatgtggcccagcagttcagcttgaatcagagtagagtggaagagataaccatgagagaagaagttgggaacatcagtattttacaagaaaatgattttggtaaaagagaaacaaattattagccattaattataatgttatattgtgttgctaatagcaatttcaaaagaaaaccagactatagacagaaagacttaaaatttcatgtaatgcattttcatcaagaaaagaatttggctttctaccagtagattaagcattattttcatacttggagctaattgtttacctacttctctccctatatgcaatcatagaacctatatattgatttctgcgaggagtcccaacattgaagtggtgatcacgtttaaaccaaccattttggaacagttagtttccctgttatacttgctattcaaaaacaggtattcaaaactagttagcaaggcatattgttttttaagaggcggggtctctgctgtgttatccatgctggagtgccgtggctcttcacaggctggattatagcacactacagcctcgaactcttggattcaagtgatcctcccacttcagcctcaagtagctgggactacaggcacatgccactgtgcccagaaccagattcttttcttgatgaaacacattataacgggaaagtttcagctgtgactgttaatgtaacttaacatacatacatatttagagtttatcaaacatattttaggatcatttaaatctagatctaagtttgaatttgctagtcatgccccagtgttgtaactgtgtgtaattgagtcattttaaaaaattcagatgctaaagaattaaagtttaaactagatattttaacatttgaagtaagacttcagtaagcaaatgtgacataattagaataaatcattagcagttttcttttatcacagtgctatttctaatctttctaaactaatgacaaattaaaatttgtttaggtgattttggaatggatgatcgtgagataatgagagaaggcagtgcttttgaggatgacgacatgttagtaagcactactacttctaacctcctattagagtctgaacagagcaccagcaatctgaatgagaaaattaaccatttagaatatgaagatcaatataaggatgataattttggagaaggaaatgatg

SEQ ID NO: 40989 - DNA, 2300 bp, Homo sapien
acatttgtactaacatggaaaatctccaggttaagtgcaaaaaagttggagttttaaaaaagaatgctctttctctatatatttacgagttcttgaataagcttaaaatacctgtggcgtacacatgaaactggtgatactggttacctctggaaagtaggtatgcagggcaagtgaggcctacctttttgtactgtttgatatatatatatacatacacacacacacacacacacacacacatattttaactcgggacataaatgtacaccacctattcaaagtaaaaactactatctcagaagtaaagacataatcctgctattgtcattaactagcagttaagctgcctaacctttatgcagttcagtttccctactatgaaaacctgaaaggttgaaatctggtggtttacctaacctttgaaaacgtcaatacctaactcagatcagaacggagctacctcttcaggggagtagggggaaggatctctgaagatatttctaaccctgcacactagaaatctcctctgttttggttctaacatcctttgaccaagagttttacaatcagacagtcgtaggttcaaattaagctccctctttgctcagttgttttgtaacggtgaataagttacttctcaactataaactgggataatattcatcaaaaaagattatgaaaattaaatacaagggcacacctaacatagtgccactgctgatgcgaaaagtaactctgaagacaatcttgcagcaaaacattaaccagccagtataatcatgcctaacaactctggtttgacatttaaactaaaaacacaaccttatttctcaagaattagaaaatttccattctgtaccaaactgtaaaagcgtttcttagaatttgtatgtttcacaaaataattcaccagaaattcttttgtaattctgacttgtgtataaaaaaaagcactatgtctattagttatgcactgctgtcacctcaactatacaaactgttaacttatttgaagatcagatatggcgtatgtcctcatcaatgcctttccaaaaataattagttgcctccgacattaacaaaggtatttaatgacttcacgatttgagaaaccttctcctgcctgtctccaaaattctatagactcgcactgcccgctggcatttacacccaatttaagaaaatagaaatttttgcctgaaaaccaattactcttctaaccagtataatgacaacaaagattaactttcccttgcaaaaagaagccgataaacacaagcctttcccagaaactcttcgcacaaacgctgttttttttttcacgctgaagacactaacaaatcagagtgaccaagtaaatcccccagggtttccctcttacaaatttgaagaaggccgctaagtctggcagcacaacccgacagtgtcaccccacactatcaaagcggatcattcgcaaaaagcctttttcagcgacgaaaagggcatcaagcatttatcagaaacacacacctcccccagagcgtctctacaacacccgatatccttaatcactttaaagaatgatcagaaaagttcaggggaaaaccaattatgcaaatatccttggaaaaagaagcaacttccctccgtctctttttccacgcgtctgtgaaatattcagcattcccaacgtaaaaattatctttttaaaacgggagggcagcagcagtcactggccgaggggcacccgccgaccccccgccccaccccgcccagccccaccagctccgcactttcttgagccccgcacccgagttcggcggaaggttgctgctcccggggctggcaccgcgggcgccgggcccgccaccgcctcctcccagacagccatttttacccgcggagtaggcggcccggtccccagagcgggctcgttcaaacctcctcccctccctccgcagcccagggtttccccggcctcctgggggacgtgagatggacctgcagggtaacagcctttgtagatctcagaatggatcagaatcatttgttaccgaacaagcgatgatgcgggcccaagctgcatgggtccgggccgagggcgggcccggggcgaagggggctgggcgggtggcgccgccgcttgggcgccgggagggtggcagcacgcgtgggcgcggcgagggctgccttctccctcgccctcccgcccccaggagtccggctccccgacggcagagcggcggggaaagggtggggggagggagctggaggaaaagaaggggtcggccgagtctcttaccttgctctccgct

SEQ ID NO: 40990 - DNA, 2300 bp, Homo sapien
ttttaaggaatctctatactgttcttcacagtgctgtactaacatacattcctaccaacagtgtacgagtgtttctctttctccacatctttatcagcattcattattgcctgtattttggataaaagccatttcaactgggatgagattatacctcatcctagttttgatatgcatttctctgatgattagtgatgttaagcattttttcatatccctgttggccatttgtatgtcttttttgagaaataaccattcaggtcttttgctcaattttaattggattattttcctattatattgtttgagctccttatatattatggctattaattctgtgatagatgagtagtttgcaagtattttcccccacttgatgggttgtctcttcactttgttgtttgctttgcagaaggttcttagcttggcatgatcccatttgtccatttttgctttgcttgcctatgcttttaaggtcttactaagaaatatttggttctggagcatttccctaacgttttcttctagtagtttcaatagtttcaaatcttagattccagtcttcaagccattttgttttgatttttttaatatggcaaaagatagtgatctgtttcattcttctacatatagttatctagtttttccagaacaatttttggaagagaccatccttttcccaacgtatgttcttggcagctttgtcagaaattagttgactgtatatgtattgatttatttataggtcctctattctgttccgttagtctatgtgtctgtttttatgccagcaccatgctgttttgtttactatcactttgtagtataatttgaagtcaggtaatgtgatgcctccagctttattcttttgctcaggattgctttggctattcttggtcttattgtggttccatataaattttaggatttttttcctctttctgtgaagaatgtcattgatattttgatagggattacattgaatctgtagattgctctgggtagtatggaaattttaacaatattgattcttccaatccatgaacatggaatatatttccatttttgtgtgtcctcttcaatttctttcatcactggaaagatctctacaataaaaacaaaagtaaatttcttcgtggtacaagtaagtcttttaagataagaaattttaagattcctcccaagcaatactgaaaatttccaaaaggcagttattatctctgttatattaatcattatatccagagcccaacgtgtagcaaacagaagaccctctataatataggttgactgaataaatgaacctctatattttatggaattagtttgaggtttttatgttactttcatccctatagagccataaaatgaattttttggtgggggcacacaaaattgcaccacgacagcttttttctttaaaacaagcacaagaataaagctaaacgcaaatattcaccgcactggaaagcactgcgcgtgcgctatcttacgctattggctaacaccgcaactctcaaagaccctcgcaagagaatcacctttgcgcttgctcagttgtggactccacaaacagagggcgggttccaaagaaaaggaaatagtcattgcgcctgcgccgctccttctggggggaggggggggcttgggctggctgcgcaggcgcacaggtaccattttgaccgtaaacatcctgccgatttgaaccgaggatttgggcggcaggaagagccgcggcgtaacggcagccatcttgtttgtttgagtgaatcggaaaggaggcgccggctgtggcggcggcgggagctgctcggaagctacacctcgcaagggctcccccctttccccaccccctcccccgacccttttcccctccccgggccacccagcccgcccaactcccagcggagagcaaggtaagagactcggccgaccccttcttttcctccagctccctccccccaccctttccccgccgctctgccgtcggggagccggactcctgggggcgggagggcgagggagaaggcagccctcgccgcgcccacgcgtgctgccaccctcccggcgcccaagcggcggcgccacccgcccagcccccttcgccccgggcccgccctcggcccggacccatgcagcttgggcccgcatcatcgcttgttcggtaacaaatgattctgatccattctgagatctacaaaggctgttaccctgcaggtccatctcacgtcccccaggaggccggggaaaccctgggctgcggagggaggggaggaggtttgaacgagcccgctctgggg

SEQ ID NO: 40991 - DNA, 2300 bp, Homo sapien
acatattagtgtgaacattcacactaatgtctttctgtgcctggtttatttcacttaatgtcttccagttctatccatgttgcagcaaatgaaaggactttttttcttttttatggctgaaaaatattatcttgtgtatgtgtaccacattttctttacccatctatccactgatggacacttacgttgataccatatcttgacaattgtgaatcttgctgcaataaatgtgagagggcagataccactctgatgtactgatttcctttttttttgggggggggtatttactcaggagtgggattgctggctcatatggtggctctatatttaggtttttaaggaatctctatactgttcttcacagtgctgtactaacatacattcctaccaacagtgtacgagtgtttctctttctccacatctttatcagcattcattattgcctgtattttggataaaagccatttcaactgggatgagattatacctcatcctagttttgatatgcatttctctgatgattagtgatgttaagcattttttcatatccctgttggccatttgtatgtcttttttgagaaataaccattcaggtcttttgctcaattttaattggattattttcctattatattgtttgagctccttatatattatggctattaattctgtgatagatgagtagtttgcaagtattttcccccacttgatgggttgtctcttcactttgttgtttgctttgcagaaggttcttagcttggcatgatcccatttgtccatttttgctttgcttgcctatgcttttaaggtcttactaagaaatatttggttctggagcatttccctaacgttttcttctagtagtttcaatagtttcaaatcttagattccagtcttcaagccattttgttttgatttttttaatatggcaaaagatagtgatctgtttcattcttctacatatagttatctagtttttccagaacaatttttggaagagaccatccttttcccaacgtatgttcttggcagctttgtcagaaattagttgactgtatatgtattgatttatttataggtcctctattctgttccgttagtctatgtgtctgtttttatgccagcaccatgctgttttgtttactatcactttgtagtataatttgaagtcaggtaatgtgatgcctccagctttattcttttgctcaggattgctttggctattcttggtcttattgtggttccatataaattttaggatttttttcctctttctgtgaagaatgtcattgatattttgatagggattacattgaatctgtagattgctctgggtagtatggaaattttaacaatattgattcttccaatccatgaacatggaatatatttccatttttgtgtgtcctcttcaatttctttcatcactggaaagatctctacaataaaaacaaaagtaaatttcttcgtggtacaagtaagtcttttaagataagaaattttaagattcctcccaagcaatactgaaaatttccaaaaggcagttattatctctgttatattaatcattatatccagagcccaacgtgtagcaaacagaagaccctctataatataggttgactgaataaatgaacctctatattttatggaattagtttgaggtttttatgttactttcatccctatagagccataaaatgaattttttggtgggggcacacaaaattgcaccacgacagcttttttctttaaaacaagcacaagaataaagctaaacgcaaatattcaccgcactggaaagcactgcgcgtgcgctatcttacgctattggctaacaccgcaactctcaaagaccctcgcaagagaatcacctttgcgcttgctcagttgtggactccacaaacagagggcgggttccaaagaaaaggaaatagtcattgcgcctgcgccgctccttctggggggaggggggggcttgggctggctgcgcaggcgcacaggtaccattttgaccgtaaacatcctgccgatttgaaccgaggatttgggcggcaggaagagccgcggcgtaacggcagccatcttgtttgtttgagtgaatcggaaaggaggcgccggctgtggcggcggcgggagctgctcggaagctacacctcgcaagggctcccccctttccccaccccctcccccgacccttttcccctccccgggccacccagcccgcccaactcccagcggagagcaaggtaagagactcggccgaccccttcttttcctccagctccctcccccca

SEQ ID NO: 40992 - DNA, 2300 bp, Homo sapien
agtggtaatgatattaaggtacagtatccacactcctttgcctcttctttatgaccaggataaaatgattgaccaagatgttgaccatcgtctgtaacccaaggacacattatttgtgtatgtgtaaacttctctggttcctttccagaaaaactcctgatttttttataggaatgtatcagttcttttttggtacagtcagagtccaaggtctatagtaatcattataataataagagccactaaacaatacccatggtctaagcatttcatggaatattatctcacataagctctggaatcctatgagattataaattccattttacagatgggtaaacaaactcaaactggctaagtaacgatcccaaagttgtaaggccaacaagtgttagcagaacctgtaaatggtaatgttggtatttgagccctcatctgtttagattttattgccaccagcggtctacagccataccaccctgaacgcacccgatctcgtgagattttattgccacccccaacatattgcttgtctaaagctcctaacaagcaacttattaaaatgttatgattgaaagctgtctctgagcttattcagtgtaatctcctcatctgatttaaatatgagtcccctgaggctcaggaaggagtaccggcagatcccaagactacaatgcagagatggctgcgccaggtttcagccttccagtttagcatcctggcccatagcacaggcctccagtggccgaatgaggtggctccggctaccctgcagctcagactcactgcttagactcagggtgaaaaccaggtgtttctttgacattgttggataagatagtaaatctggtagtaaatctaatgtaacccatgttaacaatctgaatctgacacggaatttaggatattgtcctttttttgtttttgagacgttgtttcactcatgtctcccaggctggagtgcaatggcgcaatctcagcccactgcagcctctgcctcccaggttcaagcgattctcctgcatcagcctctggagtagttgggattacaggtgccagccaccatacctggctaatttttgtatttttagtagagacaggacttcaccattttggccaggctggtctcgaactcctggcctcaggtgatccacttgcctcggcctcccaaagagctaggattacaggcatgagccacagctccggcctaatactgttcttcttaaacttagaaatgcgataacattcttaaataagacaatttactaatggttggctcagttctaaagtagtggttaattgtattagtaatcagtgcaaaagagaagaattttccaagtcaagtctccactgcacactttcctaggcagcaccattttaaagtctgattgctcctattcattgtgtccttttcaagttgtgactaatttccagttttttgaattaaaaaaaatcagtcagctaaaatatttacctatacaccctcctgtttaatattcggatgtaacctgtgtaatgttcgaaatggtgcaattttacaaaataccttatcacttccagttttctaaattattacccacgggaaagataagaataaaacttgcggggcataaagaaagagttactgatggacacactccatcaatcgcaagagagagtttatttcatggaaatttcctcctccgcgagccatacatacacatagtcacagttccctacagggcagaaaactatagaaacgggttggggaggagacatcttgggtatgtcactggtagaccaggcacccccgcccccaccccccaccatgggtcctgcagggcccttttccttcccaacgatgctggggaggcgggggcgtcaacgccgtgtccagacctgaggggccccccaaggcgtcgggtgggctacgcggccagcggctctgcagctggaggagaggacccgggagagggagccctgggagccgtccgcctagcccgctctctcaccagctccgcccgcagcctggccagggtggcctcaacgcccgtccagctctgctcctcccgcgccgccgccgccgccgccgcctcctgcacgcgcctcgagatcgcgcgctgcaccgcccactggaaggcgcgcgtcagccgtcgtctgaggtcctccagcagcgggctggcggcgagggcctcctcctggatgtccgtgctcctgccgtccccgaagaagtcgcacgcgggacgaggtgggaaccaaagctccgctctacctgggagtccctggagcccctgggaaattctctctctgcagcggcggaa

SEQ ID NO: 40993 - DNA, 2300 bp, Homo sapien
gagacatcattacgttgcttaaatgtttcacatatgcctttggcgaggatgaattctatgcaatagtgtgtccagaatttggtgggttcttggtctcactgactaagaatgaagccacggaccctcacagtgagtgttacatttcttgaagacggtgcgtccagagtttgttccttctgatgttcggacacgttcagagtttcttccttctgatgggttcgtagtcttgctggcctcaggagtgaagctgcagacctttgcagtgagtgttacagctcataaaggcaatgcaaacccaaagagtgagcagcagcaagatttattgtaaaggacaaaagaacaaaacttccacacaattgaaagagagcagagccggtagccactgctggctctggcagcctgcttttattcccttatctggccccaccctcatcctgctgattggtccattttgcagagagctgattggtccgttttgacagggtgctgattggtgcgtttacaatccctgggctacacacaaaagttctctaagtccctactagattagctagacacagagcactgattggtgcgtttacaaaccttgatctagactcacggtgctgattggtgtgtttacaatcctttagctagacataaaggttctccaagtccccaccagattaccaagatacagagtgctgactggtgtgttttacaaaccttgagttagacacaaagtgctgattggtgtatttacaatcccttagctagacataaaggttcgccaagtccccactagactaaggagcccagctggcttcacctagtggatcctgcactggcagcaggcggagctgcccgccagtctcgcgcgccctgcgccggcaatcctcagcccttgggcggtggacggaaccgggcgccgcggagcagggggcggcgctcgtcggggaggctctggcgtcgcaggagcccaccgcgggggttgggaggaggctcgggcatggcgggctgcagttccccagccctgcgccgcggggaggcagctgaggcctggcgagaattcgagcgcagtgccggcactgctggggaacccggcgcaccctccgcagctgctagcccgggtgctaagcccctcactgcccgggccggccggcggctccgagtgcggggcccgcggggcccacgcccacccggaactcgcgctggcccgcgagcgccgcgcgcagcccaggttcccgcccgcgccactccctccacacctccccacaagcagagggagctggctcccgcattggccagcccagagaggggcccccagagcgcagtgtcgggctgaagggcttctcgagcatgcccagagcggacgccgaggccgaggaggcgctgagagcgagcaagggctgcgagggctgccagcatgctgtcacctctcaataggagatcagttaatgcatactgaaggaaggcttgttggagaagaatcctctcctgaaccctgtggagactctagaatcctgcggtaaatgttctaattattgaaaacatttcccaatgctcaccctcattaaggatgttctaatgcctaggagacctactacctatctgattctgtcagagaagccattttgttttttggcaactggaagcagtggggatgaaatattttcctaaggcgtctcaggactgaactggcagcaaaatagtaaactgtttatcagctcttaaatttttataccagggaggtttagcaaactgtcagaaaacagcctgaattgaatttctataattactgcttccaaattggtactgagggtactagttgctctaaacttctgcaggattcagtctgggacttttcatgctaagaaatatctcaagattttaaggtgggattgtcagggtcagaggacaatgtcctctgaaatccaccagtattttactggactttacggtttacagtttaccaggtaccttacagtttaccaactgctttccagtttataatttaccaggtgctgccatagctgatagctcgttaatcttacagtaaccagctgaagtaggtgtgccgtgaggctattgaattttaagaagcatcaagaaagcctgcctgtctaactttggaaatatcaccctcatgctgtcttcccaggatgtctctctccctaagtaagagatgttacttcctggagggaatgcagtgttgggaatctgaagacccagctttgagctgaatttgctttgtgatacctggtgagtcattgatgtctctgggcttcaattttctcatttgtagaaacttgtagagtaag

SEQ ID NO: 40994 - DNA, 2300 bp, Homo sapien
tctttgatgaaaatcataattaatttcctagtactttataaatatgtacatttttattagtaaatgtaacatacatatccacacatatattttaggtatctatatatgtgtgcatgtatatttaagttgaaccatataaaattgctgatattagaccacataggacttatatagtttatcttatagacaaatagaagagatcataggatacatttttgacagggggtagcagtattttttgttgttttgcttgggtctctcattgtctcttttcccatcttcacttttccctgtcctacatcaaccccatcctactctcactttattcttgccccataggcaatccacattaactacctggcatgtatccttcacactcattataaattatatgtcaattatgtatgtatgtatgtcaattataaatagatctgtacatccgtatttgtactagaggcaaagttcgcatggaggaatctcaaacttccagattgtttatttcctgttgatatctatagccaaatattctccttcctgatttgaaaatattgcttatctcttttttttgtactcacccttaatgaatttcaggctgatttaaagtagtttcctcattttctgacattcattcacttgaattctatttctcttgtctgtgctagaaactattcacaaatgattcaagctgtgacatatggcagtgtgtcacacaggtggattagtaattcttttctggttttctactttcgcctccacagaataactgattactttgtaaggttaagagtaagaatatacgagaaaaaatacattggtttttattctgctaacagtagacccaggatttcaatgccttcacttgcaaggaaaaggctcccccagagcctcttagaggctccaaactgtgtgagcaaagttaaggatcagtaagagtggggtcatatgagaagaccttagaatttatgttatagatgagagtgtttgaaatcttaagataataagaggtacagctacaccacagatgtgataggagacctaatagtctcattctgaaccaaaggtgacttctcctgtcactgcctatgacaattggcattgaaccccatcctccttttagagcacaatattcattttattaggccattgtgagagatctcagctcagcataatgggcaacttcccgtgactctgggccactgggttattctgggacttaactactctgagttttctcactagaaagttagtgttcacacaaggaaaaggcaacaagaacctggtggtctggggtttactcctgttctccagtctgcacaaccccctctttctctaccgttgtgtacatctttataggtcttgaaaccttttgcccacacacaaatgcctactgtttgtccaggctcttgccataaggctatagttctttctcttatttgggaaggaaagtgctttgtatgaagtaaaatgctgattcctaggagttgaggagtgtgaggtctcccaggagcaactcagaggcttccttcctcggagctggaactggcatgcctgatagggtttccttgggtgaatccttgatccttagtagagggtaccttggccaggaagaacaaagctcactctggttcttgtattttggagggctgttatttacgtagaagcagagtctgtccttctcttgccaatcaaaaggatttcaaagctgctgtaccaagaactgttttcagattactggtttcagaaactattgacccttgtcctccctttcaatagtgaaatcccaaaatggtcctaggagagacaagtaaattctgacagctgcttagaggtcatcttagaactaaattccaaagaaataattttaggctgataaagagtccagaaaaaggaggagggagagaaaaagaaagaattagtttagtgtagcgaatggtagctatttgcagctcacccacgtgtgctccgaaggtcaaaaccctacatcagcaatttgtagcaagctcttgagctcctctacctcttagaaagcacaattgaatcagatatcatatgaaagacatacacacttcatgtaatgctacctgcaagtctccctagaaaagcagtttttgtaggtgaaaacaatgaagccaggtaatattgcaaggaggctgtaattttagcagacctaccaacaacactgatgtaggaagctcattattttaatttctggagccttttaattttttctttagaaagtgtataaataattgcagtgctgctttgcttccaaaactgggcagtgagttcaacaacaacga

SEQ ID NO: 40995 - DNA, 2300 bp, Homo sapien
gaaattaacataaggcataatttctcggaaacttattttttcttcagtgtatcctgtcttggtaaatgacataaacttcacctgaagtttcacatgaaagcagaaatacgtgccatccttaattctttcctctccttaatgttcctgatccagttactatcaagttctctagattctacttactaaatatttattcaaagttaccctctgtctcctttctctgcacaggtcatgatcatcatcatcattcccctttgggagagaagacaatagaaacccaccatctgttccccatttagcaaccagaataagtgttctaaaatgaatatttcaaattattcctctcaccttgaaactcttcaatggcttgctatttcactccataaattctcaactgcttgacatgggttagaagatcctccagggttgcctctgtcttcagccttatttcctaacactcgtcctcacactgaacttcttccagatcctagaaagcattaggaggcctcttcacttcaggtgttggcactggccttcctcgtcctcatagaaaagactctatcattcgttactcccttccctatccaccttcaggttccacactgctcccttcaggtcgttctcaatctcctaaattgttagcaccctgatatcaggaacttttgcttcaagacgctcatcacaatagtgttctgtttgtccccatgacaaacatgctgcagggcttttgcctggtttgttcagtacgctatcttcactcctagcacccagcacataataggtgctcagccaatatttgtcgaatggtaattaccgaagacctgcgaattactatgtttaaaatctctaccagggttcctatgacatatttagtaactatttcctggaaagtccgtacaatggagcattcagatacttctaaaaaatgcaatgtttgtgcctatcactaattttacattcttcacttttccccactttggagatgaacagtaagtgagagacattgtgagagacattttaatttctcttgcatttatcatgtcactcaacaatcattcaataagtatttattgatacttgtgccaatcactaggtgttgagaataagtgaataaaatagtctgttttcatggagttggcagtgtgtgtagatagggtgagataaagtctgaaagtaaacaaactgaaagctatataaaatatcagacagtaggccgggcgcggtggcttatgcctgtaatcccagcactttgggaggccgaggcgggcggatcacgaggtcaggagatcgagaccatcccggctaacacggtgaaaccccgtctctactaaaaatacaaaaaatttgtcgggcgtggtggcgggcgcctgtagtcccagctactcgggaggccgaggctggagaatggtgtgaacccgggaggcggagcttgcagtgagccgaggtcgcgccactgcactccagcctgggtgacagagcgagactccatctcaaaaagaaaaagaaaaaaaaatcagacactaataagagccagagtcagaaagaagtgtgtgtgttgatcattttttttgcttacagatactgggaaaactcaaagaataaaacatctgagcagggaccaagagcaatcggggagtccgtatcatgtcacagagaagcgtacaagcttaggaatcttgttttctgaattcgaatcgcaggttgccagttacacctgtatgcgactcaacaagtactttaacctgtctcttagctgttatactacaaacctcaggcttgttaagagaaaatgctccgcaaggaactaaacacagaaggttctaacgctgagccaagactgggaaacgaactctgggaactcaccccaggctccccaagaacatcgcccctctggctggagcgcaattggtgattggctacttaacccgtccgtcctttcccgcccaggggtccaatccaatccagcccggctccgctcggagacagttcgccgagtgggcggtgtctatgacgttttctgacgtgttacgtcacagtgggcggaagtcgcggccgctgttttgaaatcgggccgcggggggtctctcaagctggttccaacgctgaggccccacagcctcccaattccgggcagacccctgacacctgctgtctggccccttccggcctgaagctgcagccgcgccatgtccacccctccgttggccgcgtcggggatggcgcccgggcccttcgccgggccccaggctcagcaggccgcccgggaagtcaacacggcgtcgctgtgccgcatcgggcag

SEQ ID NO: 40996 - DNA, 2300 bp, Homo sapien
cccaagaaccctggtgagcgggcagtactatgtttatgttttgagtgggattcccatttttacgtaacagcctcctacatttgttagaagtagtcttagcagttgtatggtatagcatttcccttcctgcccccagactcagtaattggtttagatgccatttaatgcagtttttaattcctcaaaactagtcttctgtgaacaaaatatcttttcagatttaccaggtaaatctgtaaaatcagtatgaagggattgctccccagccagcatttggttaagttgaattctgattatccttaacctgcaagcaaagctttgaagttcctaataacttttctgttcaatagttttcatgcttatgtaaatagacactctaacatttagaagttaaagcacccccccaaaaacctcaaatatataacttggcctgagactctatttttctactgcaaaattcaatatggacaattgagttttagtaaaactacgtaatttcgaattgaaataatttaaattgcttttgttttaaaaaatttgtatttgtgcataataagttacatttcaataaaaataaagtaaatgcattcacttgacttattttccgcgtgggcattttcttcttcatatatggtccataattacttaagcttgagactcactgcttcgacttgcaaacagaacatttcaagtgatcaaaaatctaggacccagagggagtgaatgcacaactttaggattctgaccttagctgcaatagaaaccttgagtgacttttaaggctatgatgtcctggtaaagaaatatacctaaaacatagatggatatgataaagtaatggaattttgcatcatgcagctattctctgccagcatgtccggcaacagacatctttggaagcatatttttgaaaataggtatcctcgttctcttcatatcattttattattgatctctgaaagactgataaccttggtaaaacagccagctcaatgtgtagccaataaccacgcctaggtgtctggcttccccctctcttattcccacctcccccttttccatctccttctcttcctccttccctccctctctcatagacctcccacacccccgccccacacaaaatatatatatcattgtagtttataatttataaagatttatcaattgctaatatatcagttatttatttatttatttttatttctaagcatgcctcctttgaagggcatatgtatgtctgtgtgagtatatacaggaaatgtatccatgtctggaaaggggcctccatctagacgccaagtgagagttcttggatcttgtgagagaaagaattcagggcgactccatagaataaagtcaaagcaagtttattaggaaagtaaaggaataaagaatggctttccaaaggcagggcagccccgaggactgttgattgcctatttttatggttatttcttgattatgtgttaaacaaagggtggattattcatgagttttccaggaaatgggtgggcaattcctggaactgaggattcttcccctttttaggccatataagataacgtcttggcattgccatggcatctgtaaactgtcatggcattggtggaagtgtcttttagcatgctaatgcaatacaattagcatataattgagcagtgaggatgactagaggtcacctttgttgccatcttggttttggtgggatttggctggcatctttaccgcatgctgttttatcagcaaggtctttgtgacatgtatcctgctgatctcctatctcgccctatgactaaacacaactaaccttccgggaatgcagcctcctagtaggtctctgccttattttacccagcccctactcaagatggagtcactgtggttcaaacacctctgacaaatctgtctgcctgttggaaaggactttgtcaacttgtcatgttacttatataaatatagaaatatgtatttaaaacttgatggacacttcaccatcacactctcttctcctctcccacatcactctagcactgatccatttttagaaaaggtttttttggggatgggggttgaccagatgtggatatttagagataagtctataatcttccaactgtagaagtctttatgtctttgagtcttgcttgtgtgtgtaaatgtcctatttttttttttgatatatgaataaagtaattaatttgcatttagttgcttaagcctgtcttcatagcctggggagaaatgatggctgacacttgtcattctccacccttccgctccccacatttcatttggta

SEQ ID NO: 40997 - DNA, 2300 bp, Homo sapien
cagccttgacttcccagggtcaagcaatcctcccacctcggcctctggagtgccagcaggacgtgtgccaccacaccctgctaattttttattttatttttttagagatgggatctccctgtgttgcccgggctggtctcaaactcctggtcttaagtggtattcctgccttggcatcccaaagtgttggggttacaggcatgagccaccacttgtggcctacttggctcttttttacaggtttttggttgacacttctctgcagaatagcacctggcacctctcaccaccactgaaaaggatggaattttatacacctctttttcctaggttctctctagcagttaccaagggaccatcggaggtacttattgtggctgtttacaaaagccttgcctccagtctgagtcacctcaccctactctctgcttcttccttttagctactctttttttcagtaaccctccctctttcctctgaaggcttgtgcttgcacacacaggcagacatactcatgcacgcgcacaccacacatgcttcctgtcctctggctctcccgtatcctatgtaaaacctcctactgtcatttaagtgaaacccttctagcacataagagttttcatctcagaagctcaattttacctttcacttttcagatagagaacacccaaggtttttaataatctggcgaatgtgttaaaaaaggacatattttttaaaatctagattgcaaaagtaatactgtagcattgttgagttcagacattatagaaagtgaaagttccctatcatttgtttcccataaccaccttgaatagtttagtggatatattttattctaagcacatgctgtttatcttcttgaaaacaggatcatggcatagatatactcttttgtaatttctcttattagaaaagaagattaatcatatatcaaacacgattccatgtcactccatatagatctttccctcattctgtttttacagctataagggagtctgctgtgaaaatgctccttcgattagtttataactgagtgtaaaatttggcatttcactcttgattatagtctttttctgtatattcacccccaattctttgagaatgaggagtaccctaattttgtaagcaaaattttggggggctttggggtgaaaactaatttaaatgcttattttctcagttgcctacctccatttaaaaatcagttttgagggctataaaaaaaccttatgatattaaggcctttttttctgtataaaaataacatacaatttattttttccatttattcaaaagactgaattacactagccaagaaatgatcagtctcgtgtaaaagaataacacacgttctccttgaatcaagactactctgagattcagaaatgccagtagcggaaggtggggtgtgaccccttaagtaagtgtgactagttaaaggtgtatggatattctttgtggaaagcgggctgccagatacaatttcaggctgtttcatattacttcacacggtgctttcaaactgtttattttctctcttggcactagtgagtacagctcataactggccagataatatctaagtctaggaccaggacagtgaatgggttttaccatgatttgatcaaaagtaaacaagaaaacaaaagcagaggaaaaaaaaaaaaaagagaaggcatcacatttttctcattgtggggctaaaatgctgcatgttgaattttcactttctgattagaacccacagttgaacagatctgatttatttttttggggtcaggaagaaactgtcaaattttagtttgactgttcttttctttaggtctcccccctttcttcccctaccttttttttttttttaagcattactatattaatcagatagcagccactgtttgacatgtccttctgtggtggctgcagattaagtctgaaccgtgccagaaatctcgttgcattttttgatgtagcagaaatgaacctggttcattccatcttaacagctttagccaaatggctcagaagggatctacccgatttcataaagaagagttaatgtgcagtctggtttaatacaggtgcccttaaaatacatttttgttttgttttgttttctcacttccaagtttaacatgtccatggacattggctttagtttccccaagatgagtccatgaatgaccttgttccagtatcccttgctgatttgagttcccaagtaataagcctgggaatgttttcagtgcagcagccgggagaagaagggggattcagcagttgctgttcaatgcatt

SEQ ID NO: 40998 - DNA, 2300 bp, Homo sapien
aaaacaaatctgaaacaacagaggtctgaaactttccactctatcatttcatactgccttgttataaccctgcccttcatccacaccccgctggggtttttgcagcctgagggaagccgggaagtgtctgctcctagctctcagtcactcccataataaacaatcactaaacagccggctgccctaggcaactgtctagcttgcccgagccctgagactttagctaggccagagggtgggaggtgttttctgtaaagcagtgttcaggatctgaggccagggagtttgactttgaccagagatactgtttgggagcctagcacatctttgtggacctggaggatctttagcgggactgctcctcggttacctgagttatctaatgaagttcttccactgggagtggcaggagcttgggccaaggagtgggaggtcagtgagggaaggaccaactatttggcactaattgtacataaggtagttttcctgatgcaagtgttccttctatagctgggacagttggcaattctaccagtcatatgtccttaagagatatctttaacaccaccaccaccaccaccaccaccaagagaataacatcactttgaggactggggcaagcttaaattaactggtttccctgcagccattagaaaatttattttttctctgtgattggatctcttggaagctttcttcataatagacagagggggctcaggcaaggcggcctaagtagataatgaggatttaggatagccgtcttacactcttagcacagaggcaggcatgaagaattgcaacaattcctcttgattgtaataattcctctttattgttgggcattggggtgtttctttggtttaaaaaaatgtgctatgtagaggaggagtaaggggagattgttttaatgcttagcagaaaattgaaatactgggtctcggagagtggaaggagggctgggagaggcagctttcggatcggcggtcgctttctatgaagtcttcctttcctccctgcttccctccttcaaagcatctttctctaggcgttccggcaggcagcccaggaggccagattctccagggcgcccggggccgcgcggcacggggcccctgccggtgcctccttccccggccgccgcgtttccgcaggcgcctctggtccccggcacggcgcaggccgagatccgggcctgggcgcgccgaggggccgcggggctcgcaccgggccgtcccgcgctccacctgcccggcagcccgccggcagcttgcaacccgggagccccggctccctgcgccccctacgcccccaacgccgcgccggcgcctcggcccgcggccgggggttatgaatgggcgcagcggaagcaccgccccccccggacgtgacgctcggccaatggcagcgcgggctgcgtggatggatgaggtcagcgctgtcgtgtcgggaatggaatgtgtaagtgtaacattcagaaccgggtaacattcggcgaccgaacgcggcggtcggcagcgttcgcgcgggggcctgcgaagcgctgctcggggccggcactgcccgcggggaggacgcgccgccgccgccacccagcgccgccgccgccgccgcctccagccgggccgccgcgcgtcccgggggccggccccgcgagcgcaggagtaaacaccgccggagtcttggagccgctgcagaagggaataaagagagatgcagggatttgtgaggttacggcgccccagctgcaagatgcactagccggctgaacccgggatcggctgacttgttggaaccggagtgctctgcacggagagtggtggatgagttgaagttgccttcccggggctcattttccacgctgccgagaggaatccgagaggcaaggcaatcacttcgtcttgccattgattgggtatcgggagctttttttttctcccctctctctttcttttcctccgtcttgttgcatgcaagaaaattacagtccgctgctcgcccgccctgggtgcgagatattcagccccgctctctcccgtgcattgtgcaacccaaagatgaaagaccgaaggggagaaagttaaagaaatcgcccacatgcgctggatcagtccacggcttggggaaaggcatccagagaaggtgggagcggagagtttgaagtctttacaggcgggaagatggcggactggagctgaaagtgttgattgggaaacttgggtgattcttgtgtttatttacaatcctcttgacccaggcaggacacatgcaggccaaaaaacgctatttcatcctgctct

SEQ ID NO: 40999 - DNA, 2300 bp, Homo sapien
gaggtcaggagttcgagaccagccttgccaatacagcaaaaccccatctctaccaaaaataaacaaaaattagccagggctggtggtgcacacctgtaatcccagctactccggaggctgagggaggcaaatcacttgaatctgggaggcagagtttctagtgagccgagatcctgccactgcactccagcatatatatatatatatatatatatatatatatagagagagagagagagagagagagagagagagagagagagagagagagagagcacctccagtcccacagccccacttcacagggctgagataatctgcaccctgatcagaagagaaggcctcctgccttgaactgttgttcttagcaacttgggctggggggagctttgggtcacatgtggtttcaatcactgcctttatctgcatcattgtcactgtatttggaagatgactgaatccttattcctgtcccaggcctctctacattgtgcagggggttcaagtcaaatctggaaaagctgtctcatctttggcaggtcagaaatagggagaggcttcacgaatgtatagtaatgtcccacccatgccccttccctgctttattaaaacaaatctgaaacaacagaggtctgaaactttccactctatcatttcatactgccttgttataaccctgcccttcatccacaccccgctggggtttttgcagcctgagggaagccgggaagtgtctgctcctagctctcagtcactcccataataaacaatcactaaacagccggctgccctaggcaactgtctagcttgcccgagccctgagactttagctaggccagagggtgggaggtgttttctgtaaagcagtgttcaggatctgaggccagggagtttgactttgaccagagatactgtttgggagcctagcacatctttgtggacctggaggatctttagcgggactgctcctcggttacctgagttatctaatgaagttcttccactgggagtggcaggagcttgggccaaggagtgggaggtcagtgagggaaggaccaactatttggcactaattgtacataaggtagttttcctgatgcaagtgttccttctatagctgggacagttggcaattctaccagtcatatgtccttaagagatatctttaacaccaccaccaccaccaccaccaccaagagaataacatcactttgaggactggggcaagcttaaattaactggtttccctgcagccattagaaaatttattttttctctgtgattggatctcttggaagctttcttcataatagacagagggggctcaggcaaggcggcctaagtagataatgaggatttaggatagccgtcttacactcttagcacagaggcaggcatgaagaattgcaacaattcctcttgattgtaataattcctctttattgttgggcattggggtgtttctttggtttaaaaaaatgtgctatgtagaggaggagtaaggggagattgttttaatgcttagcagaaaattgaaatactgggtctcggagagtggaaggagggctgggagaggcagctttcggatcggcggtcgctttctatgaagtcttcctttcctccctgcttccctccttcaaagcatctttctctaggcgttccggcaggcagcccaggaggccagattctccagggcgcccggggccgcgcggcacggggcccctgccggtgcctccttccccggccgccgcgtttccgcaggcgcctctggtccccggcacggcgcaggccgagatccgggcctgggcgcgccgaggggccgcggggctcgcaccgggccgtcccgcgctccacctgcccggcagcccgccggcagcttgcaacccgggagccccggctccctgcgccccctacgcccccaacgccgcgccggcgcctcggcccgcggccgggggttatgaatgggcgcagcggaagcaccgccccccccggacgtgacgctcggccaatggcagcgcgggctgcgtggatggatgaggtcagcgctgtcgtgtcgggaatggaatgtgtaagtgtaacattcagaaccgggtaacattcggcgaccgaacgcggcggtcggcagcgttcgcgcgggggcctgcgaagcgctgctcggggccggcactgcccgcggggaggacgcgccgccgccgccacccagcgccgccgccgccgccgcctccagccgggccgccgcgcgtcccgggggccggccccgcgagcgcaggagtaaacaccgccggagtcttggagccgct

SEQ ID NO: 41000 - DNA, 2300 bp, Homo sapien
tatttcatatggtagaaactaacatctccttcacattttatttatactaaaaataaaactcgtctagaatgcacatcactgggaaaaatattaaagatgagctaagatgaagttttaaaattaaccacagatttcaatgacttttatatttttatatcacccagatatttaaaagcttggaaccagaccaatggttttcaccctcaatgaagactggaatcacctgtgggtttttaaaacctgagtgcctctacccaaacccccataagctctgattctgtgagactaagataaaagcttaggaatatatatttgtagaaggctgatgcacagccaaggttgagaaccattgatactacctgtcctatggctttctttcacattcattcaatctcagaaaatacttaacactttggtgattttatatacataaagtagtgaagcacctggatttcagttctttccagagtttagaatgcttggctgtgtattaggtcggaaaattctttttcccatggaaattatgtctcactgaatgggtctctctctactgtacctaaaagagaggcttaggtttgacttgtacacagctccatggactcagaattaaagtatcaacaagagcatttaatggttacacgcaggtattttttaaagtacctatacacatattattattatatattacccagtaggggaactaagcatgtaattagtgaccagaacaacaggtgtgcatgtatacactgagaaacgaaattgttttgaaaaacatttttttttttttgctgatgaccaagacacacaaaaatgtctaagtagtcatcatgggaagaatccgatttttgtacttcctcattttacagagattaacattatatatgagtgactgggtggatgtggtaccaaatacatttgtaaactgaaggcctttaaaagtcaatccagtcttgagccagatttattcccgaggctattcccttaccccttccagccacaactgtatccgtattttcacacgcaggaaaaaatgtttagaaacttaatttttacgagctgtcgaattgtattgctatccacgtgattcccattatcatgtctgcttatagcatccccagcacctacagctaggacataggttcagaagttgaaggaacctgattctcaggcactgttaattattaggccctatcacaggctgtcaacaggctccaagtctaggcaaattgaaagcctcctatcctggaagccagacaggctttcatctgacctcctccggtgcaatcctggctcccagactttgttcctaacaaccccttggggacgttgcctattggggtttaagccactcctcctcccctacacccccatgccaagtatttagccacctgaaccaccctgtaggataagacaactgtatcaaccgtcggaattcccccacaaaacccatacatctcagggtgcgaaggaacaagtttcaacctcaccctgggcagcgttctctggcccaggtggagaaccacacaggaggacagtggtcctgctctccctactaaatggtggttcaggaggccagggggcggggcggtaccggcggcagaggcccacggacgagctcgcaggagctcatcacacagctgaccgtcacctgcccacctcaccacacctgctaggtgccaaaccccttgtaatggacagggaagggctcaatcacgggtccctactcttagcagcgaacctatctcagcgcacggcctcctgggagatgtagtccagaccgcttcccgggaaccccccccccctccccccccgccccgccacaaccaggcatccctggtcccctcacaacttccccaggagagattgctcggcctggccagctgaagctggagttgctctccaagtgtcggggccaggcggcactccgcggaggagtcggggtgctctccccagtccgagcgaagggagggaactacacttcccaggacgccctgcgcgcgccgagccgggagccggctgcctcgctttgcgtgaccgcggcaggttggtcctggagcagataagcgcagaatatttaggcgaaagcgagaggaaggggggagcgcggggcaggaggagtacctcggccaagaaaattatgcatgcgttagggaagctctgagagaatggctgtggaaggtaagggacgcttggggcatttttaagctccctcttaacccgcgcaccccaaggcacacatccccgatgaagcttggcgatcgtggggaggcgaggaaagggggtggcggagagcgggcccc

SEQ ID NO: 41001 - DNA, 2300 bp, Homo sapien
ccaaattaccaccatcgctcctttgcagggagagccagaatttgagctaaaagcttcagcgaataccatagaaaaataagtagttcctgccctcaggagcttacaatctagatttgccttgtgctcatacaaacgtccccatgagaacctcagatgataatgacacttaatgagcactatgtgccggacactatttttagtgttttacatcttttatctaattcaatctttataataaccgttatgatactttgaggtagatgtgattattatcctcattataggaataacaaaaaatggaaacaaaaataggttaggcaactagtctgaggtcacagagctaggaaaaattggagttggggctcaaatctaggttacaaaggccagtatcttaggtattcccctagaataatcataactataggaaatatttcctatgggccaggcattgtgctgagttattttacatgcattactttatttaatgctcataattagtgattaccatcatttatataattgttttttaaacgctcccatttgctttctcttacgtttctgcaatatcagtgtgtttttatcttatagatgaggctcagggagacgtaaacctttcccagggttaacactgaaggactcagttattgattagttttctccaaggtctgacacccacatattggcatcattttatgttctgagaaaaacaccttcaaataatatcctagacaaacattactctaacaaaaacaataatactgctatttatattgtgtttcactactaacacttggattgacttgagtcccatggcaagtctaagtgttgatatctcaggttgcagatgtcaaaactacgattcaaaatacaaggagtgatttggagtcatacaattttgtccacactcactgagctacatttattcactagttcacttaagaaaccagcatgctgttacattctggcccttgagggacaaagctgaatgacaccccgtcttctgtaatttgcaggatggaacagtctgtggatccactttgaactcgtggtggaaggatgtcccttggaaggggcagatgctctgatcctggtaagccatccttgctccccaggggtcccctctcctgattcttcaccttccttcccttgaatctggtgaaaggcagtatttgcccttctctggagacatataacttgaacacttggccctgatggggaagcagctctgcagggactttttcagccatctgtaaacaatttcagtggcaacccgcgaactgtaatccatgaatgggaccacactttacaagtcatcaagtctaacttctagaccagggaattaatgggggagacagcgaaccctagagcaaagtgccaaacttctgtcgatagcttgaggctagtggaaagacctcgaggaggctactccagaagttcagcgcgtaggaagctccgataccaatagccctttgatgatggtggggttggtgaagggaacagtgctccgcaaggttatccctgccccaggcagtccaattttcactctgcagattctctctggctctaactaccccagataacaaggagtgaatgcagaatagcacgggctttagggccaatcagacattagttagaaaaattcctactacatggtttatgtaaacttgaagatgaatgattgcgaactccccgaaaagggctcagacaatgccatgcataaagaggggccctgtaatttgaggtttcagaacccgaagtgaaggggtcaggcagccgggtacggcggaaactcacagctttcgcccagcgagaggacaaaggtctgggacacactccaactgcgtccggatcttggctggatcggactctcagggtggaggagacacaagcacagcagctgcccagcgtgtgcccagccctcccaccgctggtcccggctgccaggaggctggccgctggcgggaaggggccgggaaacctcagagccccgcggagacagcagccgccttgttcctcagcccggtggcttttttttcccctgctctcccaggggccagacaccaccgccccacccctcacgccccacctccctgggggatcctttccgccccagccctgaaagcgttaaccctggagctttctgcacaccccccgaccgctcccgcccaagcttcctaaaaaagaaaggtgcaaagtttggtccaggatagaaaaatgactgatcaaaggcaggcgatacttcctgttgccgggacgctatatataacgtgatgagcgcacgggctgcggagacgcaccgg

SEQ ID NO: 41002 - DNA, 2300 bp, Homo sapien
caatacctcaaagcaaatttctgctgtttaagccaggggtccccagtccccaggccacgaactggtatcggtttgtggcctgttaggagcacggctgtacagcaggaggtgtgcggtgggtgagcctgcgaagtttcatctctatttacagctgcccccacatcagtcacattactgccttagttcccacctcctgtcagatcagcagcggcattagattctcataggagcacaaaccctattgtgaattgtgcatgtggggatttaggttgcctgatatttaggagaatctaatgcctgatgatctgccactgtctcccatcatccccagatgggagcatctagttgtagtaaaacaagctcaggtctcccactgattctacattatagtgagttgtataattatttcattatataatacaatgtaaataataaaaataaagtgtacaataaatgtaatgtgcttgaggccaggcatggtggctcacacctgcgatcccagcacttatggaggccaaggtggatggatcatttgagatcaagagttggagaccagcctggccaacctggtgaaaccccaaccatactaaaaatacaaaaaattagccaggtgcagtggtgtacacctgtaatctcagctactcaggaggctgaggcacgagaatcgcttgaacctgggaggcagaggttgcagtgagcccagatcatgcgactgtactccagcctgggcaacagcgagactccatctcaaaaaaaaaaaagaaaaaagaaaagaaaaagaaaaagtaatgtgcctgcctgaatcatcctgaaagtatttccccatcttccccatagaaaaattgtcttccaccaaactggtccctggtgccaaaagggttggcactggttttagccacccggccgctggtgtaagccactcagtttgtggtgctttgttatggcagccctaggaaactaatgcacctgtatttcttggattgatggttacttgtaacgacatctcttagggatattttttcagcagtcagtctgtatcaggatctgtaaggtccttcttttccaatttcaaggaaagcaggtccaaaatccctttcacctaactcttagttgagatgctgttcaagaatggagaaggtaaggggcctctccaatatatgtgattctggttccaatcttccaatatcttactatgcccatactatttgtacaggttataggtttgtggaatagatagagatcctgatctctgtatctatatctgtatctgatctacatactctacatctaaatctgttgagctttttatgaaacataataccacaagcttttcccccttattttgtaaaagacttgctgaaaacaccattttaataaaattgtcatgtcatacactctcatatattttaccgtaatttgcccactgttaacacgttgttaggcaattgaaggcctttcgcctttctgccacatcccttcaaatgaagctttgcccacatttcagaatatttccttgagatagtgtaccagaaaggctaaaagctataaactaggccaaaggtaataaacattttaatattcctaatacttatcaccaagttgcttcacagaaaagctggttgttctttccttttgaatttaatcacaagagaataatcttggtagcaagagtaagaaggtcatggagggcattggaagcattagtgttcaacaggcacaagcaggtaataaatatcaccttatgaaaagctcaaagccatgcacggtgtttgcataacatgttgctaactgaagacctctctggttcacaacctttctgaaactcagcgtttaaatgcaatatagcctattaaattgtcagctcaagtactcagcagaaggcatctctatcttctttgttcttggggatgtttctactgacatgcacactggagttcagagataattttcaataaactgttgtcacttgaaaataaacagtctggacaatgtatggtccatttggagcactgagaaaataaacaacctagggtatgcttccttcctgtctctgtagccctttttggaatgtgtgttccaaatacttccccttcttccccaaagcaggaggttttatttaaaataaagctgtttatttggcatttctgggagacccttttctgaggaaccacagcaatgaatggctttgcatccttgcttcgaagaaaccaatttatcctcctggtactatttcttttgcaaattcagagtctgggtctggatattgatagccgtcctaccgctgaagtctgtgccacaca

SEQ ID NO: 41003 - DNA, 2300 bp, Homo sapien
aaattaaacaagacaatgattttaaaggtccttgaaaattgtaaagcatcatccacatttattggttaaaatcattttttaacatgttttgtttaaaacttgtctctcttttgctttgtgtccatttatttttcttttaaattttttatgaatacataatagctgtacatattttatcgctgttattttcaagggagaccactagaggtcagaatttcacataaattgtttaaagaaaccaccaagatgggggaagagggagaaaaaaagagagagaaagggagagagggagagagagagagaaggggtggggggagagagagagagagagggagagggagagagagatggagggagggagggaaggaggggggagagagagagagggagggaaggagggggaaggagagagagagagagagagagagagagagagcgagggagaacatttcattttcctgttaggtaacataaatgataagtttaaggcatagaaagaaaaataatgatggcttgcaacagagtcattttgataacttattctcaaaattgttacttaacagacttagatagggagagaaggaaaagataaaatagaatttgttaaaatttctattgatgatgtctgtacagcttaaagttcacattggttatcataattcttaaaagaggtctgtgatgaaggctcattttgcaaatgaagacactgaagtgtaacagatgtaacaacatgctgaagataatcagattgactccagtgcctttctttccactaaaccatgtctgggaaataagactttaaaaataatatctgtatattggtcaatatattctatgactggttagcattactgggttttcacaaatgccattctgcaattctaaataattcatttagttttcactctcccagatgaatttagggaaaattcatttcactgtttcccagagtatctagaaacttctgagcactgtgctgcagtgctagtaaatacagtaatgagatgattagccatgaagaaaagtattaagactagcttgatcttaggggaaaaatattgaaaaaacagtaataacgcagacctttaaaacacttacttaaccatcatactattctttttaattttgtagaggtaaatatacatatctgccttattttggagtggggaggggttgtcacagtattcatgaaggaacaaggtagagtagatggcagtttacatatatatatatatatatatatatatatatatttttttttttttttttttttttttgagatggggtctcactctgttgtccaggctggagtgaagtggcatgatcatggcccatgcaggctcaactgtctggacttaagcaattctcctgcctcagacgtccaagtaactgggactacaggtgtgcaccaccacacctggctaatttttaaaaaattattttaattttttgtagagatggggtctctttatgtcacccaggctggtctcaaactcttggactcaagtgatccacctgccttggcctcccaaagtgttaggattgcaggcaacacacctggcccactgttcatatcttaagagaaggtatcatgtcttggtttctggtgtacccatatcatctagcatggtgcctagagcacaggaaaggcagtgatgaatatactcatgttgctttaggtgcatttaggtgtgtaggaaattttcaaagaaaaagcataaattggtgccggcctcaagagtttgtaatagaatacaaagcttggtatgtagatgcgagagctaggacaggttacttatcttagcttccaacccctagcatctaacatgatgcctggatcttagtaggtattcagtacattccaggatcatggatttctttattaagaacaaaatttattaaattttattaagaatttattttattaagaattttattaagaataaaattttattaaaaataaaatttggagtccatgtgatacagtttccaggctctggatgaagaagaggaaatcacacccaagaacataacagacttagttctagaacccacggttctagaacaccgcttcccaagtccctctccccaggatcactcacttcattttgtcacactctggcttgtaattatctcataatgtctgcagatgctcaggaggaaagttaatgagatttccactgtttgaagttttaacagggtttctaatgggaaaatgggaagggagaagttttctattaggtaaaaaatagtgctattctcaaatggattctcccatttgcagggacaaggaaaacttt

SEQ ID NO: 41004 - DNA, 2300 bp, Homo sapien
tatcaagaacaaacaggtgttggtagcgatcataagagaaaaaagtgttctagaaaagagttctctttcagccaggcacagtggctcacacctgtaatcccagcactttgggaggctgaggtgggtggatcaccaggtcaggagttcgagaccagcctggccaacatagtgaaaccctgtctctactaaaaatactaaaattagcccggtgtggtggcaggtgcctgtattcccagctactcaggaggctgaggcaggagaattgcttgatcccaggaggcagagattgcagtgagccaagaccacactattgcacttcagcctaggagacagagtaagactctgtctcgaaaaaaaaaaaaagtgttctttttcaagcagataatatgttacaataacagagcgctcattgacaacctttttcatgccactggtcactgtggaagcaggaaggagaggcaaagcaaagatggctgaggatatgcagtacagcaaggagggtgcagtaagagacccagttgaaagtgttctcctaggtggcaatgctaaaataagctcacttgaggctcttctgaatcattagcccttctagaaactccaaggacgtattaaattcactcactaaaatattttgggcatagcgtagttgctgatcatctccatgattacttctttgaagtctttcctttgaacattttttaagtgcttactgagaattcttaggcagaaaataaaacagaaagatcatcccgtgccagagtctgaatacagacagggctcatcgatcaaacaaatccatgcagaaaacttaaaatttcctattaaataaacaccacacattaaatatcagaaagtggtgactaagaggtggggagaggagggatatacagaaggtttcacccacaccctgttttgtggtttttacccggatgccacaaccacacctatgagtttcacttattaaaataatagagaagtagagtaactagaatctgctgagcagagcatagtgctaaatacagttcctcagagactgaacctgacaggcaaggtcaggattcaacttggagaatgtctgatgagattagccaatgtttttttccaacgtggtctacctgtgtgtgctgatgcatgtagatttggtagatttgctcatctttagtagacgagaaaattaagctcatctcctctgttgaacttacaaaatgttgacgttaaaaccaacgataaaatggagataaatggggataaactagagcaggaaattcgaaccatacatagacttaaaaaaaaaatccccttaagccattaaaaggcaataagcaattagttttataccagtgaaatcaataattaaaagttctacttaaaaaaatataacccatgcaacatcgtgtgtccactgagcagtgataggcgcctgtgtaaggaaaagagctctcatcatatcagctagcatttaaggagcttactgtgcgctcaactcttttcatgttatatgatctaatgtgagcatctatgccggtggatttcacatccccgtttcacggacgaggacacctccggtgacctgcagggaccccgcgccagtggctgctgcagctgactcatccgactcccacgcgcgacgctgccctagtggcgtttaaaaaaatcccactcgagtcccatttaaaacataagcaccccactttttaagtgtgactggtgacctcgattttaccttctgagtcacagcaccaagacctgtgtatctgtcaaactgagcacagtgggcgagggcgcgctgtgagagctggggagaagacaggtggagagcacaggtgcaaactaaggggagggctagaaggtaaaaatagcgatcaggggtatgggggtgcgcatggagacgcccgcggagcgctggcgctggccagcggagcaggaggtgaggtcggcggagctgggaggaccgcgcctggcggctgcaatagccgcacctgtgcacgtgatcgcgagcggctcgggcgccagggcggagcggcgctcacctgggcccacgtgacggggcggggctcgaggagccccacggccacgcctcctcccgcgcggcgcgcccggagcccgcggagctgagcggcggcggcggcggcggcaggagcccgggaggcggaggcgggaggcggcggcggcgcgcggagacgcagcagcggcagcggcagcatgtcggccggcggagcgtcagtcccgccgcccccgaaccccgccgtgtccttcccgccgccccggggtcaccctgcccgccggccccgacatcctgc

SEQ ID NO: 41005 - DNA, 2300 bp, Homo sapien
ccactcccaccccactctttccaagaagagctagcccaatctccatgttgccaatttctccttgttctatctgagtctattcatgcttggaacacttggccgatgctctttgcctccccattagcagtgcttctagttgctccatttcaaagtacattaaaatgctgtctaccaagagccaccaccagagaatcctactgagtgggtcaagagtggggctcaggaatctgtatttttaacaaaatacatgctggttgattcgatctgcagccagatggaggcatcattaggccaaatggcttacaaaacctatcagtttttttgttttttgttttatctttttcttaaacttttatttcaagttcaggggtaaatgtgcaggtttgtttacacaggtaaatgtgtgtcatggacatttgttgtgcagattatttcatcgcccaggtattaagcctggtacccattagttatttttcccgatcttctccctgctcccaccctccaccctccaaagcctatcaatttgaagagtaggtaaatgtcctactcaagagtgcaaatgaactgtttcatctctagttaagtttgagtactactcagtctcatttacctcaaagaaagcagaactattagaggcttggaagtgtgtcatagtggtttcaggctgccgagagaattatctagaaggggcttgaggtgacctcatcatctgcgggtgttgcagaggcagacctggccccttccgcaagctgcctttgatttccttcatgctggggacagatgaggtagaggccatttgtttctttttaaactctagaattacatcacaggcctgtataattttccttaaaaagtgttttttgtttttttccaaagcaactatcctcaaaagagctgggcatagttctcctaggggcagcaccagtgttgaagtgtggggggaaactgttctaaatccttcaaacaatgtcacctttggagcagtaaaactgctccctttttcccatgagagatgacaagcatgccccagcaatcatttcttgaaagcggatgcccggtgagagaaggatttgatttgctgaagggtcagccaagttaagccagtttcttcctcatttcttccctggctggaggttttgatggtggtgatggtggttgaactgaacccacttagaaaactgtcaaaggtttctggactctcaggtgtgccgtctcacatttggtctgctacagcaggtgcttcaaggctttcttctgccaagatttctttgttttattttatgatgttttctttatgtgtgtgtgtgtgtgtgtgtgtgtgtgtgtgtgtgtgtgttttacttttatttctaacaaacctgtggaccttggggtttaagactgagtgaagctagaaggattagagtcaaaagaattttgccatttggccaatagcattccccacctcctgacatatcgattttttttctagattcccttccccctgccactcccctccccccaacacacacacacttttctctttctcctctttctctcctttcctcccttgcttctctcccctccctctcaacacattcaatgagtgccctaaacggtgacaaacttgcatgtgcttccctcatgactaaacccctgggccttctgccaatcccctgcagatggccccaaactgcaggcatcccgtaaggggaccccacgcttgcagccctggttggaacggtcagggtggaggaggatggtggggagtggtggtgtcttcgtcctgggagaaggcgaagcaacttccaggaggaaacgggcgtttccttcccacgcgctcgagcgagccctgggtcctggcctcggaactccacccagcccctccccaccctctgggaaaagccagtcgccacacacaggcacacgcaggccccggcgccgcgccctaaggagagcagcacccacagccaattgccatggcaaccccggggttcgttccacttccccacccagccgatctcccccctcctccctgcactgcagccaaccggcttgtgcgcgtcccaggagcgcgctataaaacctgtgctgggcgtgatcggcaagcaccggaccagggggaaggcgagcagtgccaatctacagcgaagaaagtctcgtttggtaaaagcgagaggggaaagcctgagcatgcagagtgtgcagagcacgagcttttgtctccgaaagcagtgcctttgcctgaccttcctgcttctccatctcctgggacaggtaagtggcacacccttaagatgcccccaagttactttgcccgc

SEQ ID NO: 41006 - DNA, 2300 bp, Homo sapien
gttcttttcccatcttggctgctagctgtcccctgtcctgcctctgagctcaagcaagttactgaatacgcacttggcaaccattcacttgctatgaaatcagcctgttcattgctcagtggcacttcaggggacagggccaaagcctcctcatgtccccacacttctgtggagtcattagagggcagacttctagttagttattgattataagtctcatttcaaaacatggaattaaatagtcccagagaagtgcaggaaaaagtgatactgacattgatcacccttgggttgtaactatcgcagatacaggcaatagttaatcaaagtcttgttccttcactctttctttctgggaatctctctctctctattcatggtcaggcaatgaacttgggtatttcagaaagctgtggcaagatgtagttagtccagaatggttcaggaggtaaggagggggtgcctgccatctacatttggttttgtccagttctgatttgtgttcacagttttcagacccatagaaggtgaagggttttaaatcttaccatatctcatcaaaaaaatataagaagcacctgcctccttttcttaattttcattagatctcctgggattgaagccagctcctaataatgggacccatggaagtttgaatcatctcctgcgcactaataccttcaggccaaccatgccagaggaagttaccagacccaattatccagggattatgtaccttcagtctgattttgacctgggctgcacttgtgatgataaggtagagccaaaggtagaaataatctttatgtttattatggagaagtttgttgggtggctaacagtgctggcccatagaactttctgtgacaatggacatggtctataattatgctgtccaaaatggtagctactggctagtgtgactgaggaactcaaatttttatttcattactttataattaaagagccctatgtggcttgtggctaccatattgaatagcacaggtatagaccatgaaagacaaaaagtagaattcatgttgctattctgtgcagtcacagttctcaaccaaaatctttttctgttttcttcaactgtggatcacatgtctattagtcatggtcccgacgggagacaggtggcccatatagaagaggttttgaaagagagtttaggccaggtatggtggctcacgcctataatcccagcactttgggaggctgagatgggtggatgaattgaggtcaggagttccagaccagcttggtcaacatggtgaaaccctgtctctactaaaaacacaaaaaaattagccgggcatggtggcgctgggaggctgaggtgggagaatcgcttgaggcagaggttgcagtgagccgggattgtgtcaccacactccagcctggaagacggagtgagactctgactcaaaaaaaaaaaaaaggaaatgaaaaaaagagagagtttaaaggaattgtttcagtcatgtttaatgagtaatttaccaaggctgagcagggtggatggaattcaatgaggagtgacgaagtgccctggggttcgcatagtaccttctaaggtttaaagggtgaggggaaggagtaagtttccaaaacatggagagacaaccgaataggaaggaactattgtatttggccgatgagtgcagcttgttcattgcaacccagcagggagcactcccagataggagagtgctaccgtcatcttcctcccctgtacttcctttcacatgtttccccttggtagagcccaacagggagccacagggcaagtttgctctttgatgccatccctagaggtcagcctcccaggccacagagcagggtgtgggagggtgcaacaaggatgcggtggtggtgcaaacagagactacccccacacactatgcttggacaggttttcttttttttttttttttttgagatggagtctcgctctgttgcccaggctggagtgcagtagtgtgatctcggcttactgcaacctctgcctcctgagttcaagttattctcctgcctcagcctcctgagtagctgggattacaggctcctgccaccatgcctggataatttttgtagttttagtagagacggggtttcactatgttggccaggctggtcttcaactcctgactcagctgatccacccgccttggcctcccaatatgttgagattacaggcgtgagccactgtgcctggccttatatatttattaaataacgtatgaagtaatcttttgtatagtttcctaaaataacctatactatagttttgcatg

SEQ ID NO: 41007 - DNA, 2300 bp, Homo sapien
acagagatcttggagcagagcatgattttctcagaagcaaataccactttgttccacacccgttagtcccttccgattattctgcacatgtctttctgaaactttcaactgtggcttcctccttgggataggacttgaaatactgactcccgtcatgaagaaaaaaacaaaagtttacacctgatttcccaatgaaataacaggaggaaaggtcttgattcatctgagaagatgctagtggaagataatattatgtgtccgagtaaaaatgatattcacatcctttctgttcttatcttaatcatcttgggtatatttatgtgattgttagctaagctataaaattcatctaaatatactccctgtatctttctattctttgtctgatcagatgtttcttaaaaatctttccattgcacagctaaagatgaaagggggatggagagcctctagtatgtgaggacattcatgctgttagaaacttccatttgaagtaagaaaatgagatatgggtaatgttttttaggctttggaaatggtcttcagaaaagaattgagttttcatattttgttaaagaagaaaccttctagaacaaactcatggttcacttctttttaagttaggactcttatagattcttgtttcactcaaaatcagctttaaaagaactaaagtgagaagcaataacttgtttcttagaataggttcttctgttaagaatctattgctttcagatgccaacagttaaattacttagaacaagatggatctcattgtattaatgatattctaatttattatccagtgcaacgttgtgattttaacctcagaacagctttgaattcacttagcgtctatcttcttgccatagttcaaaatctaatgtgatttcacttagggactttctgtttactctcaaaactcttggatttaaaggatgctgtcacatattagaaagtcgattttctctcttaaagaattttcattaacaatatttttgacatttttatatcaaagaatctttaaagggattggatgaggagaggttttaattctgtcaaaagaatacaaatataacgtgcttagaccagatttcattaagaatggcaggcaaatctccccagacaaagctctgcctctgggccggaagttttctttccaaaatgttctaggggtagaagatctatgagagactgaaagggaaagaaagaaaaccctgtggggactaacttgcttctttttcctagatgacaaatcctctgagggaaatcgacaaaattgtggggcaattaatggatggactgaaacaactaaaactgcatcggtgtgtcaacgtcatctttgtcggagaccatggtaaagctttgttttttctttgctaataggatagatggataatgtttctgatcatattgaggaaaagaatccttgcccttagaagccaagactccattcttaacctcatccccgctttctttaagatggggatagaaatcaggccatgattgaaaagtatgagatgacctgagagatccctgggttcattttgatcaaaagctgggacttcttatatatttctgttatttgcaggaaagacctttctacaaaaatctgtctctctttaaagcaacacagacagtttccttgtgacattaatagcttcttctgtgaatgtgacatatcaggtgataatctcctatccctgccagccacatccccaaaacgagcccatggagtttatatggttaaaaaatacatctaaatatgataaagaagcagagatatgggattcttgtcaaagaagtggcgtgtaagtcaaatcatttccccgaatccactgagggaagtcaaggtccaaaccggaaggccctgctgtaattcagatgactgttaaagagaggaagaagcattataggaagtagtttttctaaatcccactttatgaagtagaaaaatttatgatcaattctttgaggagatcaagagcatcataaacattatatgactgtagagctgtgcagggggtgggggctcagagacatgcagactgagttctaaagggtatctcctgtattccggaactattagattgaaacagtagcattggaatttggggcttctcccttctagtggagttcggaggatgaaaattggctgactctttggcagttctgttaagaatggtaggcaaatctccctagctctggtcctgaaggtctttccagaatgtcctagaagatctatgagaaattagaaaaaaaaaaaaaaaaaaaaaaaaaaaagccaaagggattagctt

SEQ ID NO: 41008 - DNA, 2300 bp, Homo sapien
ccctgtctgtattaaaaatacaaaaattagccaggcgtgttggcatgcacctgtaatcccagctactcgggaggctgagacaggaatcacttgaacccgggaggtggaggctgcagtgagccgagatcgagccattgcactccagcctgggcaacaagagtgaaactccatctcaaaataaacaaataaacaaacaaaaacaaaaaaacaaagaaatagtggctgaggtcaactcttttggatattgggtaacaagcagatcaacttggctattacagcttttccccctgcccagctagtctgcatataagagaaaaataaatggatgatgttcagctcctgaaccctaactttttttccaagggaaccctcattgtcttctagctaggtttatacaatcaaatatcagacaaagtcaaaagttgttagactctggcaaggcaaaagaagaggctgtttttgtttttagaacatttagagcactgtggcatataatgaaataacaggattgccttgatatttttctttggggtttattgttttcctctatcatgtctggcttgtatcttgaaatttaacataaattataggaaaatctttcatggagttaacatcttttataagccttgctaaataccctactccaaatttgttcagtatggcatacagacaaaagcaagaggcttacatataaaaatgtataagcctgtcctctttgcaacagtgcaaaactaaaaggattttagaaaggcaattaacagtttggcagtatgtgtattttctttttttcaattagatattactagattctaagaatctgtaatgaaacccaggcctactgtacaaccccctataaacaagtttttgcttttgtgctatcatgttttatttgagcagagccactactctgttactaatttgttgcatggtaagtctcgtatttgtttacgcacgaacacatgtgctgcggaagaaaagatggtcactggacctgctgaggaagaggccaaaaacaaatctttttccctcatttgaatcctgaaggcatgtaatatttaaacaactttcagatttagagcccttgattttttcttttgaaagtgtgctggttgccaaattgcttagtaaagaaactttagtacccacaatagcctcaaaggacacagtatttggtggctacatttaaccaagaaataactagggaaacaattcttgacatttcaattcttgctgccattgagatttccttcctaaattcaattgctaataaagcttcccatgccatccccttcccccacccatctgcctctcaaaaaccgccccctcctccgccccgcccgaaacaagctgacagtctttacgggaagaagaggcagagactgaagttattttgtccgtcctcccagggcagaaggactttatgctgcgtggctggcatttccagtattttgataaaagttacttctctaaacttgaaccacagcatggggaaaataatgttatcttttatgttagttacaattttgcgaaatttcatcatgagaaactttcaaggaggcagaagtagctgagaatgtgatactagggacagggtcgctcaaactgccagcaaaataaatagatgggaaagacaggaacgttattaggtttataaatgataaaactttccttgcttaaaaaaataaagtggtgaggttgacgccattgaatgactgcattgtaaaccttaaaagcttaaagctggtggaaagcccttgcacagccctgttttcatttttatcggatgaaatgcatttggtttctttttgacaaaccatgtttttgtgaggaaaggaaaatgaacatgcactgttatgggccacggcaatgtaacaaaccctcctgttgccagaggataccacatgaaagtgtctgtgggttaggggagggacctgtaagggggcggggataagggggatgatagcttaagcctcttaggctcagagctgcgatttgtgaacaccctgtgatgtaatcaagctctggacaaatcagaggagtctgtcaacctcccaggtgggattgcttatagttaatagactaaacccagagcctcaaagcagtgcactccgtgaaggcaaagagaacacgctgcaaaaggctttccaagaatcctcgacatggcaaggaggagctcgttccagtcgtgtcaggtgggagaacggaggaatgacgggggacatgcttgatcttcagaatcagtgactgattggcattttcctttttgttgtgcaaattaagatagcaccttattatgcatt

SEQ ID NO: 41009 - DNA, 2300 bp, Homo sapien
actcattattcattatttaatttgttataattaacaacaaatatattttcttttattttcagtggacagaagttatgaagaactgcaatggctacttaatatgattcagaatgaccctgtaccctatgtaaggttagtttatgtgctatgatgctatgatattttgtaagtcctatagtgaactgagtaatttcagattacacataaaatgcttgtttatgatttttgaaaatatgggaatatcttttgcatttattcatgtcctttttaaatttgattttcaacataaaagttatttgttttttttttgagatggagtctcactctgtggcccaggctggagtgcagtggcacgatctcggctcactgcaacctccgcctcctgggttcaagcgattctcttgcttcagcctctctggtggctgggattacaggcatgcgccaccacacctggctaatttttgcatttttagtagagacggagttttgccatgttggccaggctggtctcgaactcctggcctcaagttatccacccccttgggcccttgggcctcccaaagtgctaggattataggtgtgagccaccgcactcagctaaaaaaaaaaaaaaaaaaattattagcagaccttacttggcatttagagtaatttaggtgacttggaaagcagccagacagaaacttcacttttcttcatcaaacaaattaaaagtataacaacttaaaatgcactaaagaacaaactcacattttaaaatatgttatttacctataatactgatcggctcttagaaatagagtatgaggcctgaaggagaggaattgtgtttatatataaagatgaaaatatggatatgaaatatccataaagatttatatccccatttatattacatatctgtaaattgcattctataattacatttcacttttattcttataatccttccgtagtcttattttacacagtcttaaatttcaaagcacaagaggatgttagaatctacatcttttaggtttatagacattaaattgcagccaaaaggggttaaattacttacactacaacctagcagtttcacttttctcccatctctttctcaattacaaatccaatttaatgtcttactactgtcagttaaatgtaaaaatttccccagttcaccttctttaaagttttgctgacctccataagaattacaacccaatttctttcttcctcacttatatccaagcattgcagttactcttagtaatttctcaaacttggtgctagagctggttaaatgctagactactgcagtaggtttcttcttacttctcctttcttttttctagcctcttaatggtgtcttctactcatagcagtggatgttttcttttccaaattttgttttcattgcgttgccctgtattttagagaactccataatatgttcaggtagcctctgatatgagataaaaactcccaataggggagtttaaatgttaccctcttttaggatactcttctcaacctcagcttgttttaaggaaaactttttacaaactttatatttaaaatacttctgcacatttccatgttttacaaatacagtaatgacatatatgttcattttattatctcaaatacagacttcttggtctatatgtagatttttttgctccatgttaagatttttatacttactgaccagtcattgtagatatatctaagcagagtggaatgttcattttagaaagtgggatgggagagattggttaggattatgtggagtcaggttttagaagatctcatcacacagtaaggtgattttagaaagaccaaatccaccagaatttttttttaattactctcttacccaaaccccagagtgttttagtgaaaaaacacgtaataaatattcaggatataacatcatgtctttggaaattaaactaaataaacacagagctagatttaagagagaaagtgttaaaataggaaggaggaactacagataatttttcagtgtttatgttgtctcctactcatagcatctgtcagtaaaaggtcagcaaaaatttaattttttttaatctttcaggcataagattctcaacatgttgactaagaacccaccatttactaagaacatggagtctcccttatgcaatgaagccctggtagatcaactttggaaacttatgaattctggtgagagagcagggatttaaattgtttttattattactagagtattttgattttacaacagattttcaattcaatagcatttagaactaaaggtaaaagtt

SEQ ID NO: 41010 - DNA, 2300 bp, Homo sapien
tatcccatttcaaggctgatcctttttctgtttaagagttttctttattgatatatccccttttctatacaaaattgcagctatcagttcttggaatatatgttttaggttgacattttattatatattcatgcttcttgttaacatttgatcaggaaaataatttgatgtttacttcattcccaccagctttaaaataaagagactttgttctatttaaattttattacatttgatagccatttttcctaaggatagctttcaatgttgtgtgaaatactttatttgaattttagctgctgttaatgtccattcagaattagaaatctcacaattttccaacctactttttcttaaatgtaggaataaaaagaaaaaaatcccactgatgaatggagaagaagttgatatggatctttctgcaatggagtaagttagttaacttaaatataaggttataatactttctgcattctcatctgtctactttgttatgcgtacgtaaaagtgtataactgtcctccaaatgagtgctttaacattattttaatttaatagaaaccctatgttaaaacagtttatgtaaaatcataactaatcagagataaaaagtaagtctgccagggcctaggtgaaattaagaggaaatgcattatggttgaggggtgagcacaactttgactaggcagcttccttattctctctttgtggcctctagagcagtgctcagactataatgtgcatgtgaatcagttggggaccttcccaaaatgcagtttctgatccagtactacactagtgaggcctgatagtttgcatttctcatgagctcccaggtgatattgattctttgtccttagaacaaaggtcttgggtgccttaagtctccctatgcttgcaaaacaatttaaaaaccactgttctaaactttatgtggtaatatttattgattgacagtgttttatttttaaatatgatacagctcaaactttctaattttgcccattctgtacctgtatattttttataaaacctctgtaattatttactaacttgattgccagattatcactgctgtttatatacagattatgtttgtttgcccttcaaaatcagtgttaatttttttttgagacagagtcttgcttggttgcccaggctggagtgcagtggcaccatctcggctcactgcatgcctggctgcatgccaccatgcctggctaatttttgtattgttagtagagatggggtttcgccttgttggccaggctggtcttgaacccctgacctcaagtgatccacccgcctcaacctccgaaagtgctggggttacagacatgagccattgcacctggctgagatcagtgctaattttgatttttccatagcaagtaccctgcctgtagtaagtacacaataatatttgctgaatttgaattaatattacaggtggtgttcttttgatgaaggtgtcgacatagactagattttttaaactgtgtttgttactttgagaaatacatgaaaataaatttgtgatatacctccaaattatgatttcagaacttgctgtttgaaaaaggcgatcgtgagtctagtatttttaaaaagtcttaagtcagctaaacaaattaagaaattcatctcattctttttttgcctcatataatcacaaatcaaaatcaccaaaataatttcagatgggaaatgagagattcagtgtcctttgtaaaagacaattaatattttcttatttttgagtatctttttagcaagattgatatagatcagacattgtgagaaagttgacatatgttaaacataatgagaaatttgtcagtgcagtttaaaaaaatgaatacagtaaaactccaggcagtcttgaatactacatctaaaaggaaacctggtaaataaatgctttgtatttattttctaaatatatagatgataagtttaaaaattaaattaaaaagaaaattgtattttcttgcagtgctgattcccctttgctgtggataaggatagacccagatatgtcagtattgaggaaggtagaatttgagcaagctgattttatgtggcagtatcagctccgctatgagagagatgttgttgcacagcaggaatccattttggctttggaaaaattccctactccagcatctcggcttgcactcactgatatattagaacaagagcagtgtttctacagagtaagaatgtcagcttgcttctgtcttgcaaaggtgagattatatacagcataaaggaaatgactattgtatatattttttgta

SEQ ID NO: 41011 - DNA, 2300 bp, Homo sapien
aatggtgttaaagtttataattcgagaagacccatttcttaaaagaacaacggtcttttcttcaggactcaagttgctttataaagttgctggatagaagaaaaataacttgtacttttatttctgacttttagaaacctagtcttctaaggcatttttctcctcatcttaagcattttgaaactactgttatttcttaaatgttataggatgtagctttaaaattatatttgtactatgtacacagtgtaaacaaggacaaaagaattctttcctatattatgtctgaggtctctatgatttatttaaagtttggctttttatatttaaaatgtcatttctttacttaggatttgatgttctaatcattaatacacttaagttttccagagaactaaatagtaatagtttcatagaagagaactatttattcacttaaatatcatttctcaagtgagtgagttcccctctacttttagccttccacccaaactggaagcctctaggtgctatcaattatttatatccatcgtttacatccatgaaattggctgaataattactcctctgcctggcgtagacatgcgctttgggaaaaaaacgagtttataatcctataatgaagaatactggcacaggcaatgctcactcgaaaacttcaagtaatttctagttggttttggaatgcttgataaagttcctttacagctttattttcctgatttgttttggtttagatcaaagttcaaattaattttaacttagctaatgaactcatcaccaggacagttggagggggtaggccgaggttaaatggtccacgtttcaaaaatgttaatggctaatccataattaaagaaggtttaactgttactgaagtttacaagttttattgtcatgaacatgaaatacaaacacgatggcttcgaaatgtctttcaataaatgtttctgcatttatatggattatatgatatatatacacagtctatatatctctatgtagtctatttatttattttgagagggagtctcgctttgtctcccagactggagtgcaatggcatgatctcagctcactgcaaactcggcttcccgagttcaggtgattctggtgcctcaccctcccgagtggctgggaatacaggcgcacgccacgacgcagggctaatttttgtatttttactagagacgggctttcaccatgttggccaggctggtcttgaactgctgacctcaagtgatatgactgcctcagtttccctaagtgctaggattacaggcgtgagccaccacgcctggcctgtagtctatattttattctttttttttttttctgagacagtctcagctctgtcgcccaggctggagtgcagtggaacgatctcagctcgctgcaacttccgtctcccaggttcaagcaattctcctgccccagcctcccaagtagctgggattacaggcgtgcaccaccacgcccagctaattttgtgtaatttttagtagagacggggtttcaccatgttggtcaggctggtctcgaactcctgacctcaaatgatcggcccgcctcggcctcccaaagtgttgggattacaggagtgagccactgcgcccggccttgtaatctatattttaaaataaatactaaggcagcagtgcctagtgagagctgtggagtgctgcagttttgacatttagactacctgcagtctaatcacatattttacagcttaaatcaccggacccagtgtgtctgttcacacagcaagccagaggcacgcacctcctgatttcgggagacttcccaccaccccaccccgcccagttactagcaccctgccccagcctatttatacctggctcttcgcaaactttgtcctccattcttctcaatatgcttgtactagaaaactaccttccctccttttcttcctgctgttctcgcttcatccattaaatagttttttccctatcctaaattttaacaattctttacgataagacacatgcgaagatcgcaagccctgcccattgacaagacttcctggttctacccccgccgccgttccacttccgctgacgtcggaggtcagaggttacagacaagatgtcggcggatggtagcttcgagcccttgcggagaggagcatctctgtgacagaagcttgtcgacggcggcttctaggagctagtcgaaggagcgaggttgaggcgggcagcgacccgtcaggtcgctcacctgggcaccggccagctgcgagacgtgacttggggaccgcaggggagtggagagtgtga

SEQ ID NO: 41012 - DNA, 2300 bp, Homo sapien
accatgcccggctaatttttttgtacttttagtagagacggggtttcgccatgttggccaggctggtctcgaactcctgacctcaggtgatctgcccaccttggcctcccaaagtgtcggcattacaggcgtgagccactgcacctggccgtcactgtgctctttattgaataaaaaagaagagaagagaggaaaagaaaaggaaaaaagttcatacatgattctataatatgaactaagatttagtaaataaaattctcatttcatgccatgaaacacaatatatgagcaatataatcaagagtacagtgtccaagagaacagaatcaattttagctgattctgttctcatgaacagaacttttgaaatttattataactgttcatttttttacctgataaagaatatttttttcctgctaccagatgaatgattaagccagcttcaatcgttttttgaaaaggtacagaaaatttcttactttagaaaaacatattaacataattttaaagaatgaattaataaaaactatcatcattttgtcttatgagaggaacacaggtccagctccctgacagaatatcaaattaatggcaataatttcataccattaattggaaattaaattcataatgattaatacataaaaacaaaaagaactgctgccatttattaagcagccatgcattttagaatgtacatcttaagaatgtaggtcttatgtgcttttttatcgataaggaagttgtactcagagaaattaggtaaattgccttaggtcacaaagttctgaagagagttgggattcgcagccatgcctgtctgatgtaaatgtcagggttctagttgacactgcttctagttgtagggaatgtttcccatttaatagagcaactacaatggttgattcccttcaataataacttcttatcaggcaaccactgtcacattcaggatttcattccaccgaattcctatgcattcaaatgtaaaagaggctagtgaagaagtaggtcacatgaaccaatctttccaccaccaacgaaagcactgcccagactcctgggatgccctactctggtattttcgtatcattttacccaagaattgaaaaaaatgtctgctcagatcctttgaattcaacaccttacccaccactttctttcacttcaagcaaggtctgatttgcactaactagtaggaggtcaccatctcttaagtgattcctcccagactattttagctctcagggacagccagggccctcaacgattccctaagcatctctgggaaagtttacacattacgctgttacaagcaattcatgtatgtgtgcatagtgaaaaccttttctcttaaaactcttaatactgaagttccccaaacctttggaaaatgtacaagtcacagatgctcctgtgacttgtttttcccttcgggtgcgtcctcaaccttgcttaaataaacctctattgaacgagacctgcatcagtcacttttcggttaacactaggtattcaacgaatagactagtcccgccgttgtctccagatatgatggtgccctgacccaaagaagcgagatactccttcccagggcctcgctcccgagcatgggttatttgcacaaaaccccgcaggaagcttttagagccacagtcggctaggctggagtcagactctgttacctcctgactctgccatcacgagcaaggagcctgcttcctcattggcaaaagggaatgaccaaggcaccaccttacagggttgtggcaacgggctcatggaattatacatgccaagtggttatcacagggcccgccactggcggaaggtgagacaatgtggacggcgaggaaatgggagcatcggctggaaaccagggacggagatcggggatggggggcgggcaaggggacagcggaaagggtgggcgagggatccgtgtcccaacccgccgagtcgcagctctgcccctgcgagcttccgccgagaccgccccccgggaagccgcgtttccttcctgcagtcgcggtccggcgtggggcacggaggggctcgcgctcccagaagccggcaggccttcccgcgggcgggcccgcagcgcgctccgccccggaaacacgcccatggccgccttggcgcgctttcaaacgctcaggtttcctaccttccggctgcttgggaacttctttcttgcccgccaagcccgcagccacccgggcgcggcgggactcctagacccggcgctgcgatgaagaggacccgcgacgaggtggatgcgacgctgcagatcgcca

SEQ ID NO: 41013 - DNA, 2300 bp, Homo sapien
taaccttgaattcctgggctcaagtgatccttccacctcagcctctcaagtagctgagactacaggtatgcacaaccatacctgggtaattaattttgttttttttttgtagagacagggtcttgctatgttgcccaggctggcattgaactcttggcctcaagcagtcctcccaccctaacttcccaaagaactgggattacattatttcatttaagccacgcaacatccctatgaagtagaaattattattcctgttttatcgataggaaagggaggccaagagaaataactagcataaggttgcaaaattagcaaacgacagaattgagatagaaattgcatgtttgactgagaagcccgtgcaaactcttgatattctatttagtagttataagattaaaacatgagcaacagacaccttttaatctcattaactctgggacttctgttgaatgatttatgtattttatgcagaataaggctcttagaatcacagtcacctagaactatgtctgccttggtctacatgtctattgtggcctatttaaaaaattaagaaacttaaataatttcttttggcaaaagagtcacctaacatctgtctcatgcagattcagagctggtctgctcccggatgttcaagggagttgggcaactattctctttctggagtggggctgagtatggccagggtttaagggctacctaactttctaggcagattacttcatctttctatacttaagctttctcatttgtaagttgaaaataataccaaactccagggttttgtgaggataaagtgtttggcacaatgtaaagcacagaataaatgctcaacacacatgaatactgccataaacattacttcgccttcctgcagaccaactccgactctgcatgaaacagaaaatcagaacatttatttggtactaatcaaatttcttttcataatcttttacggatagacaataccattgtatccccattttaagaggcagtctttcagtcttttcaaagcataactttgaagccagaattgcctcggttagatttcttcttattattattatgatgatttgagacggagtctcgctcttgttgcccaggctggaatgcaatggcactaactccgctcacccgaactcggcttacagcaacctccgcctcccgggttcgagcgattctcctgcctcagcctccgaagtagctaggattacaggcatgcaccaccacgcccggctaattttgtatttttagtagagacggggtttcttcatgttggtcaggctggtctggaactcctgacctcaggtgatctgcccgcctcggcctcccaaagtgctgggattacaggcatgagccacggtgcccggctcttcttatacttattatttgcttgccttagacaagtaacttcacctctccaagcctgcattctaatgcaaaacgaacaccaatacctattttatgaattattgtaataattaaacgaggtaataccatacctgaagtatctttaatgcagcagatgtcaaaagtggtagccgcaattatttttattttgtaagggaggattaaacacatttaaataggacatcacaggagcggagctggatcccaggtcagcctgattcctaggccggcgttccttattgattacaacataaggcaaacaagtcgtctttggagagagaggttggggagagaagaatgtttaatttctccatgcccttcaatgacatgtataaccttcactgttgaccatttggccagattgttgaattatgttttgctctctggcaacttggggtgtggaacgtacaataaaaacgccttcacactaataacctccaggcctgtccccaggattctacagcatgagctttgtgggtaaagagagctcaccaaattcagcctccagcagcacacacagctcagtagcagcgccccgcccagatgtttatattttcctccatcggccccgccccccgaccatgaggggctctagccacgcccccaagctcaagtttctggggccggactagcccagcgcgtctgcctacccatagggattccctctccagccaatccagtcagagcagcggagctgccccgaacaaagatggcgcgggaagcgtctgtgagggcagactgatccgagcacccaaaccctcggcggacagcggagccagtggtagccgcacggccctaaaaccatggaggagggcggcagcactggcagtgctggcagtgacagcagcaccagcgggagtggcggggcgcagcaaagggag

SEQ ID NO: 41014 - DNA, 2300 bp, Homo sapien
ttggctcactgcaacctctgcctcccaggttcaagcaatcctctcacctcagcctcccaagtagctaggattacaagcatgcaccaccacacccggctaattcttgtatttttagtagagatgaggtttcaccatgttggtcaggctggtcttgaactccagacctcaagggatccgcctgccttggtctcccaaagggccaggattacgggcataatcacttgtccaaggtcccacactagtaagtagcaaagccaagattcagtctagcttaaagtcttccttgaaacaacttaatgctgacacttgcctacataatggtggagcagtcattcaaacccaggtctaattcctgcatgacaaggatggctctcaaaactgctgcagtgcagagaggcgctagaaaagtggggaataacaagtgctctggggactgcaaggaagaggcatttaaactgcatcttgaaggaaaaagtacttgctggacaaaaagagccatcatgcaatttaatatttgtaaaataaatgaaaaataagtaaccctatccaacagaagacttttaaaaagatggcccagtaatgaagagcagagaaattaaactttctttcccacagtaggctttaaagggactgaagcctgttatcactcgcctgctacagcttgggcttctaaagcctacaaactctccttacaattcccccattttacctgtcccaaaactggacaagtcttacaggttagttcaggttctgcaccttatcaaccaaattgttttgcctatccaccctgtggtgccaaacctgtacactcttttgtcctcaataccttcctccacaactcactattccattcttgatcttaaagatgcctttttcactattcccctgcacccctcgtcccagcctctctttgcttttacctggactgaccctgacacccatcagtcccagcagcttacctgggctgtactgccgcaagtcttcaggaacagccctcattacttcagccaagccctttctcatgatttactttctttctacccctctgcttctcaccttattcaatatattgatgaccttctactttgtagcctctcctttgaatcttctcagcaagacaccctcctgctccttcaacatttattctccaagggatatcaggtctcttcttccttactctactctttacaacagggctttatgaagtcacccccgccttcttggactgcacctcacaaacttacaccactatccatcatctacccaactcctataaaacaaccccttccccatctccctttgctgactccgtttttagactcagtccacctgcacccaggtgattaaaaagctttattgctcacacaaaacttgttcggtggtctcttcacacgggcaccgcgtgacaggtttcattagaaagtacttttgatgaaggaaaaaaagtttttattccctttaattctgaccacgtatttttaaaaatcaacaaagaatcgataggtgcaatttgccttttgtaacattaaaaatcagttaattctgacttccaatattggtctccttcagagacctttgcaagacactctttcaggtcctgaaacacagacatttagaaaccaaaacaagctggggaattcaggctaagaactagaagtaacaggggcccgcgtacaagttgtggctcaaacgctgcagagctgggttttctttttcctggcaaactgatttataaccacacgaagggcagctgcagaaccagttagaccataagtactattcccaaacagccctagaggaaggaccatacagggatgggaatggcaagggggattctgggggtcgtccttgttcccaagttccgtgagacgccgcaagtcttaattcttgcaggagccagggtccccatggatcctgctgcccaaaacgtgcgagcccggggagttggcacagcctcaaggcagcccgacaaggtgcctccacgcccccttgcggacccaaatgattgaggacgatgtgccaattaactgataggtgcagggtttcagaaatgctctctcagtttaacctcacaaaaagcccttgaatcagccctgttttacagatgtaaaacaccgaggctcaggggagtgaaggaagacttgtcagcaaaaaggaaaacctagtgaagactatcgttggtcttgctccttttatcaaggagtagaggggctggggtcgcctcgggaccccacagcgacccctcttgctctcttcgcggatgaggcgcaggctgtcagccgggaggcctggcggcgtcc

SEQ ID NO: 41015 - DNA, 2300 bp, Homo sapien
ttgccatcctaacttactacatcactgtctttataatacccaggatgtcttgaaacttttaccttacaattctgtgacttgagtgaggccaggattattaggaattggtatgacatattcaggaacatgcaacaaatgatttattaagtgcctactatggccagtcacttaatatttggccaacagcagtaagtaagacagatccctttctccctttgtttatgaagcttgcatattctttggggagacagacaataagtaagttatataaatgaaatagttaattttagataggggtaagtgctaaggagtaaataaaactgaatgagtgatagagaatgaccaggtttcgagaggtgaaagaaaaacggggcttccgggtctacaattccagtgaggcaccattaacattacaatctataagaacagcactttctgagttatggagtgcaacagccctgagcaaaagcctctgcaaacctgatggtttgagttaatgcctaaagtatgggaatgagccagccctagagaaatctggaagaaaagcgttgcagagaaaacaggaagtctaaaggaaccaagattgtaaagatcatagtggttaagagtgtgggctctggggacataaagtccaggtttaggccgggcgcagtggctcacacctgtaatcccagcactttgggaggccgaggcgggcagatcacctgaggtcaggaattctaaaccagcctggccaacatagtagagatgaaactccatctctactaaaaatacaaaaattaggccaggcatggtggctaacacctgtaatccaagaactttgggaggccaaggtggggaaatcacgtggtcaggagttcgaaaccagactggccaacatggtgaaaccccgtctctactaaaaatacaaaaaaattagctgggtgtagtggcaggcacctgtaatcccagctactcgggaggctaaggcaagagaatcacttgaacccgggaggtggaggttgcagtaagctgagatcatgccactgcactccagccagggtgacagagtgattctgtctcaaaaaaacaaaaacaaacaacaacaacaaaatacaaaaattagccaggagtagtggcgggcacctgtaatctcagctattcaggaggcagaagcagaagaatcgcttgaacccaggaagtggaggttgctgtgagctgagattgcgccaccgcactccagcctgggcgacagagcgagactgcgtctcaaaaacaagaataaataaatgaagtccaggtttagattcctgctgtaacactcaggagcacatccagttactcagtctctccaggcatcagtttccttatctgtaaaagggggataacagtacctactctatttgactactgtgagggttaaattagatgatgcaggtaaaatgcttatccctgtgcctgacccataatacctaatcaataattgaatgtttctcttgttttcgtacctactaaacaaaagagaaaatgcactctagagaagtgatttgccccaaaactcacaccaactaatgtgtagctgggactaaaattcatgctcagaaattctcagcccaatgcttttcttcagcccatcttctacaccttagttttctcatttttaagtgggataataatctcatgtgaagtattgtagtaatctcttattaaggctaatgaatgaatacatgtaaagctttagtacagtatctggcacctagtaggtgctcctaaattaactataggtattgttatcattattaatactatattatgttaattacctgtcatcttggcaggcccacactaatgcacaagaacattacattgtctatacgtttatatcttcaccagcaatatgcattttagctgttctaattatcataagacaataataaaagtgtgatatagtttgtctctgtgtccccactcaaatctcatctggatttctaatccccacatttcaaaagagggaggtgattggatcatgggagtggtttcccccatgctgttctcgcgatagcgagtgagttttcatgagatctgacggctttataaggcgctcttccccctttgctttctcttctccctcctgccgccttatgaacagggtgactgtttccccatcggccatgattttaagtttcctgaggcctccccagtcatgctgaactgtgagtcaattaaacttctttcctttataaattacccagtctcggttagtatctttatagtggtgtgagaatggactaatacactggcaatatgcatgttagttgttt

SEQ ID NO: 41016 - DNA, 2300 bp, Homo sapien
aatattatgcttatttgtgggtttttgcacacatatttcacattttaaaatcatcagggaacctcccattcccaattttctgtaatttttttttttttgagacgaagtctcgctcttgtcccccaggctggagtgcgatggcgtgatcttggctcactgccacgtccgcgtcccgggttcaagcgattctcctacctcagccccccaagtagctgggattacaggcgtctgccaccacacccggctagtttttgtatttttagtagagacggggcttcaccatgttggccaggctggtctcgaactcctgacctcaggtgatccacctgcctcagcctcccaaaatgttgggattacaggcgtaagccaccgcgcccggccaattttctgtaattaaatgattggaaccacccccttggtaaaaatgaacacaaaagtaaatttttaattagtgaaaaggggaatcagaatatgaggatgatagacacttgtatgggggcagagggaaagagatctaactaaagtggtgattgtcttcaggaataaacactgcatttcaggaattctaatccctacgtgtggatctagggtgaatgggtgtctttccagatcccgcctctcccaaaccccgcgtagacactagatggcgctctccctttgcagtccttggagtcggagcgggtctcctaaaaagctgcgccggccgcctggcctaagagaattgcgttcagtgaagcgcagaagccgaaaggcgccttgctgcggccgcgccctgtggctgaacttaggccaattccgagcgagaccgagacgcagggcggcggtgggggctggaaggggcctttcatccactccagccgcaggacccctgctgcagctcggagcacgcgcagcaatgcaaataacacattcgaggagagcagaggaggtggctagccgcagcttggacagttggaatgtcggagggactaccctgcaaatcacagcccttctatcgggattctcagctgggcatgatggaggcaaatttggaaacctaagagtaccacttgccttcctctctcattgctccatcaccagcctttggtggtggtgaaatattcttttcagttttccaaagcaaggaagtattttctcacaaaatagggttttgctgaattctcagtttccacccaccttccgcctaacatttgtaaagaatcgggcatgcaggatggggactatgggtcaaaaataagtaaaggtgttgactcttctagagggcccacccagcaggtgagcgcgcgggacagagtctccggagagccagcgccgggccctggtggcctcctgctcttcacatctcaaggcagagcctctcaaagagtggcctgcaaggatctgaaccaccagggggtgtgatattgcagagtccctggccttacctcaggctccttaaaccagaatctctgcgggtggggaatcagcaggttatgaggtacaaccacacgaaattgcctacattcgtctttttgtaacctacagaaatgtccatttcgatacctccagctgattcccctgcaccttaaagtttgagcatcgctgctttggcgttttagagcccttggacttgttcacaagaggaagagggagaagaggaggctcgaagggggcctttatagtggatacctgtttcactcggagctcagggtctttgacgcgggaaggcaaagtctgtcttttggaaatggggaagtgggcacacagcacctgagaacaggagggctcgagacctcccaaagagagcagggggcctggtttgggagcttgcagtagcttctgccccagtggaagggaaagagcctggctcgctctcggcgcgccacatccggctgccgcgcgcacctggggggaccgccaggttcggggtaggcgagcgcgtgagcggcacggggctggcttctccacatctccggtagggcggggatgggggagaggaggaggagagaaagtgggggcgttatgggcttaggcctgcctcccacctccccacctcccgcctccgcggccaccctccgctctataattggctgccggcgggccttcctttcctcttatctgatcctgggctcccagctggagaggcggaggcagctccagggggctggaagtggaagcgcagcggcagaaggagagggagagagaaagagagagaggctaattaaaaaaggatactccgagggaagagagcaagggcggtgcgccgccaaggaccaactagcggcggagcttcgatcttgcctaggcgcggagagctccca

SEQ ID NO: 41017 - DNA, 2300 bp, Homo sapien
aggagtttgagaccagcctgggcaacatggtgtgacccagtctctacaaaaatacaaaaattagccaggcatggtggcatgcaccgtacccccagctacctgggaggttgaggtgggaaaattgcctgagccagataagtcaaggctgcagtgagctgtgatcacaccactgcactccagcctgggcaacaaagcaagaccctgtctcaaaaaataaaaataaaatataagcactttctgccttcaaaaactccattagtttcaatctttcttttttttttttttttttttttttttgagacggagtctcgctctgtcacccaggctggagtacagtggcgcagcctcggctcactgcaagctccgcctcccgggttcacgccattctcctgcctcagcttctccgagtagctgggactacaggcgcccgccaccacgcccggctaattttttttttttttttttagtagagacggggtttcaccgtggtctcgatctcctgacctcgtgatccacccgcctcggcctcccaaagtgctgggattacaagcgtgagccaccgcgcccggcctagtttcaatctttcatctgagatatggttctcgccccatatcaattttcagccttttctattgtgcctcattatccaggtgctattgtcttcaggcccgtaagactcaaatactcccacctccaatttctccagacaaacatccttataactaggaaaataaaacagtaagactagaacatgggtgcactagcctgctccaggctcattctctgggacccatcaccaatgtttttgtctgtttgctttaggccggaagcatgcgttaatttgtaagacagccttgcttaatttgttttttggatcattttacaaatattgatcaggctttctaagcacaaaaagctttattttaggccagcggttctcagttgatgtcatttgctcccaaacggagacatttttgattgttacaactggtgagagaggacttgctcctggaatctaatgggcactcctaaacatgctacaatggacagtactcctctgccccagaataaataatttttcagttcaaaataccaatagtagtgaggctgagaaatcctgttctaggccaagtgggagaaatatacatgtatggtcatttgcattgtacgtgtggggcatgggaaaattgctactgaggtaacacatacagagatagacatataaatgtattgttggaagggggcttctggaggaaagtgatgagtattttgagaacttgtcactaactcaaagctcttaaagaatgagcatgcatgggaagaagcaggaggtaaataaatttgtataggctttagcaatgaatgtttttaatgcttcattaaagaccccactagattgaagaagaggtgaaaacatacagacctgaaaatgctagctaatcaagggccttggaataagagcataatctgtctggtattaaacatcctaaaaggagcagataaaaataaagtggtaacattgatgctggttcacaatgtggcaaggtatggcctggtctccatgataaaatttgctatgactgccgcttgtgtgcctgctgggagcaaagttggttaccttagaagggacaattgagaattatttctttaattggactaattcctcaattgcctattacaacatagtacataacaatatagcagatggtagactgtgaggtggaccaatttctttgaataagtacaaggataaaactatatttagggaaatgactaggtccctaaaaataacctttagcccagcagtttttagagctagatgagaccagattcaaacctcaaccctgctgtctgcttgctgtataatcccaggcaactgaaaagcagtcaagtgaatacaatttgatctaagagtgcttctattttcccatattttgttgtaactaaaatatatcctctttcttctttagttcctggtccaacactggaaacgtttgtgggagctgacattaacaccatccttatcacaaacctcctcagcggaatggactacaatgtgaagatatttgcctcccaggcctcaggcttcagcgacgccctgacaggcatggtgaaaacatgtaagagccatttccgatggcctcagccgcatatgggtttttgttttgttttgttttttgagatggagtctcgctctgtcgctcaggctggagtgcgctggtgcgatctggactcactgaaacatccgcctccagggttcaagtgattctcctgcctcagcctctcgagtagctgggatt

SEQ ID NO: 41018 - DNA, 2300 bp, Homo sapien
agaatggactttgctatgatcataccccatagcggcaatctgaagatgtaaagatatatgcaaagtgcttaggatagtgcctggcattcatttctgcaaatgtttgttgctattgttgttgttatttactaagatttttctgaatcaaaacatttcatagatattattattgtggaaacaaactactattatatttctgtcctcaatactgtcactgtcattttgattctacttttttggcctttgtattatatgtacaccttctccttaaacaaatcaattatgagaaagctaatatttattatttatagcaactatgttccaggtactgttctaaatatttcctctatactaactcatttaatcctcacaaccacatgaataggtactattattatgctcactttacagatgagaaaactaagatgccaagacattaaataatttgttcaaagtaactcagtctgtcagtggaagagttggagatgacacccaggcagtctagctccatactctcagaatccgtatgatctttgaaatatttattgttagtgttgttgtaattgtttataaaaataagctataatgtatttttccaaatgttttaattttattaggtggtgcaaaagcaattgcagttttgacattacttttgcaccaacctaataaaaacttaattttttattggacataatttttgtttgtttgtttgccctggacagtctcagttatcatactcttggatggtggaggggaaccttaaaccacctggaaaaaaaaagcagtgagccatgcacatatttctgcaaacagctcaataaggtgtatatgggatcatgaaaataagatgctttgacttatggatttgctttcaaaattcaggggttactttattgatcagttggaatgaatgtttgcaataaggcataattacttgagtataatgacagaaagcccgatttcattctgcttactgtcagaacaagttattttgtgatagtgcatgcatttttaataacatgtttcaatagtactatctacttgggcattaccatttttctagaagatgtttggcgaaggatggatagtactatttgggagaaaataaggaaggcaccaagagtttccagtctttgctgaaaacaccacttgctgaaagcaagattacagatttaaaatgaaaacaatttcatccttctcccagatcagtaatagagcacactcttaatatttgaaaataatgtaggaagaaatatagtaaaaatgattgggtcattaagctagtgttagcccttaatgatgttgtaattatgtttctgtatatttcaacatgtacattgacttatcaccaacatacatgagtggagcaagcctgtctaaatatttatggcatgatcaatggcttaaataagaatacacatagcttacattctcacaatactgaatgtgaagctgtcatgacatttgccacattgtgtaccatatttatgtgctcccctctcactccctgtaagttcttctaggtcaggactatgattttttaaaaaatgtttgtatcctaaaagtctacatagtatctggcttatattatgcactgaagaaaaagttactgagtgtatgtacaaaggaatgaagtgataattaattcaataagccttcctgagtgctttttatatgccacatattatgataggtgacctaaagatgagtttggtaatgtaaataattgtgtagtgggaggtgtgctatagaggaggcatatggagtgttgtgtgactacagagtcatttgggagcagctgtgatgggctttgtaaggaagagtttaacagaggagctaagcttactctttaagtagaaatgagaggggaagttttgataaataagagggtttagatggtggatgaataattgtagacaaaatcttagatcactatgtgtttgaggaaaaaaattagtttgacattgttggagttactttttaatttacttactgtaatgtattattaatgtattggtattctgttatataatacataacataaaatcattataaagataatttatatatattttattgaatgacaattttctttttaaatcatagttccagttacagatgtttgatattgtttgctccacatcatgggccaatacagacaaatgctgtgaacttccaggcctggtaagaattcttccttcatttctattgattttttaaattgtatttaattttctggaaatgagaagctatttctcaacattcatatcataggcaactcgttgagatgataaaattag

SEQ ID NO: 41019 - DNA, 2300 bp, Homo sapien
aaagggcccttgtacttgacaaaccgtgggcttgaattcatctcccacaccttttatcttcatgtccctacttaaacgtcagcccctcagagagggcccctcccacccaaatggaagcagatgttcctttattcctcctttcttattcctgtcttaggaccttatctgtgtctttcatattcatcatgattgataattaatttttctatggccataccaccctgaacgcatctgatgttgtctgataattaattttgcttatgtgttcacgtttcctgtctttttccagcaacagaaaggatgccccaagaggacagagcccacatctcttttggtgatggttttatccccagaacgaaaacactccctggttcacagtaatatttgatatggaaagatggggtggggcagaagaggtaaaaaaattaaaaaaaaaagaggaagagttgttctaaaattaaattggggtcttttggaatataaaatactaccctaaaatgactattcccaaaagaaatggagagtttgtaacaaatgtgatgagaattctgaagagtaatgtatttttcatgaaatgatttattacttttagaaaacagtataaacttacaaactataaattaagatataagtatatttctgccaaagtaagtcaagaaaaatgcacttcagaatcagcttttattacaggcaatgtattgtaaactcgaacatccagaatctgagttacacttattatttttaacattttactcaataaaaatctgatatactgggtccaagtgatgacacattccaaattaatgtaactttcttgcagcttaaataaacaaatttagatcaccaagtgaaatcaaagccaagtgtatttgcacaactcaagaatgatgtgaatggattagaatctctcatagtgtatacttcgccatttatacacaaactttgagagtcttctgagtgacatggtatttaactttgtttccaagggccaaatactaaaatgtatagaatatcctactctatactcactattaaatgtcatggactaggaaatctgagacacagaataagaagcaactgattacacaccctagtcatttaagttggaagagttctcttaggtgactctgggtcaggccatcttgatgagccttagacaagttttccttcccataaatcctgctttctcaggcagaatcatataccataactgaaaggaaatggctgctgattatctgctcattatcttctttcattccctgcaaagacaccaaaaaaactgatttgtttagaaccgccccccgcccctgccccaccccaccaaaggcacacaagtagattgtttgaatccttcagatgaagtctgaagatgaatcatctgaagaatccttcagatgaagatgaaaggagatctttcatctccaaagatcaggagattatgagaaggacagaaagagaacctggtgatcagacagacaccatccttcgtgttagccttttcctgatccagaaagaatccagcttctagttgtaaatgatcccatccctactttctaaagttagctgttactagggagatgttacagagaaggagcacgtattaaatttatggttctcttttgtttctatttcaactagcacataatagaattcaaatctttctcaaatacctagatttttcctttgtgagcaaaagacaaagtatggtttaagggttagagtctattagattcaacctcatttctgctctgccttctaggggtttttaggctttcctcaatatcagaagataggtgggctcctcagtcaactattgataaacatttatttagcagaggtcatgcatttgcagggtctttgctgcctgctagattataaatgaacaataaaatgtcgctaatctcttagtcccaagttaactgcttcttctgttttctactgcactcagaatgaatgaatgagtgagtgagtaaacgaatgaatgaaagtttgaatgcttacctaaaggaagacaactgttgtctttctggtggacactcagttaagactacaaaagcttaaggtgatacttagaaatgcaggaaaaagaatccacatacattgttttaaagttttatttgcttacaaaagaaaatggaaataggtttgcgaaaacttatctgcatgtacaaagtaatccccgtagataaggagaggcaacccctggaacacactgctggataaatcgttcattaaaattatatctctttgcatcagagctggtggaaaatcattatttcacatgagttaaaaccactgaa

SEQ ID NO: 41020 - DNA, 2300 bp, Homo sapien
gaaaacaaacaaggtaaaaaagaatgtagatggcatactacatttgtatgcatatatacctatgtatgtttacatacacacaagcatatatttatgtgcgctactttttgcgtaaagcacgggaagagaaagttgcaactactagactatgggtacaaaggaatagggaaagaatgagatttttttcagagactatctttaaatttattttttatgttaatcatgctaaaattttatatattagaaaaataaaatgacagcaacagtagaagtgagcacaactagttcccaaatcttgttttccacatgctattccctaccaaaaggaacttagttcttggagaactgattgattcacgatctggagcagagagagaactaaattattatagggtatacacatgcaaaagactattatttctgcatgatttataatagtgaaataatagaaagtaacagaaaataaggcaatactcaaaaactaatggagcaatatcaagggaacatggagccagctttaggtggtgcccactgaccaaatacaggactgtgtgagcctcaaaacacatggtaataataagggattacactgaataagaaaacaaaaatctatacggctacagtgaccatccaaaaattatttttaatttattatgatgtcccttctttctgaggatagaaaagccctctatagaagaatatcatataaaaaatatggaaggaatactgaactagaaaagccatcattaccagcgtattctgtggccactgggtaaaaggttattgtggagcaggatatttatagtttccaaataccacaatacagagtatttattatttgtaaagggcatcttttcaattatttgtgatgggaatcttcccattgcttttacattaataaaatctggtggacaccaccgtaaccatgagatcaaatctttggtcactgtgggaaaaactgacatcaggtgcctcctgctatgaagcactgaacactcaacataaactatatggcctcttgtcagtaatgcttaacctgaatgtaatcatggaacaacaatagtataaatccaaataaaaggaaattctgcaacataactggcctggactcttgaaatattaaagaaaaggcaaggaaacttacgataaaaggagactagactacagagtaaacaacataatatagtaactaaatgcatgtgattcttgacctgatcctgaattgggaaaagttacatatgacaatattagacctatttgggaaatttgaatatgtactgtatattagataaaaagtatttcatcaatgttaattttcctgaacataaaatttaatgttctatagggagactaggagatacatgctgaaatatttagtttgaagtttttgcaaattactctaaaatggttcatccaaaaagtgtttgtatatagacagaccaaaagagaaagcaaacatgtcatgctaacagttggggaacttaggtaaagattagattaatgttcattatattgtcacaacttttgtgtaaatttaaatttttctaaagtaaaaagttgcaaaaaaagtgatcacttgacccctgtttctgtttgttgctctggttctttccctcatttccccttaggttaaccacctctgtgtgaagggaactctttatttttatttatttatttatttattttgagacggagtctcgctctgtcacccaggctggagtgcagtggcacaatctgggctcactgcaagctccgcctcctaggttcacgccattctcctgcctcagcctcccaagtagctgggactacaggcacccgccaccacgcccggctaattttttgtatttttagtagagacggggtttcaccgtgttagccaggatggtctcgatctcctgacctcgtgatccacccgcctctgcctcccaaagtgctgggattacagacgtgagccaccgtgcccggccaaagagaactcttaaatctccataaacacatttagttagcattcatgggttaccttctctgtatgcacattaaaggaggtacttctccctcttcctggtttcatgtgtaatacctaatcaaaaactttgattcctcattttgcattgattttaaccattcagcaaaatcctctaatagtaaagaaatttggctcattgtattcaaaattctattccattcagcaaacattagctaggaagccactgtgttccacatgctctacgctgaatgagcacttagcagctttttgaaattgtctttacaactgatctagggaattttatactggcttt

SEQ ID NO: 41021 - DNA, 2300 bp, Homo sapien
aaaaaaaaaaagaagaggaaaaaataaagataattatcattaaaatggaaatacagtaattaaatttattatcatatatcatcacgtttctacaattaatgtcaacaatttctttgaaaaataactctattgctaaagaatttttgttttcatttctatttctggaaaagggttgttttttctaatcattctgcaaagacaaacacagtaattattccttcctggtttcctgttagcaatatgacttacgttttgttataaatatcccaaagatatatttccctttacggtatgacttttttttttttttttgtataacacataatagaatctggaggggcaatgagaagcttgtaagaaagtagaagctgtttatgaaggtcttcaaaaacatttagagattattaggtacattatattgaaagctgagtggccaactggaaactgaagacgattcaggagttcaattcctggggagagttaaatagaacaatgtagttgggaaagtacagatgggtgatgtggaataaatttcaactttaaaaagttgcctgaaataggtatctttaggttgcctcaggaatagagcattgtttttacagtcgtcatcaatgtattcaaattcttagaaaattctaggccagaaagatctccaccagatgctttctctatgcatatacacaagaggctaaacaatgctggaaaaatagaacgaggctagctggtcttattttaaatttacttatcacaacctcaaactagtctacatataagaaaaaggccagtttttgtccccatccattgtagactaatagtttgatacttagaaaaaaaaaatttttaatgaaaaaaatacaaatgctgggcgatgtcagattgctgaaaaaggttttaaaatttttattttacttcctgtatttatctcatcacagacaggcaacaaacagcccaaggaaggaaccatacttggagcggcactgagttgagagtcatcttagaccgatataacccaaactaactcctattcttccacctgaaacctggttcaatctcagccttccctatctcagttgatgacacaccctccagttggacaaaccaaaaaaccttggggtaatccttgtttcttcttttgctgttggcctatactcaatattcaggaagtcctactggctccaccttcaaacaaaacctgaccactttcaacacactccatagtatttctagcgtggcctctgcaccatcacgtctcgcctggattactgtaacaccctccaaacatattctttgcttctgtcctctactaacccctatttctgaacagtctattctcgacccagcagccagagtgctccttttgacaccaggtcagatcctgttactccgtggatcaaaaccctccaaaaggtccccattttactcagtcaaaaaacaaattattgcaagggcctacaatgccctatgtgatccaccttattacctctccgatctgctctaatcctcttccccccgcccccccaagaaagacatgaaaagggcagattgaaaagaagaggggacgagtaacagacgaacgacattaagtgcttgccagactgacgaccctcttgtgctttcccaagtcacctcttggccgagggtctcggcttccctgccgccccagcttcactacttaatctgccggaaccaacgctctccttctgccagtataatgaaccccatcaagccataagagtccgagctcacctggggcgccctagagaaactcgacatattcctctactagcaggaccgtacgtccttctcctagtagccacgccgggtcactcagccttactggcccggcgggaaacgctaacacccaagcaggacagttcctagcccgtcgagcacttgtcggcttctccctcttcctcgagtttcctccagtcttctccacggcagcaatttcgtcatgaaaggagcatataatgcagttatttagggaataactcccaaaaatatctcgcttggtggaaaaactgcggaaaaccgacggaggacataatttccagccgacctaaacgaagggaaccggaaatgcgtcatagcgcgcgtctgtttggatgtggaagccgagacctaaagttggggggtgatctctgaggagatggatcggtacctgctgctggtgatctggggggaaggaaaattcccgtcggcggccagtagggaggcagaacatgggccagaggtgtcgtcgggtgagggtactgagaatcagccgggtaagcgctgggatgagaaagagcgggaacggc

SEQ ID NO: 41022 - DNA, 2300 bp, Homo sapien
aaatttatcatgagaacccctggaatactcccaagagctcttttacatatacatttgaggtacaaatcaaagaaaatctttcctgcaataatagtggtattgactaaaattataccaacttgaaaattaatgagtattactaggccttggaaaacaagctagagtagcatacacatattagaaatcattccccaatggtgttatttgacaccgagagacaagaggttctctaatgaaagaagagaaaggtgcagattgtacagtcacgggaactacaaaattatcaaaaggagcagacccttccttgcatggaaagaaacttccttcagtttttaggtattggtctgttttggcatctccattttcagaacgtttaaaggacattctccagtaaaggacaagaagcaggaataaaagaaaagataactatcaaagtcagtaaatgcatttgtataatgccagtagaagctaaaggaggaaagatttttacaaagtacggttggtcaaaaaagcgaaatacttcaaaaagtcaaagcagataagaactgagaaaagctcatcgtgtttagtaattattaagtacttttaagagaatcagaacagaaataggtaattaagaacagaaataaataaataaataaatggtaaggaaatccgtgtgggagctttacatatttttactcatgataaaatcatcctcataaagccacactccccttagttatacagaactaagataggcaagaaaatttcataaaaggagcaaaattcaagctgagaacctagaataattttcataactttactatattcaagcatctagaagaaaggggtaatttatttttcagttttgtactcccttagttatctctgtaactcagtgccttgtacacagtcaagaagtatttccttgtactccttagggtccaaattaattaagttaatttccagtacaaatgctgtgccagagaaaagaggagtttattatacttaccagggaaagtactatcttctggattaattgaagcactaatgcttcttttcaagaggtgataaacatttgctgctgtgaagtctgaaaaagaaaagatagactaactcaaagggctctagatttacataatctaacttagtccaatttcaccatcagagactctcaagaccagtaggttgtacataaaagtactaaacgctgctcaagatctgttcaagttttgatacagaaaatctaaagcaatcagagaaaatagaaaaggctcccgatctgtacatgccagtcagttagcacgaatgcaaaattcccctcaaaagaataattttaaagagaagggaaattctgtgacaataccttatacacaaccacatacatttactcctcaaaatgcctgtttgatcgaaacaaatgaacacataaaatgcaatattgaatctagacgggtgcaccaaaaagcagtgcaatcgcaaacaattaaaatcatttaaaattcatcatttgtttttaaaacttaggttatatgtgggatgtctcctcccattagatgtaaattgtaggacagcaagatctttgtccatcttgctcctttccgtattatttgcatgtgaaacacaggagcagaaataataaatgcatatatttccaaaaagcaggaaattccattactaaggcatagaaaatttattaagttaaacatttactatgccaagaacttctaagggctggaatcttgcatccacaaatttgtccctgtttttccatgaagatgctatttttgcagccctcattaactctatcccagatagagtcccagcttcgtgggacaactacatattgatccctcttcagcagaacttgatcacaaaactcaaacttcttcccctctccacaagccgttcccgctctttctcatcccagcgcttacccggctgattctcagtaccctcacccgacgacacctctggcccatgttctgcctccctactggccgccgacgggaattttccttccccccagatcaccagcagcaggtaccgatccatctcctcagagatcaccccccaactttaggtctcggcttccacatccaaacagacgcgcgctatgacgcatttccggttcccttcgtttaggtcggctggaaattatgtcctccgtcggttttccgcagtttttccaccaagcgagatatttttgggagttattccctaaataactgcattatatgctcctttcatgacgaaattgctgccgtggagaagactggaggaaactcgaggaagagggagaagccgacaagtgctcg

SEQ ID NO: 41023 - DNA, 2300 bp, Homo sapien
aggccagagacaaagttctgaagttctcctattctccacagagataataacatacatgtattataggacatacatgagctaaacagtttgtggtttatctttccttttacttgaaataccttcagagggcaaagcaagtgggtgaacactgctggcagagttcacgatcaacctagaaatgtccaagcattctaccctttataaatgtttaggaaactctcactggtctctactttctgaaattaggttgatggtttgctttgaatacttttctgatacatgagtccactctttccttaaattagcatacttcttgataactgaagaataaaaaaaatcacaatgaacaaagtatgcgtgtttgaaagtggcattacagtactgaagtggccacagcagccataactgttggaaggattggagctgaaacttctcagttctcaggaagcgcaatacatcaatgtccacctgagcctggcactcctaaaaagatccagcccttggatcatcatcaagaagttcctgttctaccaaataggatgagctccaatgacttcctgtggcccaagacgaacttcatagcctttcattctgaaccactccgttaaattcttatttggttggccctctagtgttccccacaagcctagagtctccttgagagaaggcctatgtcttcactcatctctaaatgtgaggatcctctccagcccttgacaggtgcccatcatttgattttcaactcaagcacagtgtcaagggattcaaacttaaccaggacctatgtctagagtgtactaaaaagcagccatttctgtaaagggccagatgataaataacttaagttttgttggccatacagtctctgtcacaaatactcaatctgccatagactacataaacaaatgagaatggccatgttttaacagaattttatgaacacagtattgaagtttgatattgaatttgatataatttttacatgtcacaaaaaattatttaaaattttttcaatcatttggtaatgcctgaaaacatgcttagctcacaagctatacaaacacaggtggtagactttggtttctggttctgtaaataaagatcatggtatttgtcactcctgtcctcacaataagaaacaagccaaaaaaaaaaaaaaaaccctgaaaatcaacaattcttaggtctatcagagaagtgaggttacagatcaaatcaccactgctaaaaccgaagagggggtagatacaaagaattatatcttacttggggcagaaatctcactggagccaacattgggtagacatatttaaaggataatttactaattactggagaccgagcctggcctagcttcagaaattaaaaactcctggagacccagcctgagagaggtgggtgaggcacatttgtatgagttttacctgctgaagcttaaccaggtttgcactgtaaaggtcaaagaaaaatcccctcatccttcctgcaggggaggggaaaagtaaccatttttaaatacacccagactgttctgttctccttaacacgacctgtctttgagggagactattttaccagagcctaacctagtaagattttatcagaaagagcccatctgacctggaaaaagggaaatacccaactccagccccatctagccttcctgtctcatttactaaggggtgaaaaaaaccctgaagaccttgtgaataattttatatagtaaaatttattgatatttaaaattttttctgcatgaaaaaataccgtaaacaaagtcaaaagacaaataggaaacagatttacaactaacaagaggctaatttcttaaaactataaagaacacacgcaaaagttaagcagtccgacagaaaaatgagcaaagactataaacaaggaaaggaattaaaaggttcttaaatctataatgatggagtcattaaagactgagagcaaatcatagggttattgggtgcttccccattaccaccacctccattttagcgccatatcaataggattcccgtataacagaggatgatagctgaaaagaactgcaaggctcagattctatttataaaggagtctccagggaaacccaagacaacagggaccccctaaaaacaaggacaccagcagaaattttagcctctgacacctacagttacagcaaacaataaacacagactaacttctaggcaaataaacaaacaagagatggtaagctggaattgacccacaagccatagttaactcctatgttagcagctccgagcattcaacactaatctctatagttg

SEQ ID NO: 41024 - DNA, 2300 bp, Homo sapien
ggtgttctccaaccttggaaagaaggaaaggccagaggcatcagctggttccacccttctccatatggtctaggggaagggccttcctcctcagtgtctccctcccagtggaaaggctggcttcagtgtgcagatgaacacaggggctgtagctaacaggctttgaggattttcaagagtgtaagagcaacagtttagagtctagactctcacagctggctttaaatcctgactctgccatttactaattacatgacaggggcaacttattaacttagtccccttcttcacctgtgaaatgggaatgacggtaatagtaaatatcctcaagaattgctgggaggattaagttaatatgtgtaaagcatttagaataggggctgtaattatgattccagtggcaaagccatctctggctaacatacatgcctcaggctgaataattgtctcctctcattccgatgcaactttcaaaaagcaacatactccttcccatgtaggtttgcttacatagaaaaaaaatgtgcttatcacagagattctgagaaattctcatcccagagcctacaatttcttatggcaaatcgatacataatctgtggttgtgcctgggcctcccacattgcttgtccacagaggcaagatgcaggcatgatgttgatgcaggatttctgttccaggagtggatctgttttgatttgtaaatcttcacactggcactctggtgcctatctcaaccttagtgtatctggatttcaacgcagatactcaggctctggtttcactgaagaatgatgcacgtgagtcctcagtctctaaagcaaggggccagcctcagctgcttttccatcctgagagtggatggtggtaccatctatattagctccttgtctgattctgcacatcacaaagggctggagagcccctgagactgccatccctgctctggccatctttgcatgaaagagtaaagagtttttggaaaatgggtgagttaaaaatatacgaaaagggagagctacaagcagaagcattaacccagggcaccctctcacctgcagtgactccgccttctcaagaaaatgtccaaatgttttcatttcattccttgacctggctgggactccgctctttagggagtcatctgagcctttaagcctccttgattaaaagtgtgagtcattctaaaagacttagagaactttcaacgatgatacacatcaatgggaatgtgttcaataagatttatttcctctcaacaccttgctgggttgggtttacttcaggaattaacagaactgttgtgggtttgttttgtgttgtgtttggagagagggtagacagcagtgggaaggggacgtaactgagaagcatgaaacaccttgagtggaccatgagacctgcttagagttaggggaaagcttgagaggttcaaggatagaagaactcagggtggttcaggtgtgacatgggttatgtgggcatttctggattgctctgggaaggtaaacaatcattataatattgttaccctggtaaaatgcaacttgaaatccaaataactaacttgcaaagcaacttttgaaatacaacccattccaactgaattcttaaatggggggcttcttatatgggaactcaggaagaaagagagatccccaggcagcatttggtgtggcactgggaaaacaaagataggtcaaaagcttaaagcatagaatgagttagagctggaagaacatttgtccctggggtctgaggcaggcatgacctgttgaaaaccccaggccagcagagacacctgtccagggctcgatagaaaacatttcttgcatttaaggacaggaggtttaagccactcgggctacgttgactcttcattctagaatcttgggacagcgtattcccttttaactcctggggagcccagggccttggtctgagtttagcttcctccagggaacccgggtggaaaggagagacaggtaagaactccgcagaggcagcgaagcctgggtttgaggaagcagagggaggagacctggatcagttacaaatgagttgttaagacccagggacaattctacgggctgggtatgaaagggaagtcggctcaggaggaccgagtgagggcaccgaggcgggacgcacgcacccggcgaaggtgcagtgtgggcgcccacggagtgggggagctgggaagaaagggggctgcggtgggctggagagaagcgggacggggaaggcgctcgggaagctgtccccgcggcgtcgtgcgctctggggacagaggaggggag

SEQ ID NO: 41025 - DNA, 2300 bp, Homo sapien
attccagtgaccattctctgaaaggggacacctaagagagtacatgctttcctaattatacacagtatggggctgcagtgcagttgtcccagccttactgaactgaaaaatgaggtcaataaggtacgcctttgagagtcagcattaacaatcagaggccagatatgtggagttgtctgagatgggaaaaacaaacgcccaggcctgcttgagggtgcaggacgggaggagggtgaggattgaaaaactacctataaggtactatgcttattatatgagttattacaccaaaccctgtgacatgcaatttacctatataaaacacctgtacatgtacccctgaacctaaaattaaaaagtttttttttgttttttggggttttttgagacggagtctcgctctgtcacccaggctggagtgcactggcacaatctctgctcactgcaacctctgcctcccgagttcaagcaactctcctgcctccatctcccaagtagctgggactacaggtgcccgccaccacacctggctaatgtttgtatttttagtagagacggagtttcactatcttggccaggctggtcttgaactcctgacctcaggtgatccgcccacctgggcctcccaaagtgctggaattacaggcgtgagccactgcgcctagccataagtttttaaaaaaaaaaaaaaaaagacaggcgaagtataataagaccataagtcaccagtttcaacttgttaacatgtctatagaaaaaaaatgtgtcgacttggggagggcagggtgttctccaaccttggaaagaaggaaaggccagaggcatcagctggttccacccttctccatatggtctaggggaagggccttcctcctcagtgtctccctcccagtggaaaggctggcttcagtgtgcagatgaacacaggggctgtagctaacaggctttgaggattttcaagagtgtaagagcaacagtttagagtctagactctcacagctggctttaaatcctgactctgccatttactaattacatgacaggggcaacttattaacttagtccccttcttcacctgtgaaatgggaatgacggtaatagtaaatatcctcaagaattgctgggaggattaagttaatatgtgtaaagcatttagaataggggctgtaattatgattccagtggcaaagccatctctggctaacatacatgcctcaggctgaataattgtctcctctcattccgatgcaactttcaaaaagcaacatactccttcccatgtaggtttgcttacatagaaaaaaaatgtgcttatcacagagattctgagaaattctcatcccagagcctacaatttcttatggcaaatcgatacataatctgtggttgtgcctgggcctcccacattgcttgtccacagaggcaagatgcaggcatgatgttgatgcaggatttctgttccaggagtggatctgttttgatttgtaaatcttcacactggcactctggtgcctatctcaaccttagtgtatctggatttcaacgcagatactcaggctctggtttcactgaagaatgatgcacgtgagtcctcagtctctaaagcaaggggccagcctcagctgcttttccatcctgagagtggatggtggtaccatctatattagctccttgtctgattctgcacatcacaaagggctggagagcccctgagactgccatccctgctctggccatctttgcatgaaagagtaaagagtttttggaaaatgggtgagttaaaaatatacgaaaagggagagctacaagcagaagcattaacccagggcaccctctcacctgcagtgactccgccttctcaagaaaatgtccaaatgttttcatttcattccttgacctggctgggactccgctctttagggagtcatctgagcctttaagcctccttgattaaaagtgtgagtcattctaaaagacttagagaactttcaacgatgatacacatcaatgggaatgtgttcaataagatttatttcctctcaacaccttgctgggttgggtttacttcaggaattaacagaactgttgtgggtttgttttgtgttgtgtttggagagagggtagacagcagtgggaaggggacgtaactgagaagcatgaaacaccttgagtggaccatgagacctgcttagagttaggggaaagcttgagaggttcaaggatagaagaactcagggtggttcaggtgtgacatgggttatgtgggcatttctggattgctctgggaaggtaaacaatca

SEQ ID NO: 41026 - DNA, 2300 bp, Homo sapien
ccagtctctccaagagttgaaccacctaaggcggagttcaaacaaaggctgaagcaggaaggtttgctgggggaaatcagtggggtcccctgagcagcgtgaagtcatcaggccaaggtaatgcttcccagaggtgtaaccgctgtgtgtgtgtgtggcgtggcgggggggggcggggggaagggggcggaaacgcgcagtactttgcaggtcagcccctggggactgggatggctgactacctggtattgcactaaaatgcttgacccctaatcacatcccccaacactacaccttgtgcgacgtgatgaaagcatcatttccagtttattcgacttttctgtttagacttattcattatagcccatatatgtgataaggactaagaacccagtcttcaaggtcctgtcgagttccaaagaagtccacccctcagaagatccttggaaggggaagaaggaaaaaagaaagaaagaaaaatctgttttaccctataacaatttcagcgcaatctcccaagaccaagttggttaatttgtaaagtcactctcattttttcctcaacagtgccacctactgtccattttcagtcatcagcaggcttgttggcaaggtccaagagaaagaaaggaggcggagtggtggggggaggagtaaccaaaaaacgaactctacccagccttggggcattgtgaaaacgacgaggaaaggccatctccaagcaagacatatttgtcctcgtcaactttgcagaaggcttgcaaaaagcaaaagccagttaagccatttccttcaagatggctaaatataagtcctccagaaaacaatttttattattttatttttaatgcgcgctgtttgagtatgtttacgttaggggaccagattgagcaaaaatatacatataattacttttctatgttttccgcccacccacggcagaaacctctttatgagaaaggctttgacacttgacgtcagctcagaaacttttgagttggcgggaagaaagggttaacaagtggtggaccagcgcgatctttttagagtcccagccggctgtcgaaggctccaggtacacacacacacgcacacacttacacacacacacacacacgtgcacacacccctcccaactgttcctccttgggtcggttacttagctgaagggcaccatttggctttaaaacaaattacttcagcgccacagggagtttatcgcttggagggaacttgtaacgcgggagttcagggaaatccaagaggcgagggctcccacctccgccgccagaggaaagtaaggaatcaggtggtggccccctatgtgtcttgcatttctctgcacacgttagcaatcaagttaattgaattcattggagtttagaaccggcctgtagctcagagaaggctttgaatggccaatttctctctctccctctccccctccccgcctcccgctcgcccgcccgcccgcgctcccagttccctcccctcagggttccccagtccacacctccctctccacttccctcacccccccactccctccgccgccctattaaaacacccaccagctcacttgttaagacccccttaagttggaggaggcagaagggcaacaacggcggggaaggagaagtcaagacgtctggaaagaattacccagtcctggcttcgagcagcccattgaaccagagacttgaaacagccccagccaaagacttttctcccaattctgcgcttcctgggttctgctgagtcttccacaggctttttttttttttttttttttttttaagacgaaaaagagattttctgttatcgggggcagaaagactgaagcccaaaaaaaaaaaaaaaaaaaaaagaaaagaaaagaaaaaagaaaagttaatttatttttaaagcataatttttttaagaattagactgaagtgcaacggaaacataaagagaatattagtgaaattattttttaaagtggggaagaatcaaacatttaagactcccctatcctttttaaatgttgtttttaaatttcttattttttttggccggtcgtctcaaattcatctgatctcttattacctcaattttggaaactgcccgccaccgaccctccgggaccacacagacaggctgaggacgactttatgaccaagagctgaacaaggtacgttacactggcgcgttttggtgaaggatgaaggtcctccaacaggccagggagaaggaagacatccttataattgttttaaaatttttaagccagtttcgatagaaaagttggaagtttaaaa

SEQ ID NO: 41027 - DNA, 2300 bp, Homo sapien
agcaaacatcaaagataggatttgaatgtgaagtctctctcaaacttgaaagtttgctttcaaataactttcacctctggcttcacattgtattagtctcttacctctttctttggggtagagatgggaggatgacagaaatgtgtagctgtataatcagtttttacatccatttgcagtcagagaacattttacttttgtcttatgggtcatgaattacaagaggcgagaaacaacaaatgtgtttttctataataaagaaaaccagttttagtaaatgtgcttcttgcttgaactattagcacagcacagttaaatgctagtaggcaataataggtattcccgcattacgtgtcatattcatgaaagtttagagctggaaggttaagtgtccccctggggcctcacagctagacacttggcaccccacaatttccactctacctctaaatcagtttaatccacgttatatgtcagagtacagaagttaggtgatatatttaaaattatagtttagcatttgaaaactaccaaaaaactgaatcaggaagctcgagtctgattaagtgggatgaaattgtgatctgaaatttaagccagtctctccaagagttgaaccacctaaggcggagttcaaacaaaggctgaagcaggaaggtttgctgggggaaatcagtggggtcccctgagcagcgtgaagtcatcaggccaaggtaatgcttcccagaggtgtaaccgctgtgtgtgtgtgtggcgtggcgggggggggcggggggaagggggcggaaacgcgcagtactttgcaggtcagcccctggggactgggatggctgactacctggtattgcactaaaatgcttgacccctaatcacatcccccaacactacaccttgtgcgacgtgatgaaagcatcatttccagtttattcgacttttctgtttagacttattcattatagcccatatatgtgataaggactaagaacccagtcttcaaggtcctgtcgagttccaaagaagtccacccctcagaagatccttggaaggggaagaaggaaaaaagaaagaaagaaaaatctgttttaccctataacaatttcagcgcaatctcccaagaccaagttggttaatttgtaaagtcactctcattttttcctcaacagtgccacctactgtccattttcagtcatcagcaggcttgttggcaaggtccaagagaaagaaaggaggcggagtggtggggggaggagtaaccaaaaaacgaactctacccagccttggggcattgtgaaaacgacgaggaaaggccatctccaagcaagacatatttgtcctcgtcaactttgcagaaggcttgcaaaaagcaaaagccagttaagccatttccttcaagatggctaaatataagtcctccagaaaacaatttttattattttatttttaatgcgcgctgtttgagtatgtttacgttaggggaccagattgagcaaaaatatacatataattacttttctatgttttccgcccacccacggcagaaacctctttatgagaaaggctttgacacttgacgtcagctcagaaacttttgagttggcgggaagaaagggttaacaagtggtggaccagcgcgatctttttagagtcccagccggctgtcgaaggctccaggtacacacacacacgcacacacttacacacacacacacacacgtgcacacacccctcccaactgttcctccttgggtcggttacttagctgaagggcaccatttggctttaaaacaaattacttcagcgccacagggagtttatcgcttggagggaacttgtaacgcgggagttcagggaaatccaagaggcgagggctcccacctccgccgccagaggaaagtaaggaatcaggtggtggccccctatgtgtcttgcatttctctgcacacgttagcaatcaagttaattgaattcattggagtttagaaccggcctgtagctcagagaaggctttgaatggccaatttctctctctccctctccccctccccgcctcccgctcgcccgcccgcccgcgctcccagttccctcccctcagggttccccagtccacacctccctctccacttccctcacccccccactccctccgccgccctattaaaacacccaccagctcacttgttaagacccccttaagttggaggaggcagaagggcaacaacggcggggaaggagaagtcaagacgtctggaaagaattacccagtcctggcttcgagcagcccattgaaccagagacttgaa

SEQ ID NO: 41028 - DNA, 2300 bp, Homo sapien
gaggaacaatcagaaggtgatttcggtgttccatgcaagatatgattgtaacttgaattaggaaatttatgaatgggtgatgaataagagtaagaaatagaaggacactagaaatctttaggtgctgtaggatcacacacagagagaaaagtgccaattttgatgactggctttttggcttgtgcaactaaagtgaagacagtgcctttataaacacaaggaactctgacagagttctgtgatacagaaaggagaatgaagtgtttggtcctgggtacactgagttttaatttcctttgagaaaataaaatatacacatgtagtaaacagatatgtatgtatgaaaataaaagagaacatcagaactgaagttacacaatttggaaaccatgtggacctctaattttgtcttaatcatacctcattaattacaccaactgcaaaagtgtccagtcatttccctccccagtactgctagagccctcacaatactttctatccagtgtgctaaataaaaatctatattcttccaaagtcatctggtgaggcatcatttctttttaagttttccagtttaagctcagtctcagagcaccatcaaatttactgtgaattccaataatcaaaagttccagaatccatactaccaatgtgtgtgtatgtgtgtgtgtgtaaataattttccccacactctattagatatcattttctgcctctccagtgagattttaaaacctctaatgaaaaaaaaaaaaaaacaaccttgcatcttttccttctacagcatctgtcataaaagtggtttcaaagcagatgcctgagatggtgattctagtttcatgtcactagcacagcaggcattgactatgcagatattaagaaatacttaatataaaatgtagtcagtatgtgaagtgtgatcagaatcagaagaaaatagtaaatgttgagccagatttaggaagacacagtataaacagtggaccataaatggctacagtccatatcaaataaagttagtagggatgtgctttggagagaatgaagtgaattcagtatgatggagcacagactatatggtcaaatcagcctagatttaaaccgggctcctattccctatcatctgcattatcttgggtttgtgagtcaactttatgggtctattgggagcagcagttcttcctggcccctggatgtactggtaagtccttgctgagtattccaaactgcaaagcctaactgtcctctgaccttaaattgttattttatctagctgtgtgggctattctgaaaagtaggtgaaaaaccccaaactgttgccacactatttatcattttagaggaaggcaagtgtgaatatatgaggcacaatcagaaggtgatttcagtgttccatgcaagatatgattgtaacttgaattaggagatgtatgaatgggtgatgaataagaataagaaatagaaggacactagaaatctttaggtgctgtaggatcacacacagagactgggagagaaaagtgccaatttttcttttatctagttgtgtgggctactagtactgtattactactgtattactacttgttcccatcatctgtcaaatggatgtaataattctacctcatagtattgtaaaaatgacacagtgcctaacattttggtagtctttacagaaattctggttttaagaaatgcaactttcccacataattatagcagaggtgtccttccatgaagttcaaacataatcagctgggagagtctaggcatttatttgcttttacttcaagaaagattggcagtagaatgttgagcactggagcctacgaagcagagaaaggaagaatgagtttggaaaatgctgtttttaaaaggaaaggctttttgcaaaggcagaggctttgagtgactcattttataattgttcacacattacatcactgttgggtgctgtgtgcatgctgggctttagtgatgttagttaaagatggcttctgagaatagatgagcatttatccctgatgaatgacacttagcctaatttacagaaataatcaagtgagagcatggatttcatttccagagtcaaagaaagaagtttacctggctaaggcatgacaccgcttccctttcagattccggtgcagtcctctgaccatattgggaaggatatgtaaaatgatacgagtttcagggaataagaatgggggtgagaggaatcactgaggatgcccaaggacaaagcagccggaacaaggtaatcacaagttaccaaacaaacaccaccttgaaacctt

SEQ ID NO: 41029 - DNA, 2300 bp, Homo sapien
aagcgatgtaaaaatgttgaagttggtgtggccggcgggacgggacaaggcgggggaatggggggagggtcccatatttttttcttttctttttacaattttggttcaccctgggtgaggcagaggttgggaggagatcaggcagcggtaaattctgatgttgatggcaagtaaattaggttcttagccggtaccaaatgaggctgagaaagatgtggcccaagctggattacagtcatcaagaagttaacagaatcctgtaagagcccctccaggtcgcctttcaggtccgcgagcatcacgcaagagactccttcccaggatagaatcttgttttatgggcggttaaaatgcaaacaaacagaccctacatcagcaataaccgaacaaacaggtgcaggccattaagaaagttttgcatatgagctgttttaatttttgttgcaaaggatttctggggagtcaaggggtatgtcagaaattagagccctagggcagaacttacaaaaaccttttagctacttccttctccccggcctcggaaatgaaaaagccaaaaggtcacccagcgcatccgccacccagtcagccccaaggccagccgtcctcaccccagtccgggtcctcgccattggcctctccgctgcacacggccacctgttgatgccctcgcgcccacagccgagttgcaaacggccgctagagttcgttctaattccccagagcagagctgcccgggaagccccgacgcgacgcgcctgctaatctgcagggcgggcggggactccgcagagcctcccagccccaggctccctttgttttctcgctgcgctcgaagcttctaaactagcccccagaccgcatcccctcgtccccgcccgggagctgcccaagagtccacaggccagcccagggggaaacaaggtacatctgggcaggaatgcgcggcgcagacaggttgccgcctgagatcccgaagtgtacccagatcccgaattccttagagctctttagccgagcactgtggcaggagcgcggcgcccggaatacaagttcatggttccgagccggcgggcgaagggcagcgcgatcccccgccacctttgctctaaggcgcctaggggaacctgggggctgccgcggtgagagctccgctcccactgggaacattggagtcccagttgcgaaagcgacccgcctagcttccgagggacttctctgcgagcaccgcaggcgtgtgcatttcttcgaatctgagaattccagcgaactcgggctctaccagagtttaagtcggcccctggggcgtctgtttgtttattggctcttaagggaaaaaagtttgaagatctttaaccagcctcagacctggcgcgggcggaaatcccggaatctccccaagcaaaagtgatataacttcaagtcgttatataagtggggggctccttcttcccctccctacgccgagccttctcattatcattccgggagtaaaatgtgtctcgctcaacatagttttaaaatcgttattattattttcctgagcctgaagccgggccaaggcgcaggcagcgcccagggtgcgtggtggccccacccgcgcacagtcccacgcaaagggtcccggggcccgggtaccgccagagccgggcctgcaagcgcgcccttcggtcccacggtccgccactccacgtggtcaagatcaacagtttgttgagctcatcagtgacaccttgaacttttcataaagaaaatgggtattgcacggagacggtttggccgcggccgccgcgcggggtcgtgcttaatattcaatgatctcgctcgcgcctccccctcctcttctcgcagaaattccaccgagtccgttactgggctcagacttttaagttaatttactgcccccctaccttggccagtaaccagcgcctttagggctagcctcccccccagctcctgcctgaaaaatgacatttcgccggtgtctccggagggggctgaatttcactttgtaactttctgcggaacccgagcccgggtggcagctcgggtggtggtatcgtatgcaaatacgcatgctgacgttacagatcatgtgggttttggcgtagattccccactgatcgaggcattttttttccctttttttttcctttttttttttcttttaaaaattttggccatcgttctccgtacgggggctttttctgtctgtctgtctggctggcaggctggctttccccctctttcccacggagcccgagccgggcgcccggtggggagtggggagtgggtggggg

SEQ ID NO: 41030 - DNA, 2300 bp, Homo sapien
cctccccttaccccgttaccatgacaatattattttaacaaacagctccttaatattaaatgaaaattatgctcctgacagacgagcagaagagcagctgaactacaaagggcttagagggtccgccaggacatttttgcatgaagccatcagtttcccctgatccctggatgccatttgttgccagaaaatgcaagtgttctggaggctgggagccaacgtgatgccaggccttggttacaagcagcaattgagggttgtcacttttttaatgcagaatgtcacaacggctccacgaggacggggtagcgtgatagcattattaaacactcctttgtacaccgatcggctaatttcacccctgctcgcctgaggctgctgaaagccttgtttgcttcccgtcttgaatcgagttggattgtaagactgagtgtagagagcccttgcctgtgtgcaccagggtgagaagaagcccatctttcctctgcaaggagccatctgtcccacccagtcaattcagcaacaagcagttgcagggattgggggacccaagcctctgccctcaatgggggtgaatgtcaagagagaaaagacgaaggacatacaggctactctatggtaacctccatcagtatgttggtgggtttatgtgccaggcactgtgctaagcacttgaaagcaaaaattaaggacacatccgagatccccaatggcaaagatgagtgaataactatagtaaagtggagagaggatggcaatggcagtgggtgacctattagctgtgtgaccttgggtaacttacttaacctctctgtgcctcaattttctcatccacaaattggggataataacactatctaccttaaccattgccatgaggtttaaaatgaaataaacacataagaagcactagaacagtacttaaaatacttaaaacagtgggcacatggtaagcagtaaataaatgctagctaggactgcaagttcccatggtaccatgcatacaattataataatggctaacatgtagtaagtgcttactccatcccaggcactatgtgaagtgttggagttgtactacatcatttaatcttcataggcaaccctgtgagataggtactatgtcatcattgttatcctcaccttgcaaatgaggaaactgaggctctgtgggtttgcggaacttgtcctaggtcctgaggctgggaagaggggatttgaatccagcttcatctggatttgctgcctcatcaaaacacgaactacagtatcacaaaaagcacacaaatggtggtactccaggaacacgggaacctcgctggggaggcctgtcccggggaagtggctgcaggtgacttgaaggctgatgcattttcatggactgagaggatgggactggaaagtggaagaggaattctaagaaggaggacttgggggagctaagacctggaggaggggaactatggactgcatttggagaaggaagcacgatctggtttgattgactctacaataggcagattcttggtaccaagtgggagcttgtcttaaacaaatatgacctatttatttaaaatatacgttggatttttatttaaaataaatagattggaagaggaagagtgagacataagggggagagcaaagcttgtagagatttctgttccctcctatcaggatttcactgggtggactaatatgagaatgtcggtaaaagttctgtgtgtgtgtgtgtgtgtgtataaaataaaaacatttcttgccagtacctccaaaagcaaagatagaggcaaagaaaggaaggcttgaacagtgtagcaaaatacaatcaaagccatggtatgttacatttaaaaatacatgtgtgtgtttgtgtgtgtatgtatatcagctatttattgccacaatagtgcttcatgacaactgcccacaaacctcagtggtgaacaagaagaaacacttatttagcatgaaagtctacagggttcagttgatctcagtttgggttgggcctgctcacatacctaggtcagtgagggggtcctgctaatctcagctggagtcagccatatcttagggggttttctggatgctggctgatctaagatgacctctactgggatgacaggggtgagttgacaaagcttcgcacatcattcatcctccagcagtctcacccaggcatgatttcatgggagtggcagaggagcgagggtgcttttgcagaaaggtacaagagctttttcaggtcttggcttgcatcacatccttatccaatgaaccaaagcaagtgacatggc

SEQ ID NO: 41031 - DNA, 2300 bp, Homo sapien
tctcagctactcgggaggctgtggcagcagaatcgcttgaacccgggaggcggagcttgcagtgagccgagatcccgccactgcactccagcctgggcgacagagcaagactccgtctcaaaaaaaaaaaaaaaaaagaaataaacactgccagatattgggtgtacatttttcttgttcttgtcttttctcatgcacgtgtacttttaagtttatcagagaaactttccttagccctccacctaagccagataacccctgttttctttcactgtaccttggttatgagtagtgggtacaaaacaatggtggtggtagtagagggaaataaacagaataaacctcaggcaatatcgtcaagtattatctgttatttatataaatatctagcttttatatcaaaattatctttttgtaaggctgtatcaatttatattcccaccagctgtgttcttcgtagatttgctatccattggttcccaaatgttgtatactctcattacactgtggaatatttaatgcctttttgttatgaaaaaactgtttttattaattaacatcaaggatatggtgctgacaaatattctctaaaattatggaatgttggaaactctgctgtctgacatcctttccgtgtgaatggaacatcccattcttgtccagagcatctgagccatacaggtcactttgacacaggattttcaatacaggtacaaagctttagatagagttttcagacccaacgtttcacatttgtcgtaattttgagatttccaaggaaagagcctgcttcctactcaggtctgatgttaacctgatgctgcacacagctctgctttgcttcgagtctatcaaacactgctccagttaattcttaccaaaaaatccccccattcccataacccaataatgacacttccgtttgatgagaggcattgaggttcctctggagtgcagtctcccttgctgcagcaagttaataaatctaactttgttgactacaggtttgttcctggtgctctttattggaagactttagcaatcttaaactgctggccccaaatcccaaaacaacgggaaactctactcagtatcttttctttttttcttttttttgagatggagtctggctcttgtcccccaggctggagtgcaatggtgcaatctcggctcgctgtaacctccacctcccgggttcaagcgattctcctgcctcagcctcccaagtagctgggactacaggcgccctccaccatgcccggctaatttttgtatttttagtagagacggggtttcatcatgttggccaggctggtctcgaactcctgacctcgtgatccgcccgcctcggcctcccaaagtgctgggattacaggcgtgagccaccgcgcctggccagtatcttttcttaaagattccttcttatacaagttgaattagacaagatggatcattttggcttttagttcctccaacattccaacctagttagagcggcttttctctgtgcatggaaaattcttcccccagatctcttgcctggctggcccagttcatacctaaggtagccatctgtcctcacactgccgcacccccaccccgtcactccacctcatcatctcatttcattttcctatttttctaatcactctctgagattatcttacttcattatctatttgtttataaattatcccaatgaggatgttaagatcaggagagagggtaccacgacagcgctgacagccgcagctgcccagtgtctagaactgtgcccaacaaacacttgtggaatgagtaagcagacgaggaactagacacttcgtttgccttcgtcccctttaaataccctccaggtggacccagccgcattaaaactctgagaactaggtgaatggcatttggcctcgccactggccggagcgtttgccgttgatccaggcaaccactgttttcccaccagtcgtgtagtcgctctacctggctccgccccccaggacgccgagcctcggccgggcggtaaaatcggcgcttaccctttaagcggcgggacttctggtcacgtcgtccgcggtcgccggaaggggaagtttcgcctcagaaggctgcctcgctggtccgaattcggtggcgccacgtccgcccgtctccgccttctgcatcgcggcttcggcggcttccacctagacacctaacagtcgcggagccggccgcgtcgtgagggggtcggcacggggagtcgggcggtcttgtgcatcttggctacctgtgggtcgaagatgtcggacatcggagactgg

SEQ ID NO: 41032 - DNA, 2300 bp, Homo sapien
tgtacattatttatctgtatatatacagatagatacatataaatagtatgtacctgttattgagtgactaataattcagaaaggaactagatcacaagagactaccaattagtgttgtaaaaactgggagatctaatgagtagaactttagcagctgtgggtacacatctcttcagcctgaccttcaaattgtgccccctaaatcaaaagataagtacaaagtgggagtccagaagatctaacatataaacctctttatcacatatctgagattgaataggatggccacatgggctgagacagcccaaactagcttagctgcagacaggttaagctagagaagttaagaaaatcattcagcagattcatctttgcttccgataaaaaaaggttgtttggttaatggtgtgggatagaaatgttgtgaaataatctgtttcaggttaggcactgtatcttaaatttaagattctaagtttcctaaataataatgcaaacattgatacatgtagtttatctccatctcaaaaccaataaataaaaataagagctgcagttgcttcctctgcaataggtcattacaagttgtctgatctctcagagccaccccttgataacaacataaagtttaaaaacctgcattagtattttttttgagaatttgcttttctgatcaagagtttgaacttttcaaataccacgaccatataatttttttaacatcatttttctgttgtagaacaacatagagactaggaatggaaagatttaaggtttccttgtctgcaaaagtggataatattagtacttacctgtaacaggttgattggtggccccccaaaatatatgtcaacatactaatcccaaaatccgtgactgttaccttacttggaaaaagggtctttgcagatgtaatcaagttaaggattttgagatgaaaagatcatcctgtattcctgtattattcatatggacccaatgacaagtttccttataagagaaaaacagagggagatttgaaacagacagaagaggaaaagatacatccaggaggagaaagacgtgtgaagatggaagcggagaatggagcgatgcgatcacaagcagagaacgccagcaactcccagaaactggaatagacaagtaagggaatcttgcttagagcctgaaaggaggctgcagacactttgatttccgatgtatggcctcaagaacttcccaagaatacatttctgtttttttatgtcaccaagtttgtggtaatttgtgagggcagcctcaggaaattaatgcacaacctcatagagcactaaaaatggagataattagtactacctaacttgtaaatttgctacgaggattaattgagttgatatattcggtatagtagaaaagtgccccatacctagtaagcgctccggaggcactaagtgaatttttatcaaaggaacgctaaagtcgaggcagccagttgttgatattattgcttttctggaccatgattggtggactggacatcataatgctggaaggcctgtcagattacgaaactgaagaaacgaaacaaaaccatgaggatggtgaaaaggtcaggaagaatgaactatttcatctgtaagtttcatttgagcccgaacgttctatgaaaggaacccatcagttctcaatgtatttgtctccttgcttctctgcacttgtttccttgcttctcttagttatttctatacaattccttaatccctaaaagcaatttagaacggaatgcagggaccacaggagaaaatgagttttattgcctctgatgggagcctaaaaccccacgaggctcccaaagggcggaattcccaagccaattcctcgcgtctatgatccacctgcaaaaaactacgattcccagaaggctttgggtccgggggcgggaagactgagctcagaaagaggtggactctaagagaaggtctttggtcgattacattgtccagagagggagtggccgcttgggcggattttgggagggatcagccttccaattggttgttattagaaagggggttggtacggcctgctggtgctggacctaggccgccgcggccggagctcaaatttcccgggccgggagcgctgggcctgccgggaaggcgctgggacggttacccagcgggccgccggcggtcgtgggcaagcttcgccatgcagagcactgacctaggcaacaaggagagcggcaagatatggcaccgcaagccgtccccggccacgcgggacgggtaaaggccgtggcgggagggcgcgggctgtgg

SEQ ID NO: 41033 - DNA, 2300 bp, Homo sapien
cctgtgatcaaccgttgtccttcctggtagagaagggaagagggacccctttgtaaatgtatgcaaatttatgtaaacttttagacaagagcagagagcttttcttttcttttcttttattcttttttttttttttttttttttttttgagacggagtctcaccctgttgcccaggccggggtacagtggtgtgatcggctcactgtgcaacctctgcctcctggtttaagcaattcttctgcctcagcctcccaagtagctgggactacaggtatgtgccaccacgcccagctaattttttgtattttagtagagacagggtttcaccatgttggccaggatggtctcgatctcctgacctcgtgatccgcccgcctaggcctcccaaagtgttgggattagaggcgtgagccaccgcacctggctgagagcttttcttatatctgctttttctcatttacctttagctcaaagtaatccttatgccaaagtgggatgttcgggatggcatattctgccacccttcactaaaaacatttgtggctgagcagttagcagcagagctgggacttaaaaatcagacttgatcataaagcccagtatactgggctccctaaaaatcttcctaattgttcaatccattggtcacttttcagttctcattttactgaaacagtaaatactcttgtcttcccatcctgcctgaaattattttctttggcttcatggtacagcttttgctgaattttctacctctctgatcatttttcccccttattttactgactcttcttccagtgccttcccctttcatgttgtgctccccagacatctttctttggcttacttccttccatatttcaggtactcttttcgataatcacatcaccaccaagcctcaggcttcatctgccatgtaaacactgttgacttagacctacttctgctactactacctactagaaatcttctagattgggctcccaggagccactagcttgcatgtaagtcttgagcccttgaaaagtgattggtccaaattgagatatgaagcacatgtaaaattaaaatacacagtggattttgatgacttaatatgataaaaagtgtaaaatatctcaataatttttaattgattaaatattgaaatactaatgttttagacacatattgagttcataaagtatattagtctgttctcatgctaataaagacatacccgagactgggtaatttataaagaaaaagaggtttaatggactctctgttccatgtagctggggaggcctcacaatcatggcagaacgcaaaggtacttcttacgtagtggtggcaagagagaaatgaagaccaagggaaaggggtttccccgtataaaaccatcagatctcatgagatttattcactaccatgagaacagtgtgggggaaactgcccccgtgattcaattatctcccactgggcccctcccacaacatgtgggaattatgggagccacaattcaagatgagatttgggtggggacagagccaaagcgtatcatatattatcaagattaattttacctgtttcttcttacttttctaatatggctcctagaaaaatttaaattacgtatgtagcccacgttgtatttctttcagacagcatgactctagatgagtttcacaagggccttaaacaacatgtttaaaagcaggtttattatttcctacccccaaacttattcctcttttgcctaagttcaaaagcttaattttttgtaaattaaactccagctaggtgcccagtactctactgagcactcaacatgtattctttcatttagtcatcacaacagccctgtatctattcttatcttcattttacgcaagatcgggtcctgattccctcttcttcactccatgttgaatccataccgaacctctgcttggcttctgaaacctctcctatttatgctcccatatctctggctgagattttctgtagtaactttcttagtgatctcctttattccttgtccctctatccatttgccattgctgccaggatcgtcttcctaaaacacatacctgattgtgattctgctgtgctaacacttacagtggtttcctattctgataacatccaaactccttaatatggcacatagcacccttcataatctatttttggcctaaaatggtagctcatttttctgggtttcattttcttcgtctctacggactccttccacatggaatttgtaattattggaagaatttgtgatactaatgcaatgatctcttaataggttcaa

SEQ ID NO: 41034 - DNA, 2300 bp, Homo sapien
agcttgatcaggcccttgcctgatctgtcagtatctgatgtagttgagttcgtattttttattgtcttattggcattaatcctgagtagattatttttgctaaccagtctgttctctagtgcattatatatgtgtgtgtgttgtacagatgacacacaaaattatattcaaggccactgaaacttttacgagaaaatattggttaatttccgttaataattttgcattaacaaaaggaagcattgtttatgcttatgtgatagaaaaatgaaaattaggagaataaagtgatgacattttcaactttactatcagtttcattctcagttgtccattaaatgaactgaatctgtaataagataggattatatatgcatttgcacctttttactcatataaaaaaatggcttaacacttacttatcctgaaacactttgcccagtattcccaaaggactaacttttttttcttgagatggagtttcactcttgttgcccaggctggagtgcagtggcgcaatctcagctcattgcaacctccaccctccaggttcaagtgattctcatgcctcagcctcttgagtagctgggattacaggcgtctgccaccacacccggctaatttttgtatttttagtagagacggggtttcaccatgttggccagactggtctcaaactcttgacctcaggtgatccacccacctcagcctcccaaagtgctgagattacaggtgtgagccaccgtgcctagccaggactaacttttaaaagcaaactgactaatttgggaagatatatattttaaggctgttgacacatatcatataacatctttaaataatttttactcccagcggcagtgtatgacagtgcctttttttactctatatatagtatatgtagaactatatactaatataaacactgtattaaatactaactactgatagatgtttaaaaaatatcaaatgttggtgaaagtatagggaaaagacactgtcatacactgccacggggagtaataaatacatacaccccattttgtgggagtaatatatatagacaaacaccccattttgtctatgcatgtatgtgctttctttttgaagacagagtcttgctctgtcacccaggctggaatgcagtggtgcaatcttgacttactgcaacctccacttcccaggttcaagggattcttctgcctcagcctcctgagtagctgggactacaggcacacacccggctaatttttttttttttttttttttgagacgaaggctcactccctcacccaggctaaagtgcggtggcggggtcttggctcactgcaacctccacctcccaggttcaaacaattctcctgtctcagcctcccaagtagcagggactacagatgcctgccaccatgcctgagtaatttttttatttttaatagagacgaggtttcaccttgttggtcaggctagtcccaaactcctgacctcaggtgatccacccgccttggcctcccaaagtgctgggattacaggtgtgagtcactgcgcctggcctaatttttgtattttttcgtagagatagggtttcaccatgttggccaggctggtctcgaacttatgtcctcaagtgatccgcctgcttcggcctcccaaaatgctgggattacaggtgtgagccaccacacctgaccaatgtgctttattttaaaagtaaaattgatactcaaaattatatcttgttttcatttaactctttagtaatattaggtgaaattttttaaactgtcatttagaattttgtgacttgcctagtcattatagtgtacctagttttcgtttgaagggttttttttttagttaataataatttatgaaataatcagtattactccttgtcatatattagaaatgtattttccccagcttaagaaaataatattttaataaagaaaaatagactacttgtataattttaaatttaaagtctctatgtgaaccttatgtgaaaactaactttctctattcctccttaggttttctttctaccattaagtaataccatcctcagctgttttaaagataattccatttttgcctgggaatgtgacacacttttttgcaaatatcaattgccagctccacctgaaagctctagtatattatacaaagtgtttgctgtaaccaggtaatgtgcattttaagacactaggaatatttaagaaatttaatttctggtaaaaaattacaaattttcatttagtttttattcagtatctttttgtcatattagaaaaagttacctt

SEQ ID NO: 41035 - DNA, 2300 bp, Homo sapien
agttgacttccagaggagttgcatcaactgcagatgaggggctttgtttcctacaagccaaccaacaggagaactttatagagtgtcacctccaaactgccttttaccatcttttgtatgataagtgacatcagcatttcaagcaatcacatggtggcatcacttaccagccactgccactgggaagagaacctgcacttagacaaggcagcatgggggtttatttgcttaaacttttttattacatttttttttgttttggtttggtttttggtttttggttttgagacggagtctcgctctgtcacccaggctggagagcagtggcatgatctcggctcactgcaagctccgcctcccaggttcacgccattctcctgcctcagcctcccgagtagctgggactataggcgcctgccaccacgcccggctaattttttgtattttttagtagagacggggtttcaccgtgttagccaggatggtcttgatctcctgacctcgtgatccgcccgtgtcggcctcccaaagtgctgggattacagatgtgagccaccatgcccagcctttattacatgttcttaatttttgaaattatgagttaaaatttaaacttttctctccccttaaaagcctagcttccctcctacccctccactacccttgcaactcacaaactctccattctccaaatgttacttaaaatatttgctgaaaacaggcagacagtggggagcctcagtgggagtgacaggtttgtgtgggggtagcagggctgttagctttgattagctatggaaagggtacaggaaggcaaaccctccaccctccttgtttctgatagccagtgtggaggcaaaagttgggaactgtctgtcttagtctgttttgtgctgctgtattggaataccacagactgggtaatttataaacaatgtaagtttatttttcacagttctggaggctgggaagtccaagatctagaggttggcatcttttgaaggcctttgttctctgtcataatatagtagaaggcctcatatgggtgagaaagggagggaggaatgggaggggacaagagggagccgaactcatccttttataccaaacccactcccacaataacagcattaatcttttcatgagggcagagccgtcatgccctaatcacctctcattaggccctatctgccaacactgttgcattgagcaagtttccaatatttgctgttggagagacgcattcaaattatatcattgtctaatcctctctgtcccctgtatatgtcatcagtgggcatgatctgcctgtgggaagggaagattcttagggcacctttccatagtctaccatgataggttccctcctggttctgattagagccagggcataatcaacatgagccataagttgtgattttaaaataggtaatatcaggccaggtgcagtggctcatgcctgtctgtaatcccagcactttcggaggccgaggcaggcagatcacctgacatcaggagttcgagagcagcctggccaacatggtgaaaccccatccctattgaaaatacaaaaattagccgggcctggtgacacatgcctgtaatcccagctactcagcagggtgaggctggagaattgcttgaacccagggggcggaggttgcagtgagtggagatcgtgccactgcactccagcctgggcaacaagagtaaaattccatctcaaaacaataataataataataataataaaataaaatatataatatctcactgagaatagaatttcctctaggtgtccctctcaaaatatatatatttatacacacatacacacatatacacacacacatacatacacaaacgttgcatacacgtaaagacgtgtatatagtaggactttcagacattgactatcacatgtttttaggaatttatattttttctctcttaggttcttggagtactaagtcaagatggtattatgagatttatcaatatgcagacttgtaaacttctctttgagattgggagcctcgatgaaggaattagctcatcagcaattagcccacatggacggtacattgcatctattatggaaaatggaagtctaaacatatattcagttcaggctttaacacaagaaataaataaggtatgtatgatgaagtaatcaacatcagctttttataaacacttatatattatatcatcaagaataaaatctttatgctactatttctaacttacctggaacttatccatttttctggatatattttgttgctcttactcccaaa

SEQ ID NO: 41036 - DNA, 2300 bp, Homo sapien
atacaaaataaatgttttgttaactgaataccactccataattgaaaaaaaaaaaaaaaagttgcaactgttttgttgacattctgaatgcttctaagtaagcacaattttaaaaaatttactgaacttcagctaagcactagcactgctgggatatgccatcgttttggcttttaggtttgtagtctagttgggacttagaagacattttgaaggaaaagtcacatctacatataatttggaacgtatttgtaaaagtcttttttagacactagagtctcttttatgaccagacataaagtcttttggtttaacaaagactctccacacaattatcatttctctgtattttgctatctgtcagttctctctctaggtcctctacccatgcttttgtggtggcatcaaagcagaataaaaatacttaagagcaggcagacggttactgtatgcagtaggatatcctcttgctaaggaaaaacagcgctctcttaatgaagattgtaaggatcaggcctttgggtatatgtgtggtgttttaagttctcagaactaccagtgtcagagacataacaagtactcaggtgctgaaccatatttttccacttaaaattaagagctgggctgggcgcagcggctcacacctgtaatcccagcacttgggatggccaaggtgggtggatcaactgaggtcaggggttcgagaccaaactggccaacatagtgaaaccctgtctctactgaaaatacaaaaaaaaaaaaaatgagctgggcatggtggtaggtgcctctaatcccagctaattgggaggctgagacaagataatcacttgaacccgggaggcagaggttgcaatgagccgagatcgcgccactgcactccagcctgggccacagagtgagactccgtctcacaaaaaaaaaaaaaaaaaattaagagctacagagaatttgaaatattttttaaagctcagtctttgcaagattttatttctgacttcattattaactcaaatttaaataatcaataataagtgaaataatggaactccagaattggaaagttcttataaaccactgtaatctaatattctgctgataaagccttcttttgctattttgagataggagatcttattatcaaaggatgaatctacaactcaatatttaaaattaaaaaaattttaaaattaagttaaacatagtcttattgaacaaaacaaaccgatggtcttatatacggctttgagaacaatctgtgggtcgttctactgattacagagtgcaagtgagtcaaagtcagccttagagttagttgaatatattctactttggactaactgactttcaaagaatgccactgttaccgattggttggttttcaagtcaagtttactgaaacaagttgtcaatgatcagttagatataaaaccagtcctggtggctattcctggttattccttattaccatgcttatagaacaatcagtcttttcctcagaatgaggacatttttattgtcattataatgtttaagggattagggatacagtatatacacatttgtttttatatattgctgatgtaattttgaacattttccttaagttttctaattttgattacatgtgaattttagtagatttgaggagattggcatgctaatgttgattacatttaatgaagggttaaataggggccctttttaaaaagatcatttcgttaatcaggtgatgaacaaagcaggagtcaggagccagaatgccatcaggagtactttgggaagttgtgattgtttgttttaattaacactttttcattgactactgtaaggaaatttgcaaaatttctgtaaacatactatgttaacatgataggattttaaaatcgattgtcatacaatataaagagtttttttttattattcatggacatattgagaacataaagattggatacatttaagaattgcaaagagttttgataacatggaaagatatttaaagatatgttttcttttttttccttcatagtcaattggtgtcaacactggtttgaatattttcctaatcctcctatcaatattcttagcatgatagaaaatgttttggcatttcatgacaaggaactgctgcaacacttcatagatcatgatataacctcccaggtaagaagcataaggtttttagaataacatgccttattttgtaagctaacattggttctggtataaacagtcttttcttgaaggagtataataaaaagcatactacatgttgtatttttaacagtattccattc

SEQ ID NO: 41037 - DNA, 2300 bp, Homo sapien
caagaagccctgggcactaggtacacacattgcagtctgagcatcgctgttagcagacagaacaggagaatatatatatatatacacacacacacacacacacacagagatatgtgtgtgtgtatatatataaacacgtatatgtatatatatttctagaatttgttttctgtatttatattctattcatttataatatatattatatattcagatttattttttatctaagtttatctatctgtattgaaagctgtgagttcaaatctgtgtctccaattcatatctaataagtccatttcagtttcccccttttctctacatgctccctgctctgacaataagaaacctggtttcccttacctttaatctctttatttgctcaatgctcctgtatgtaaccaatctcccacctttccccacctcctccagctagagctctgacaccccttacaggcagctcccctgcccacatggacaccctctttgccctgtttgggctctgactggcccctgtgaggacacaccctcacaccctgtgcaggcattccctcaacccctcagccccctgcacctcctcacctggcctgggctccgacacatgctctgagccaccaagcccattcccaccactgacacccatcttgctctgacccacccagtggctttaggactgaattgttccagaagaaaagagaggggaggtgtggagcagggaagcgtgcacacttttaatgacatggaaaatacacttctgagtaatgctaagcaaaaaagaaggcaaaatatataaaattgcacagagagtacaatatcaatgatgtagaaagctcagaaacattggcactctctccagctaaagagccaagcagaaactggacaaggttggttcactgaccacccagtgcagcgccctaagatctcacgtcctttgaggttaccgctgtgccttatttccttcatccatgaaacggaatgctggtagcacttactcacagggttgtcgtgaggctgaagtgagttaacacatgaaaagcacataggacaccaccgcacacacatgggacgtgccccacaaatgttactatagggatgaggaaagtgaagttcagtaaggtcctctatgttaccttcctgaggtcccctatcataggcacagtctggacacagttgtgcccaactcaaagttcatgtaagccttttgctgttgcactgctcaaggaattagaagcagtgggagatggggtaatacaccagtaaccaggacaagactccctgagacatattctacaagcgccttgcggaccagaagaggagtagttacagtcacttggtaattcaccacgagggcttcccagcataggtcggattcaggatatagaccttgaacgctgggaaagatttgaataagttatgatggtggaaggaaagactggagaacagactgaacaatggcaggggactgggatccccacatcagtcaccgggtgagggcccgtcacctgtgagtgtgttcctcagcctcagcgctgcaggtgttttgggccaggcagctctgtattgtgggggactttccagtgcgttgttggttgtagcaacacccctggcttattctcactaatgccagttagcaacccaggcccccagaatgacaaccaaaaatggctacagatgttgcctgatgtcccctggatgggggtccaaaatcatctccagctgagtgccactgtcctagataaatggaattttcaggaagccccaatgccactcatttattaacaggagcccggcttctcatcctttctcttattgttggatgacctcatgaaaaggagacaaccacacttcagatggccacaggaaggaagaagggaagtggagtcctccataatccacagtgcctgtcactgagggctccttgataaggatttttcaaggtatgaacgtgcagttcaacagctggccagacttcctggttcagaagtgtaatcctaggtggggaagtttgttattacagccggcaagaacgaggacacttcacagggctgggctgccgaggaaagatgagagactaaactgatgagaatcaccaaccagtttgatgacttggagaacagtcacttcctctttctgggctacagttttctcatcagtaactgaagagcttgcagtaccttcaacattccttcaggtgaggacttctctttgatcactgctatggtttgaatgtgtctcctaaagttcatgtgttggaagcttgatccccagtgcaaaagtgttgggaggtggggcctaatgag

SEQ ID NO: 41038 - DNA, 2300 bp, Homo sapien
cctcatgctcaggagaaaacgctcaccttcccctcctggctccccgtgctctacacgttcagagaaacttctctagtaatgaactcaggaactggtcactgagagtatagtctctatggacagcttcggagccatggagtgaagccgagcaaatccatggaccactgccctgcccccggtctatctcgctagactagggacaggacttgggtgatgcaggaacagagaatggcctgaggaggacacagaccagaccagagaggaaggaagatgagaggaggatgcgggaaaggggcttacatcaatctccagaagcaagagttggcaaaaggcagaagggaaaaggcatagatccaaaaaggcaatgggagagagggtttattggatttgtcctctttgacctccagggattgtagggaggagataaaatggaataaagagaggattgctcaagattgtgaattggattccttcgatgttccaaaaaaaaaaagagaaagagagagattccttttattttatattattttattttattattttattttttgagacagagtttcgctctgttgcccaggctacagtgcaatggtgcgatcttggctcattgcagcctctgcctcctgggttgaagcaattctcctgcctgatctcctgccccagtagctgggactacaggcgcataccaccaggcccggctaatttttgtatttttagtagcgacagtgtttcatcatgttggccaggctggtcttgaactcctgacctcaagtgatccacctgccttggcctcccaaagtgctgggattacaggtgtgagtcactgcacccagccgcgccacactttaaaaaatactgtggtactgctgggttcaggcacaagggccacagctacagtagggttacaggtgttcatagctgtttttctccaaagaatggctctgccactgacagacatcaggttcttaccatatcctggctctttgaagaccacacaatcctgatttcttggtgtcgtccctgagcagatagcgtcagggccttgctttcatttctttactttcatttattcgctcctcaccactcccacagcactctgcctgtagcacctgacactgcctgaaggctttctctgggttcagggctgtgcttggtgaactggccccgggagcagccctcagccaatgataactaggactccttagataaactccgcagctttctcaccctttgggcaggaaaaccttgagatatatttggcaccatcacccagaggttcccacaggctggaaccccctgatgtccccagagatgtccatgaacccagatgtccacagcagtggcctgctcctcaacttcacctggcctggcttccttcccttcccgtttctcttccccacttctctctgtacttctcagaatgatcttccgaccaaccacttgtactgaaatcctagtctcagagcctgtttccagcagagcccacccaaagagagtcagggttctaggcagtccatcccattgccagatcacgatctgatctggaaagaacacgtggtcactcccctcagagttcatagatttcaaacccacgtgctgctcctctcactccagcgccaacactgactggtcccctgggctcgtgggccgccggcagcctcggctcgttctccagacagtgttccaagaagccacttccagcgaggaagcgttggcctgagaactggaacctctgcggtctctgcaaacacgacaatgacaaacacttgagagggcatgggagaaaggagctccttcatagggcagggaggggtgggcacttgggtgtgaccaaggagaggaggcgcgcctggtcaacagctctccctggcccgtgtccagctccctcctcacacagagaggggggcgcatctcagggatggcatctttcccccccacagggaaattcttatctttgaaacagcatgggaatcgaggcacccaggaggggagcagaggcaggcaggcctccttcaggcccatcctccagctgggctggtggtgccagggaggctccctgcttggtaacaaaggcctgagggagagttgcgaaacccagcaggaaagccggctcaccttcgcctccccctgcggctgggaggagaggaaatatcccatggctgactgtgccaaggaggtgtctgagccagccctcccggcccgagggcagggcaggtggccctgagagataagccaatcccgcagctgcagatgaggagttctgagaagcattgctcaggacagcggtaaatcacttcttg

SEQ ID NO: 41039 - DNA, 2300 bp, Homo sapien
ccaggctggtcttgaactcctgacctcaagtgatccacctgccttggcctcccaaagtgctgggattacaggtgtgagtcactgcacccagccgcgccacactttaaaaaatactgtggtactgctgggttcaggcacaagggccacagctacagtagggttacaggtgttcatagctgtttttctccaaagaatggctctgccactgacagacatcaggttcttaccatatcctggctctttgaagaccacacaatcctgatttcttggtgtcgtccctgagcagatagcgtcagggccttgctttcatttctttactttcatttattcgctcctcaccactcccacagcactctgcctgtagcacctgacactgcctgaaggctttctctgggttcagggctgtgcttggtgaactggccccgggagcagccctcagccaatgataactaggactccttagataaactccgcagctttctcaccctttgggcaggaaaaccttgagatatatttggcaccatcacccagaggttcccacaggctggaaccccctgatgtccccagagatgtccatgaacccagatgtccacagcagtggcctgctcctcaacttcacctggcctggcttccttcccttcccgtttctcttccccacttctctctgtacttctcagaatgatcttccgaccaaccacttgtactgaaatcctagtctcagagcctgtttccagcagagcccacccaaagagagtcagggttctaggcagtccatcccattgccagatcacgatctgatctggaaagaacacgtggtcactcccctcagagttcatagatttcaaacccacgtgctgctcctctcactccagcgccaacactgactggtcccctgggctcgtgggccgccggcagcctcggctcgttctccagacagtgttccaagaagccacttccagcgaggaagcgttggcctgagaactggaacctctgcggtctctgcaaacacgacaatgacaaacacttgagagggcatgggagaaaggagctccttcatagggcagggaggggtgggcacttgggtgtgaccaaggagaggaggcgcgcctggtcaacagctctccctggcccgtgtccagctccctcctcacacagagaggggggcgcatctcagggatggcatctttcccccccacagggaaattcttatctttgaaacagcatgggaatcgaggcacccaggaggggagcagaggcaggcaggcctccttcaggcccatcctccagctgggctggtggtgccagggaggctccctgcttggtaacaaaggcctgagggagagttgcgaaacccagcaggaaagccggctcaccttcgcctccccctgcggctgggaggagaggaaatatcccatggctgactgtgccaaggaggtgtctgagccagccctcccggcccgagggcagggcaggtggccctgagagataagccaatcccgcagctgcagatgaggagttctgagaagcattgctcaggacagcggtaaatcacttcttggaggtgccctgcacgccggtcctgggagcaggcggcctcccgggggtgcgggagccccactcctccgtggtgtgttccatttgcttcccacatctggaggagctgacgtgccagcctcccccagcaccacccagggacgggaggcatgagccggtcaaggcacctgggcaaaatccggaagcgtctggaagatgtcaagagccagtgggtccggccagccagggctgactttagtgacaacgagagtgcccggctggccacggacgccctcttggatgggggttctgaagcctactggcgggtgctcagccaggaaggcgaggtggacttcttgtcctcggtggaggcccagtacatccaggcccaggccagggagcccccgtgtcccccagacaccctgggaggggcggaagcaggccctaagggactggactccagctccctacagtccggcacctacttccctgtggcctcagagggcagcgagccggccctactgcacagctgggcctcagctgagaagccctacctgaaggaaaaatccagcgccactgtgtacttccagaccgtcaagcacaacaacatcagagacctcgtccgccgctgcatcacccggactagccaggtaccgatggcaaagcccctgtctccgtggccaagtagcagggaggatcgggggctgatagagcagggaggggggtgcattttgctcccagggcgagagtccagataattggggctt

SEQ ID NO: 41040 - DNA, 2300 bp, Homo sapien
ctgcacctggccatgctttagcttttatacttttgatcacagcccatgagcagagaggcgtttcctttcttttttttttatttgagacagagtctggctctgtcgtccaggctggagtgcagtggcgcgatctcggctcactgcaagctcgcctcctgggttcaagccattctcctgcctcagcctcccaagtagctgggactacaggcgcccgccaccatgcccggctaatttttttgtattttagtagagacggggtttcaccatgttagccaggatggtcttgatctcctgacctcgtgatccacccgcctcggcctcccaaagtggtgggattacaggcgtgagccactgcgcccggccaatacattttatttctattgttgtttggcccataagtacgtagcattcacttaatcatctttggctcatgaccaaactctactcattggtctattcatcacccattttcacttatttaactatttaattggtgattttaagtaatatagtaagcacttatgaacccactacctaaaagaaaaggtcacatcttttttaaaaattttttctcttaaaaaaatttttttgggggcagagatgggatcttgctatgttgcccagactggtcttgaactcctggcttcaagtgatcctccctgcttggcctcccgaagtgctgagattacaggcatgagccaccacacctggccaaggtagcatcttgaggatagtccacatctagccatagggtcccttcttgcatccctttcccaggacccctgaactagaactcagcacatcatgaatcctgtgatcataacgcccttgctttcctttttccataattatagaatttttttttgtcctttttttttttttttttgagttggagtttcactcttgttgcccaggctggagtgcagtggcgtgatctcggctcactgcaacctctgcctcctgggttcaagcgcttcttctgcctcagcctcctaagtaactggggttacaacaatgctggctaattttttgttttgtttttttaaccatatgttgcctctttggtgaaacgcctgcttatgtctcccacccacttttctgctgtgctcttgtgctcttgtgagtctcagcactaatctctgtcaggggtgtgcatcttgaatagctgcttccagtttgtaactgacttttcacttcctttaagatgtctttctttttttcttttcttttcttacttttttttttttttttttttttgagacagatctcattctgtcccccaggctggagtgcagtggcttgatctcagctcactgcaacctctgcctcctggattcaagtgatcctcccacctcagcctcccgagtagttgggactacaggcacgtgccaccacactcggctaatttttgtatttttagtagagacaggattttaccatgttggccaggctggtcttgaactcttgacctcaggtgatccaccttcctctgcctcccaaggtgctgggattacagatgtgaaccaccgcacccagccaagatgtctttcaatgaaccaacattcttaattgtaatatagtcagattaagcaaacttttatggtcactgcttttttttttttaatgtgtgtatgttttccttttaaagaaatctactgagagttttagtttattttcaacattcaaattcttttcaactattgcaagtcgatttgtaaacaaatgcgtgcatggtgggtagtaatcccattttacatacggggagttattttttccagttcctcctttccccactgctctgtcatgccctgtggtgtgtgaatatgtgcctgagctttctgttctgtgtgtcaatttgtccctcctccaatgacacattgtcttgattactgcagtttcatgacaagttctgaactctggtagggcaagtcgtccctgcttgtttttctttttcggatttatcttggctattcttggaaaagcacatttaacatcatgacccacaagtacataaccacacaataatttccagaacatcctttacctcagcgtggtctgattatttttattctattccgtgtcatttaaaaaaaatgctagacatcatctactaaattgatttcacaccccgctaatggatggtgaggcacagtttgaaaaactgcattctttcaggacactgaatggtcagaacccaatgtgcttttattcattcattcaacaaatatttgtggccatgtataatgtatcaggtgctgtatttactgtacttcatgccaggaaagcaacagagaagaaaa

SEQ ID NO: 41041 - DNA, 2300 bp, Homo sapien
ctaagaagacataagaatgtatcttatgttttcaactagatactaggttccttataagtaatagtatgttttgagcatctttgtattcttcaccatgctcgataaatctgttggttgggtggaagagtagtttcctgtgtagacaatgcatgtgatataccagtggagctttttaaaaagatggaaaatgtctgggccctcgttaggattgtaattaggattataatgtacattttgttttgtgcttatttttattttttaaaaggtctcattctgttactcaggctaggctgcagtgcataatcttagctcactgcagcctgaaattcctaggctcaagtggtcctttcacctcagcctcccaagttcgtaggattacaggcacccaccaccatgtccagctaattttaaaattttttgtagaggcagggtcttgctatgttgcccagtctggtcccaaactcctggcctcaaatgatcgtcccgccttggcctccctaagtgctaggattatagatgtgagccaccatgcctggcctttattttgtgcttttaattttagttgacttgtaataacatagccctgtatccttaaatattctatgatcacatgcttttttttcctgtttgtaattcttttatttgaattaggatccaaataaggtctaaatactatatgtggcccttttgtctcatgtcttttttattctataacaactgctcttctccctctttcttttttactctgataaaatatgtaacttaaatttgccatcttaatcattgttaaatgtacaattcaatggtattaagtacgtatacagtgttgtgccgccatgaccattatttccaaaattttttcatcaccccaaacagaaactctacccattaagcaataactccctattttcttctctctctacccactagaacctctaatctactatttttctctgtgaatttatctattctagatatttcaaataagtggaatcatgccatatgtgtccttttgtgtctgctttatttcacttagcataatgttttcaaggtttatccatatttagcatttatcaaaacttcataccttctatggctaaataatattcatatatatgtacatatctcattttgtttatctactcatcttttgatggatacttgagttgtttctaccttttggatattgtgaataatgctgctatgaacattagcatataagtatgtttaagtctccttttttgtttgttttttttgtttgagacggagtcttgctctgtcacccaggcaggagtacagtggcactatctcggctcactgcagcctctgccttccaggttcaagcaattctcctgtctcagcctcccaagtaggtgggactacaggcgtgtgccaccatgcccagctaatttttatgtttttagtagagaagggctttcaccatattggccaggctggtctcgaactcctgatctcaagtgatctgcctgcctcggcctcccaaagtgctgggattacaggcatgagccactgcacccggctaagtctctgtttttaattcttttgggtatatacctaggagtagaattactgggtcatatattagctctgtttaacttttttaggaactaccaaactgtacattttattttctatgttctgatatttacctaacattatgacatgggcatgaccctatatcctaaatattatttgagtacataatttttaatgactggatagtcaatttttggacaaactataatttacttagttccctgtgttgaacatttaacaaatactcagtacctattttaataaatccttgcaagaaaatcaatatgtgcctttgtaccttttggaacagattattagaaatagaatcgctggatttaaatatatgagcatttttaaagacttaaagcacatttccaaattatcatttagaaaggttagttcaatttatatatcctctagcaatatgtgaaagcattgttttttctaccctgatcctgactattagattgaaccatgtgaaatcaatcattttgacctctgttttatataatttaacttaataatattactttaaaaattggtagcttggtagataaaaatgtaatgtttttagcattaatgtttatttactattaagatgaacaattttttcatgtgttattggccatttgtatcatgtcaaatgcctagtcttgcttttgcttcattattctttctgtttttcatagcaattttaagagttctccctatattagacttaagtatctttctatagttactat

SEQ ID NO: 41042 - DNA, 2300 bp, Homo sapien
ccgccccccaagttcacgggattctcctgcctcagcctcccaagtagctgggattacaggcatgcaccaccacacactgctaattttgtatttttagtagagatggggtttctccatgttggccaggctggtctcgaactcccgacctcaggtgatccaccagccttggcctcccaaagtgctgggattacaggcgtgagccaccactcccggccagaaaaatgttcttaagtggatcttgatgaattcattcatcagtaactaatgcctggaggctgttcagctggagcctcccacctgaggctgctggataaatgagctggttctagattttggcaataattagcagagagatggattctgaaacctgggggagtggattaggtgagtttgtggaggaaaaagttgggttgaagaaagaacgctgaacctggtcaacatgaaagaacccctctctactgaaaatacaaaaaagtagcagtgtgtggtggcccgcgggaggctgaggtgggaggatggcttgagccaaggaggttgaggacgcagtgagccgaaattgcgcctctgcaccccagcctgggcgacagagcgagaccctgtctcagaaataaataaacagataaaattttaaaaaagaaacctggaagacagataaatggtggaagagaaactggtgagagtgaagaggaacaggaaaaaaatcggggaaaacctttatgtttatttcctactgtgtaatatggcacaatattgtgctgtacagtattggccagcattttgtcaacaatctttactttctagagtcaagaaatatcttaaaagtataagaattgtagtaaatgttagtcttagaattttgagatttggtgttctccaggtcgaatgaatgctccctgatctagcctcccacggtatatttctgtgtcttttctttcataaatgcgtgaatgactccggtctttgttattggtggtagtgtctcttgtccggaagcacggagagtacgcattcatttctgtatttcccaagtttcagccacataatgaccgaaacttaacaagttacttaacctctccaaactccaatatcttcaaaataggatttgcaaaatgggaatcactttggctttcataaggtggttgttagccgaaaagaaaaaatgtgcttaacacagtgacgggaatgcacagtggttgacaattggtacttgcaccgggcttagtggctcacgcctataatcccagcactttgggagaacgaggtgggcggatcgcttgagatcaggttcgagaccagcctgggcaacgtagggaaacccagtctccacaaaaaatacacaagttagacggtcatggtggcgcgcgcctgtagccccagctacttgggggactgaggcgggatgataggttgagtctgggagttcgaggctgcagtgagccatgatctcaccactgcactccaacctgggcgacagagcgagaccctgtctcgaaattattttatttattttattttattttattttttattttgagacgaagtttcactcttgttgcctaggctggagtgcaatgatgcgatcttggctcaccgcaacctccgcctcccgggttcaagcgattctcctgcctcagcctaccgagtagctgggattacaggcgcgcgccactacggccggctaatttttgtattttcagtacagacctggttactcaatgttggtcaggctggtctcgaactcccgacctcaagtgatccgcccaccttggcctcccaaagtgctgggattacaggcttgagccaccgcgcccggcctcttattttaatttttaaaaaggtacctgcgagttttaaacagctactctggggccagcgtgctttttgatgcgtgcaggtaaggatcattctgtccatctcctgacacagagaagtcaaaacctccgtcctggggttcggtcagttagtgggtcagataatcatctcagctcaaccactactcccaaccagcagcggccacgtccccgcgtcgccctcaaagactacaagtcccagcgtgccgcgctctgggccgtggaagccccgccttttccggcgggccccgcttcctcgttgcccccgccgcgggcgcgagatggattccgggtgctggttgttcggcggcgagttcgaggactcggtgttcgaggagaggccggagcggcggtcaggaccgcccgcgtcctactgcgccaagctctgcgagccgcaggtgagaagctggggcctcttcgccttatcccgggccccaggcctcgccctcc

SEQ ID NO: 41043 - DNA, 2300 bp, Homo sapien
gctctttaatttttggaattcactcatactaaattaagaaaaatactttgaattagatagaaatgttctaaagtaatcccagtatcaggaacttaaataacatcaggcaactaggattttcattcaaaagcactgatgagctcatttttgctcctctggtatcctggtgcctttacatgtcttggcagctcttctcaagagactcattcggtaaaatatcttgcaattactgtgtgattttaagaatggattgaagtaggttaccagattcctaaagtattaataattcattttggaaaataaccttccctctttggcagctgtttcctatcttctcttctagtccacatcctgtagattgatggctaacgagtggcggaacaaggagataccaggaaatgaaactgtagagtcccaggctacagagataataagatgctccactgggcctaccaggaaaatgctcttttgcttttcatgaaaatagtgtacttattcagcctaagttttaacctaacctagaggtattttactaaaggactggtgtatttacattatttcttgatgtgagaagtttcttcataaacttgtatgtaatagtagcaggaataaaaaaataaggttaattgggaaaatactcttccttaatatttattcattatagtttacagagaatagtgcttaaagaatacaacaaaaggccggttagggatcatgcctgtaatcccagcactttgggaggccaaggcgggcagatcacttgagctcaggagatagagaccatcctggccaacatggtgaaaccctgtctctactaaaaatacaaaaattagttgggtgtggtggcgtgtgcctgtaatcccagctactcgggaggctgaggcaggagaatcgcttgaaccagggagtcggagattgcagtgattcgatattgcgccactgcactccagctgggcgacacagtgagactccatctcaaaaaaaaaagaatacaaccaaaatgctttaacccttcaaaagtgttatttatgactgttctagtaagaaaagcaattgtagctttattaaacttttctgatgggtttaactgatctagattatatacaacaacatatttggacagtaattgaattttcagagaattattttctgtttatttgattgcatgatgttaatacttcacagtgcactgattgtaaagccatttggtagtagctttcaggcaaaaacgacatggctaaacaccagtcattttgttagataaccccatgtttgtagatcaagtactactagtttgtttaacttgttttggcttgtgttgtcagcattaataatcctctccattctgattaacataataaattaggatacaaatatcactaggtttatgtactaacacataaacatatacaactactcccatttcttagtttaactaaattgtcttcataacctttgtatacttatttatttatttatttatttagagtcagagtttcgctcttgttgcccagactggggtgcaatggcgcaatctcggctcactgcaacctctgcctccccggttcaagcgattctcctgcctcagcttcccgagtagctgggattacaggcatgcgccaccacgcccagctaattttgtatttttagtagagacggggtttctccttgttggtcagactggtctcaaactcccaacctcaggtgatccgccggccttggcctcccgaagtgctgggattacaggtgtgagccaccgcgcccggccggtatactcattttaaagaactcccaatttctgcatctcaattttcacactagagacggcatatattcacgttttgaaattttattcaaaatggtctaatagttatttagttgttctatatgatataaatagagtttttttaatgtgtagtttttgtgtttactaccaatattaggattggtatttaaatggttcttttaaagttttgatgagggaataaactttttttttcaaaattacatttatttattaaaagctaaggcattaaattgtaaaaatttcctgactaaggctaaattatatctagaataataaaatatgacttttttgtaggagaagacagactgctgctttggacctgttggtaatgatggcctgagctaaacatctaactagaagggatacccttccatttcaaagaacagaatgctaaggaagctgtggcaagtatgtgtttcattgttttggtatggtaaaactcagatactgaatgtactcactttagatcccatgatactatatttgtctaaag

SEQ ID NO: 41044 - DNA, 2300 bp, Homo sapien
cactccagcctgggcaacagagcgagactccgtctcaaaaacaacaacaacaacaacaacaaaagaaaacttgtcattaactgtgtagacaaaagaatgaatttctctatttgaagcatttccagacctcttcctcggtctaaagaggttcccagcgagggcagtactgcccctcaggggcatactgaaattttgccgggacagtttttgttttgcattctattggtggcagagtatttacattgtgaaaactctgttattttaaaatttttcttgatattagtacatacagtattttattatgaactactttctcctttttcacctttattagaacattacattggtttcttgaaattatttgtagagatagtttgcattaggaatttaactccagaagagtaaagcagtgttatattttttgttgtaaatacagggcattgaatgtggcagggttgaatacctttgcttataaaattaagccttatcctacacaagttttaggattccaggatgaaacctacaaataaaaagaatattgtagaacactgatttcaacgatcagattccacggccaggcgcggtggctcactcctgtaatcccaatactttgggaggccgaggctggcggatcacttgagttcaggggttcaagaccagcctggccaacatggcgaaaccctgtctctaccaaaaatacaaaaattaccccggcgttaggtgacgggcccctgtaatcccaactactcgggaggctgaggcaggagaatcgcttgaacccgggaggcagaggttgcagtgagcagagatcgcgccatttcacttcagcctaagcgacaacgcgagactccgtctcaaaaaaaaaaaaaaaatcagacttccacttgaagcaattgcatcttttaggattaatgtggctcagcggagctctgctgtgcttttaggattactgtggctcagcggagctctgcacaaagggtccgcgactgggatgggggtggggagtgaacgtcaaggggcccaggagcgctcgagcgtccaaggcccggcgtgtggagcagctggagggtgagtcgccgctctccgctttggttctgttcctccacgttctgaccgcggtgcgggggaaagggaaagtgagtagggaggggcggagacgccgggcagtgttcccgaaacccctggccctcgctggccccgctgcggggctggttccctgaaagccgacgggatgtgaagccctcgactcggacagaagcctctggaagagcgagtggcggttcgcagggaggagggcggctgaggggcagagggcggctccgccttgcccggcggttctgagtgcagctgaactgaactttcggtgtcagcgggtggagctgcggcccgcggaggagcggggtccgaagcgaggagaggtggagctgccgctgacaaggggcgcggcgacttctgtcagggcgctgggctcccggccggactcgcagcagccccccgaggggcggggcctgggtcgtgtcgccccaggggatgggcgtgtgatgacaaggggcgtttcagtagaagccagcatgcttacctctcacgatccagcagtgacattaggaaggcggagcgcaaggaaggcggggctgccttctgtgctgacccgagagaagaccaggcttcagtccacagcgggcggagcggtcgcaggcaaagggcggggccatttcgagccctgggaaggcggggcgtctcctgacagggggcggagcttccgcagtctggggcggggcttctgttgacaggggggcggggcgcctccctacctcccgcggtgcgccaatccccggactaggggccggggtcggaccccagtggagtagcagggtctgggcgtggagagctcggcgccgcacggggtgggggcgcgcggaggacgcgcgcgcgggagggccccgccttggccggctctctcccttccccctccgcccccggacggccgctggggcgcgcgcctctcctcgcacccccaccctgagtccccacactccgcggggccaccgagctgctgaggcccctttgcgggcccgccgagcggttccgggtttagggttcacaggtcagagttgactccctgaaaagtgcagccggtttgaaatgcaagatggcggcggcgtggcgctgagaggcgcggcggcccctgcaggtagtggcgcgagccggctccgcgaccagcgggcccggagactctgggctgcgggtgggaactggagcgcagagtccgcggccggcacgggaaaggcgagtagcgcggg

SEQ ID NO: 41045 - DNA, 2300 bp, Homo sapien
tatttgtaaaagaatctcttgaaaagaatttggtaatgctttacctgggatatttgaaggaaatttactccatggattgcccttaatttaacttattgtaagtttggggtgcatttttacatttacttattaattcatatctacacaaatatttttgattctttgaaaaaatttaattgaagtatgctgacttggtaactgaagcaataaagatttgctttgcaatccaaaagttactaatgtacaattttttggttttatagatatttcttgtcctctgctagaaagtgacttggcttacagtgatgatgatgttccatcagtttatgaaaatggactttctcagaaatcttctcataaggcaaaagacaattttaattttcttcatttgaataggtatatttttcttgcaaatcaatgttttttgcatgtgtaaattttctaaaaataaatgagatgtggttgaaaaaataaaaagtgctaaccaatctgctttttatttaaattaaactaccagaaattttttgttgttacagttgtcacaacagtagaaattacagtctataaaaatattcctaaaaacctttgggggtcagtttccagaaactatgtgaaccatgttatgattggttggccttattggcaagactttttacttatgaaagtttatagttgacaatttagggggaaaatttaaactgttttttctaaaacatagcttattaatcatttctctttcagaaatgcttgttaccaacctatgtcttttcgaccaagaatattgatagtaggagaaccaggatttgggcaaggttctcacttggcaccagctgtcattcatgctttggaaaagtttactgtatatacattagacattcctgttctttttggagttagtactacatcccctgaagaaacatgtgcccaggtaatttgttggtgcccaagtataagacaaaacaggctttcagaggcaaaagctaaaattgccccatttttttgtattgtgtttttttgtctttctgatttgtaactttaggtttacaaaacagagttatgcatgattgcttagtcattaaagagaatgactttaaatcccacattcacccttaatatctttgtgaccttagtaaagttgttagatctctctaattttccccttttggaaaatggagataatactacttacctcacatggctgttgtgagaattaaatgagtaaagtacttaaaatggtgactgctccttagtaagtactcagatattctgcagtttctgtttttggtatttgtatattaacttttttttgtttgtttttggttttggtttttttgagacggagtcttactgtgtcaccaggctggagtgcagtggcacgatcctggctccctgcaacctccgccttccgggttcaagcaattctcctgccttagcctcccgagtagctgggactacaggtgcaatgcatgccgccacacccagctaatttttttttttttttttttttgtattttaatagagacggggtttcaccatgttgcccaggatggtctcaaactcctgggctcaggcagtccacccgccttggcctcccaaagtgcgtggattataggcatgagccaccgcgcctggctatattaacatttttaaaacataaaaatattttatatttgtagttttgtttacttttgattaccacaatagaaaaatcttctagatttctccagctgttttctagttgcttgaagaaattatctttttccaaaaaaatgaaacttttaatccacatttaaaaataaggttgtgggattttggagaagcattttaaaaacttgaggactttatatgttactcctgggaggttaaacattgtttcagactaatagaactagcattattaacgtgctgactctaactgaatttgttttgttctctctctactaggtgattcgtgaagctaagagaacagcaccaagtatagtgtatgttcctcatatccacgtgtggtgggaaatagttggaccgacacttaaagccacatttaccacattattacagaatattccttcatttgctccagttttactacttgcaacttctgacaaaccccattccgctttgccagaagaggtaatttatgtggggcggtatcattatactttcaaaaagagttgtttctaccacaataatcataacttattgaaaaaattcaaatgctgtagaagtgaataaaaggataagttttcttatcaaatataccattggtaactatttggtatatgtgctcattgggcaagatg

SEQ ID NO: 41046 - DNA, 2300 bp, Homo sapien
acaggctagattctatagatcctgctttacgaaggcctggtcgctttgatagagaattcctctttagcctgcctgataaagaggtaagaatttaatgtcactcaaattttgacaaaatatattgctgtttattaataataagtcttggtatagtaaaaatttggagattcttgagttttgtatcatggtcttgtcaaatgatagtaaacaactcaaatggggacaaatttttattcttttctttaaatataataatgccttcccaaaattactcttaaaattatttcaatttgagtgtagcctttggatgttctaagtgttgcttcagaacatatggcttaatgagtaatcaatccttagccagtttgttagccttgtctttttcatgaatatcatcatataatcctaccgagtttttttaagtctacttaatcttctgggaaccaaagaggaaaatatgtcaagagctgtctgtactcttaaaaacagctcttaatatgcaccagaatgaatagctactttagtagttacttttctcttatttgtgtttatgacgaatataactttagtgctataaatgcaaatatgtttaataatgagacttaagttcattaaactcttaaaagtacatcctttttcttattttcactttcatattttgcttatattgagtttttttggttggttgtttatgataaagtcttgctctgtcacccaggctggggtgcagtggcacaatctcagctcactgcaacttccgtccccgggattcaagcaattctcgtgcctcagactcccaagtagctgggattacaggcacatgctaccacgcccagctaatctttgtatttttagtagagagtggttttcaccatgttggccaggctggtcttgaacttccaacctcaagtgatccacctgcctcggcctcccaaagtgctgggattacaggtgtgagccaccgcacccggccagtattaagtactgatcactttaaaattttagataatcaaaagtattttaatcaaaattaatgtaatctgaatagcatttattattatagttgtaaaaaattaaattgtttttattcataggctcgaaaagagattctaaagattcacaccagggattggaatcccaaaccactggacacatttttagaagagctagcagaaaactgtgttggtaaacattgttttaagcagttaaaataaatactacatttatttcaaatatgaaacaagttatattaggttggtgcaaaagtaattgtggtttttgcctgtaaaagtaatggcaaaaaccacagtttcttttgcaccagactaataaagaaatacaaggttatatttgtttcttatctcttatttgtggcattttcttctcatgaagtcttggtattaaatagagatatttgacaaattggccatcaggggcagagtagataataatataattgtacaaaatacaatatattattatatcataataagataatagctattctttactgaccattttgtagtcatccttttaagcattttacatatattatttcatgtaattttcacatcattcctgtgatgtaggtagcagtatctctacagatgaagaaatggctggagagcattatgtgaatcttctaaggtcatacagctagtaaattacaaactggaatgtgaatctagtctgtgtgattttaaaactcttgcttttgacctctgtgctatacttagtgcttgtgtattgcactcttaaaagttgattgattgttgatggccattactaccctataagtttactgggtaaaagagattttggtcttattactcttaaatatttgctaactatattccgaggctgatttttaattttttttttaaccatggtcatgctaatagagttttgtgtttctttgtttggtcggctggttcttttcttcccctggttgctttggataggatactgtggagcagatattaaatcaatatgtgctgaagctgctttatgtgctttacgacgacgctacccacagatctataccactagtgagaaactgcagttggatctctcttcaattaatatctcagctaaggatttcgaggtagctatgcaaaagatgataccagcctcccaaagagctgtgacatcacctgggcaggcactgtccaccgttgtgaaaccactcctgcaaaacactgttgacaagattttagaagccctgcagagagtatttccacatgcagaattcagaacaaataaaacattagactcaggtataaaacttgattgaccattta

SEQ ID NO: 41047 - DNA, 2300 bp, Homo sapien
agaacaataatctgtcttcctggggacggtagctcacgcctgtaatcctagaactttgggaggccaaggcaggtggatcacctgaggtcagtagttcgagaccagcctggccagcatggtaagaccccatctctactaaaaatacaaaaattagctgggcatggtggtgcacgcctgtaataccagctactctggaggcttaggcaggacaatcgcttgaacccgggaggcagaggttgcagttagctgagatcatgccactgcactccagcctgggcaacagagcaagattctgtctcaaaaaaaaaaaaaaaaaaaaaagaacaagaacctctctcaaaaaaaaagcaggactcccagttaaatgcgaagttcagataaacaacaaatactttttatatgtccccagacattgcattcttcattcagcagccacgcagattatttttaaagtcggaataagtcaaacctctgttcaaaaccctgagatgtcttttcatctcagggtttggatgggaatttgggggctataataaaagccctcaaaagtttcaaactaagacccagagtcccgtaggacctgctcccagtggctctgttctcattggcctcgccactctccccttcctgcttcccgcctctctcttcttccagaaccatctaacctttaggcctttgtcagacttctcagccagaccttccctaatcaccctattttaaattgcactcttccctcccccttccctactttatatttctctgtaatgcttgccactttaaaacttttacatttagtttattgtctttcaccttccactagagtttaagttccattagggcatttttgttctttttattcactgctgcatccccagtgcttagaataatgcctggtacataatagaggctcaatatgtatttaacaaatattaaattaatgaactgtagttatccaaatcaataaatagctttcgtttatttcgctaagagccctcggacattctgatcattcagcgtgttacctatttcaaagtagtcaagtaactgccatcttagagaagccatcttcttgtattctgtgataatagcgaacgcttattgagcacttattatgtgcaagcacggctccaaggtatcataatagtactttagggccttaggtattacaatcggagttactttccgattatatgtacattccgagatacgtataaaaagtatttgttctttatctgaacttcacatttaactgggagtcctgctcttttttttgaaacaggttcttttttttttttttttttttttttgagacagagtcttgctctgttgcccaggctggagtgcagtggcacgatcttggctcactgcaacctgtgcctcccggcttcaagcgattctcctgcctcagcgtgtgaggaaattagaatgcagggaggtgaataatttgttcgagatcttctatgtgggatgatcaatggcaaagatgggtacagaacccgcgtccttaactaaacgatggcactctgctggctcgcttttagctccttgtgttttctttctttttggtggttaacttgttttcgtcaagccctcaattatttaaaaaaaaaaaaagttcttaaggctcaaagtcaaaacctgtcaaaggccaagtgctttatttccctccagtcaaggactgggcattttgcatttgaatcctggatggcgggaagcagcaagcaggtgtcaacaggggtggggaggagacgccggaccccaccagccaatcagagcgcgcagaggcctcccttcccccgccgccgtcccgcgccaaaattccaaacgggctacgcaccgctcccaccgtctccttccgccgagctcagcgagccggaactatgtgaagaaaaagaagtcagcgttttccccaggactctccgctcaggtcctctatactgtcggcctgtgttcctctccacgttggcccggcctccttcgctctacaaatgggaggagagtttcgagcctgctgttctacggtggtggcgtgggcgggacagacggcggagggattctgggcgcgcgcgctgcggccgctggcgcggagcttgtggcgccagaattcggagcgcggaagagccagagctgcgagcgcctggagctggatctctctccggtcgcgcacgccgaggccagtagggagagaagatggtggttctccgcagcagcttggagctgcacaaccactccgcggcctcggccacgggctccttggacctgtccagtgacttcctcagtctggagcacatcggccggag

SEQ ID NO: 41048 - DNA, 2300 bp, Homo sapien
caccaaaaaattattattaactatgataaaggcataacgataacacataaggaaactctattcagtaccttaccgtatagaaggtagggttagggaggaccctggtttttgtgtcaagaggctgaagaaaggttattgccaggctaaacctgcaaggttaggaagggaccatgttctgagtctggggctggggcagactccacaaggatgttctcaccactacacctgtcccactcactttaaatggagcatttagaccatttacattcaatgttaggattgacttgtgaggtaccattccattcatcgtgctttgttgcctgtgtaccttgtttttttttgttgttttttaaattgtatttttgttgtataggtcctgtgtgatttatgctttaacgaggttctgttttgatgtgtttccaggatttgtttcaagatttagaactccttttagcagttcctgtagtggtggcttggtagtggcaaattctctcaccatttgtctgaaaaagactgtatctttccttaatatatgatgcttagtttcgctggatacaaaattattggctgataattgttttgtttgaggaggctaaagatagggccccaatcccttctagcttatagggtttcccactcactttaaaggagaaatgtttaccagagttgttatatagcatagaggctatgtggaagtttgtattaggagctgagaggcaataaaattggtaattgacacaggaactgtgctccaagtctttaggatttatcagctttgagactgaagagattggagaatccaactgtggatggctaaaatcaatgtaaacatctcagtttttataatgggaagtaccctgattagctagctatgctcattgcaaatataaacaattcagaagactgtaaagtgtaaagaccttgaaactgaaagtccctgatattaatatcattcattcaccagagataaacactattttttttttttgagacggagtctcaccctgttgcccaggctggagtgcaatggcaccatctcggctcactgcaacctccgcctcccgggttcaggcgattctcttgcctcagcctcccgagtatctgggattacaggcgcgcgcctccacgcccaactaatttttgtatttttagtagagacggagtttcaccatgttggccaggctcgtctcgaacccctgacctcgtgatccacccgcctcggtctcccaaagtgctgggattacaggcgtgagccaccgcacccggccctaaacactattttaacaatatggtgtcttttcttccagactgccagtaattgaacaaaatatatgattaacacaaaaaggataccatatggactctttaaacttttttttttcaaatttactgtatcagggaattaatatatcttttcgagccaatagctacaggccttccaatttaaaagattaagttacaatagagtgagatttggggtgctatccctttcggaaagcgtcctcgatgcggtcatattggaattaacctccactcccctcttctctgggctcccgcagactccaggctgagtgcagaagcgtggattttcacacccaaacctctgttatttcagtgtctcacctggcttctccacagcgcagaagctcagcccctggttggaagagcctccccgcggagattcacagcaaagcgccattcagggcccaactccaagcccaaacctagctcctccccaagccgccgccagagacccctcttctcccaaagctcaccggggccccgcccctgactccgcccaccagagcccggtcctccagtcccgccccatcccgggccccacccaccagccgggctccgcctacccggaagcgcgctgtcctcctcgtcccgggctccgcccaccgggagttcgcgccactcaccccaccccggacccgcccacttcgcttgggctccaccctcccaggaactggcgccgcttgccccgagctccgcctacttcgtcccgggcttcccgcgccgggaactcgtgctgctagtcccgccctggccccgcccaccgcgctactggccccaccacccggaaactgccccggccctctccccccgggctccgcccaccccacgccgggaacccacgcgggccactacaagcccgccctttcctacgtctggtccagtcggtcttcctccggcccgggccctggcccagctagccggccatggaaggtaatggccccgctgctgtccactaccagccggccagccccccgcgggacgcctgcgtctacagcagc

SEQ ID NO: 41049 - DNA, 2300 bp, Homo sapien
tttgagatggagtcttgctctgttgcccaggcaggaaggggcagtggcatcagctcactggaacctccacctcccaggttcaagcgattttcctgcctcagcttcccgagtagctgggattacaggtgcacgccaccacacctggctaatttttgtatttttagtagaggcagggtttctgcatgtcggccaggctggtctcagactcctggcctcaagagatccgcccacctcggcctcccaaagtgctggaattacaggcgtgagccatcgcaccgggccttatctgcttttctctcaaaatgaaagaaccaagggatccatgagggaatttgtcgattttgttcactgctatatccccagtgcccagaagtatgccacatactccaagtgcctaataaacatttattgaatgaatgaataaaacaatgactggacattagggaggagaactaacgggatttagaagagaggcaggacagaaaaatagtgcagtagttaagatgcatgaacttcagaatcacgaagaggttccagtttcagcaccaccacttgctagatgtgtgatttgggggcacagaacagcctctctgtggctcagtctttttattagtaaaatgaggataacgataataaaagaaggtacctcctggacatcgatggaagcacctgccactgagcctgacatgcaatcagggccgaacaaatgttaagctcttggtggcattggtttagtgaccagcagaagggggaggagtaggtttagatagcactgaggtttcctgtacaaggactagaagctggggaagaagccattactcaggaaagagtaggtatgaggactaaggcaagggcggtacttcagctgcagaggtggcctaggacaggggtgcactgcgtggattccggggccagaccctgactgtaaatccccactccttcattcacaagctacgtggccctgcgcaaattacttgcagccctctgtgcttcagtgctctcatctttcaactggggataacaatacctacctcttacggttattgtgatgctcagtgatttagtttacctaaaccacccagaacaacgcgtggcatatagcaagtgctgtatgaaaaactctccgtgccttcattctcttacaaaattaaaatgaccttcacctcagtctgaaaccccacaggcttcagcagagtaacccccaaagattttcagagctccacccttcctggccccgaagcagagatctgctgagcaaatccaaccgacaagcgccaggcacaggtaatgcactatcgaccctatgattccggacgaattcccaaccccatccaatagcccacgctctactcaagagacgagagctgccattcccgctccctcctcccgcaaaactgtagaacccgccggtagaggccgggagcgcccccgaggaggggccgggaagaggcggggcccggttgcgactcgccgcccgggagcctgggagacccagaggctgcgcccgcgccccctcaccagtagcagctgctgtagacgcaggcgtcccgcggggggctggccggctggtagtggacagcagcggggccattaccttccatggccggctagctgggccagggcccgggccggaggaagaccgactggaccagacgtaggaaagggcgggcttgtagtggcccgcgtgggttcccggcgtggggtgggcggagcccggggggagagggccggggcagtttccgggtggtggggccagtagcgcggtgggcggggccagggcgggactagcagcacgagttcccggcgcgggaagcccgggacgaagtaggcggagctcggggcaagcggcgccagttcctgggagggtggagcccaagcgaagtgggcgggtccggggtggggtgagtggcgcgaactcccggtgggcggagcccgggacgaggaggacagcgcgcttccgggtaggcggagcccggctggtgggtggggcccgggatggggcgggactggaggaccgggctctggtgggcggagtcaggggcggggccccggtgagctttgggagaagaggggtctctggcggcggcttggggaggagctaggtttgggcttggagttgggccctgaatggcgctttgctgtgaatctccgcggggaggctcttccaaccaggggctgagcttctgcgctgtggagaagccaggtgagacactgaaataacagaggtttgggtgtgaaaatccacgcttctgcactcagcctggagtctgcgggagcccagagaagaggggagtggaggt

SEQ ID NO: 41050 - DNA, 2300 bp, Homo sapien
gaggagagctaagcaggtacttctttatatagtgacagttttccttcctggctattgtagagctgaaaagagggggaaagggtgagagtaaaccttttcagaaccggaaaaccacaagccatcttcttgacaaactctcctgtcatttcctttattcatttgattttttagatccgcaaacgattaattctgtcagacaaagggcagctggattggaagaagatgtatttcaaacttgtccgatgttacccaaggaaagagcagtatggagatacccttcagctctgcaaacactgtcacatcctttcctggaaggtatgtgtctcagaggtggctgccacagacccccagcccagcccctaagagccaagagtgccagccagcatggtgaggccagcgcctttccgcctcttccccatcacagcccccagctgaaagtgagggtaaactgattcagtgcctgggagggtgggggggaaggacttttatagacctccattttcttcactttcttatgtttacttttttctgcgttccacccactcccccttaaatcctcctctctctgtgtgtacgggtacacacacttacacatggaaacacatagcttttagtttttccagacttataaaattttttcattgatgcataatagatgtacgtagtttcagggtccatgcgataatgtaattcatgtaatttgtcaagattaaatcaatgtactttgacacattcataaccttaaatatttgtcacttatttatgctagaaccattccagttcttctcttctggctattttgaaatgttcagtagatttttttttttttttttttgagacggagtctctctcactctgtcacccaggttggagtgcagtggtgggacctcggctcattgcaacctccacctcccaggttcaagcaattctcctgcttcagcctccccgagtatctgggactacaggcacatgccaccacacccaggctaatttctgtaatttttagtagaatggggttttgccatgttggccaggctggtcttgaacttttgacttcgagtgatccacctgccttggcctcccaaagtgctgggattacaggtgtgagccatcgtgcccagcctgaaatattcaatagattattatatactacattcacttactgatctaacagcaggtcttattccttctatcataccgtgtatttgtacccattgatccacttctctgcatccccttccttttccctttcccggctctggtaaccaccagtctactctctgtcttcatgaaatctactttcacagctcccacatacgagtgagaacatgcaacatttaggcctggggcattattgacagagaattgttgctttgaagttggaaaatgccttatggtgctaaaagccaaagagaggcctctgagaacttgaagctaaccatgtgttcctttccagggcactgaccatccgtgcactgccaataacccagagagctgctccgtttcactttcaccccaggactttatcaacttgttcaagttctgaatcccagcacatgacaacacttcagaagggtccccctgctgactggagagctgggaatatggcatttggacacttcatttgtaaatagtgtacattttaaacattggctcgaaacttcagagataagtcatggagaggacattggaggggagaaatgcagttgctgactgggaatttaagaatgtgaacttctcactagaattggtatggaaaagcaaaatactgtaaataaactttttttctaacaatttgccagcaagactataagggcaataattctatttcagcggtgaaaatggagtcctcttaatggtcacagaaactctcttatagttccctaggaagaaaaaggcaaaactcaaatacaaaataggacgctttgtttacaatgtgaaaatttgtttagaaaagaaaaaatgaagaaggaaaactatataggagaaattcctgggctttggggtttgatctggtgtttgttttgagaaggcgaaggaagcgccacccatcctaaacctgcatgggcacagagccttaccctacagagataccacacaatggtctacctctaaaagcgtagagtgccctctctgacaacgcatgtgatccagtaggcagtgtctgtttttctcgtaagtgttttcatcactataaaaagtgatttaaaatggaaagggatattggaggcaatcctctggtttcacacttccttttcaggcaaacagggccctccttagagttatctgttcaccagaac

SEQ ID NO: 41051 - DNA, 2300 bp, Homo sapien
ttatctgtaatgcatgttttcctcatgttatctgtttgattttcatggacttatgtaagtttcaggtttggcatttaaaataaacttgtacttgagtattaggggtgttttttttttttttggtgttttttgtttgtttgtttttgttttttgagacagagtcttgctctctcacccaggctggagtcagtggcatgatcttagctcactgcaacctccgcctcttgggtttaagtgattctcgtgcctcagcctcctgagtagctgggattacaagcacctgccaccatacccggctaatttttgtgtttttagtagagacagggtttcgccatgttgcccaggctggtctcaaactccagggctcaagcgatctaccccgctctgttcacagcatgtaactcagtctgtcaaagcctaatttcatttttgcggggggacggagtctcgctctgtcgcccaggctggagtgcagtggcacaatcttggctcactgcaacctctgcctcccgggttcaagtgattctcctacctcagcctcccaagtagctgggattacaggtgcctgccaccacgcctggctaatttttgaatttttagaagagacggggtttcaccatgttggccaggctggtctcgaactcctgacctctagtgatccgcctgcctcaacctcccacagtgctgggatttcaggcatgagccactgcatctggcctgtaatttcttatggcataatgctttagaaaaaaaaatatagtagtttggagctttggtatatgaaatctggctctcaaagatttagagtgcttcagacaaagcaacttatagccccagtatttctacactgcagaaattaagcacttgaaacttcttcagttgtcagtagactccttatcttttttgtcaaaacttttaaaactttggaataaatgaaatgaaatgtcttaaatcttgagcatgttgcagatgttaaagctgtgtattctttttgtctctgtagatttccaccaagaaaaatggatctatgttcacaaaggaagtactaaagaggtgagcatcccattcatttactaagttatactgaaccttatcccttcctgatagcgcagggagggatatggtagggagggaaattacttcggatcatgagagtcttcttggatgtgggagatggcagctattagtctattatttagccaaccatcagagtttagaacagagagagaaagaagcaaaagtcactaggtggaccctctagtcgttcaatgagattatgtatgtaaaagtgctttataaagattgacatgcccatctcaaccatattattatattgccctgggttttgcctcagggcaaggtctcccttttgttctaagatctctttggacttcaactcagttaaatttcagtcctggaagcgctaatcactaaatatagtagaagttttcagtgcctgctcagtgtgatgtgggaggggacaagacattgtaataactacatttgtatggtactttataaagcccttttatgtatattttctctctgcacaggcatttgctaaaataactaggatacaggcaatatgaaagaatttctatgaccgtcagggacctcagtgaacatctagtcccctctgtgatttgaggtccagaggggggtcactgatattcccaagaccacccagatactcagagcagagctgggactttatactcccaattccctctgtgttcataggttaaaagatcaaaacttttgcttcctcccaaaaccttataaacacttctgatgatcacagtgagaaaagcactattggtataaggcaaggtggtgacacagttggtgcaggtaggtctaattctcctcccaggagtacgttacagtcaccaaccatcatggcctcccatgtcccgtaccctgctcccagtctttccttaataagcaattacttatgatttttccagactaatatgtggaaaaattataagcaaggtcccaaatggtacaagtcacgaaaagggggtgtttgacatgtgaggggctgactgaggcagctgctggctgtgttacccatcttggtggctctcaagggcttgtgggtacaggaaagaagccagtgccccaggtcacctaagacaggcatcaagctcattcggcaaaatccagttgggttgttctaactggctcattcttacttgggtgacctctgcatggcaggagtaacttctgtgcctttgttttcatgttcagcgccatggatattgcaccctgggggaagctttcaacagactggactt

SEQ ID NO: 41052 - DNA, 2300 bp, Homo sapien
aagcccattgtcaagaattagaaaaatacacatcaccaaaaagtgtgggcacatgacgctactggaaaggagggaagaatgggtactaataattcaatctaccacagcttttaaaccatcctgaaaggtaggcattattggctccattttttcttgacagttaagtaaatggggccctaagagtttaagtcattcatccaagggaggacaggtagtatgctgctccagcagaattagaattcaaaacttctaccttctggccctctgtggtctctacaggtatgtagccagcttactaatacataactaacccacattgttcataatcacatcccaggcgggcatggtggctcacgcctgtaatcccaacactttgggaggccaaggaaggaggatcacttgagcccaggagtttaagactagcctgggcaagatagcaaaaccctatctctacaaaaaatataaaaaattagcctggtgcagtggtgagtgcctgtagtctcagctactggagactggggccgaggtgggaggatggcttgagctggggaggctgaggctacagtgagccatgatcactcactctagcctgagtgacacaatgagaccctgtctcaaaaataataataataataatcacatcccttaattatgcagataccaattccctccaacagagaccagacccaacactgcctcatttgttagcaccatcacagtgtttaacatttgtttgggacttcttcaatgtttttacaagctttttttttactattactacactaataaattatttacggtgggaaatctaaatcagaaagctctggcttcttgaaaacaaactttattaaaaacgtcttcccagtccaacatgtagcctcatagggcacacacaatttctttgcctgagccttaaagattacaccgagtcagtggactagatgatattgatggctgcagagaaagaagaatggaagaatgaagtttgaagctaatgcttgagtatgggatttttactctgctgctgctgtcctgtgcaaactaattgccaaatagaccaggctgtaaagcatcataactagaggtgatgaagggcaagaagccaccctcatgccagcagcctcccgtatccattcacttattcacacaaatagttgttgaaggcctgcactgggcctggcagggtgcaggggctgaaatgcctccggaacaagacagaccagctctcatggagttcccactgcagacaggggtagattgttgtaacaacagcaaaaagtaaaagcaaacagggtagtttcagattgtactgtagcattggccctgggtacatcatttaacccgtctcttagagggttcgggtaggataggggcgctgttctttttctccactcccaacctgcgggagccagatacctcccagggcttcctctccttcccctcctttgctgccccaggggcaggtctgaaggaggactggttagtgacagctaaggggcccggagggctgggaggctgtccctcctccccgctccaacccccgcgcgctagggcggggttggggcagtgagcgaggtcaggaggctgcgccccctactccccgcccggcgggcgcggtgccggccccagctctgcggacggcccgggaggctgatctggctgcggaggtcgatcctgatagctcgggggcaggaggggggctggccctgctcctcacgcccaccccgcagggacccagacgcccctccggccccctccctgcaccccgtcagcccgggagctgcaggagaccggggcgcatctttccaagcgccgggcctcgctctgggacaacggtgtcctgggggcggggagggcgcgcggaggtgccaggggcggcggggtacccggcccggcagcaccgcttcaagtttccaccggcgcggttgtgcaaccgggaggggagcgtgagccgcaggcgcctcggaaaacaagccgagcccataaacaaagccacgtggcctccgggccggggggccgggctaagagcgggcggctcttccggcaacaaagagctgcggccggctgcggggataaatactgcggcagctactgccgcgcagcactcccggagcctgcaacgcttgagatcctctccgcgcccgccaccccgcagggtgccccgcgccgttcccgccgccccgccgcccccgtcgcgggcccctgcaccccgagcatccgccccgggtggcacgtccccgagcccaccaggccggccccgtctccccatccgtctagtccgctcgcggtgccatgccatt

SEQ ID NO: 41053 - DNA, 2300 bp, Homo sapien
gtggatcacttgaggtcaggagttcaagagcagcctggccaatatggtgaaaccccatctctactaaaaatacaaaaattagctgggtttggtggcgcacggctgtaagcccagctactcgggaggttgaagcaggaaaatggtttgaacctgggaggcggaggttgcagtgagccgagattgtgccactgcactccagcctgggcaagagtgaaaatctatctcaaaaaaaaaaaaaaaaaggcggcttgaacaagatagaagtttatttcttgcccaagtgaaggtgtggcggtgggaaccccaaggctggtcttgtggctttgctccttccagctcacgcctccattctcttcagggtatggcctcatccttgtgatccagttagcatgcttgtctaggcagcagtgggaaagagagatgaagggagggaggtggtctaacattgccagaagctgccacacaactgttcctcctatgcccagaacttagtcgtggccacacctggatgcaggaaagcggagcagtgtcctttttatttgggacagtatattagtttcctattgctgcatagcaaatcaccacaaacttagcagcttgaaacaacacaaatctattatcttacagttccagaggcctgaagtctaaagtgggtctccctgggctaaaatcaaggtgtcaatagggctggttccttctggaggctgtaggggagaatctattgtcatgcctcttccagcttctagtggtctgcccttcttaagtcttggtccccttccatcttcaaagccagcaatggctgagtgagtctttttcccaagtccctctctctggttctgcctcttgtctgcctcactcttccccatttaagggccctgtgattacacaaggcacacctgcataatccaggctaatctcattaagaacagtttattagcatccttaattcaacctgcaacctcaattctccctccccacgctttccatgaaacataacagatgcctaggttctgggaattaggatgtgaacatttttgggtggggtggcaggggattattccacctaccactggcaactgtggcaaaaattctgtcactgtagagaaagcaaggacatcccagattctccaaccaagctatggtttcagagacggtgccaatcagaattctggatgaagcaattgtttcaagaaacaggcctgtggcccaagccaggtcagtcatgtcattcctcgtagctgggctggaattttgatactctttttttctaggatcaccagttctgagaatagtgaaaacagagacataccagtggccatctttgtcaccattcagaaaagtcccctggtgttgaacccagtgcagaagtgagcaaggatctaaaatggaaagaaagagaccaaggctcgggacatccagccatgcccacagcccaagatccacccctgggcttttcaagcacatgggccaatacctctcctccgctcttgtgtttttccttaaactaatttgagtttctttcacttgcagccaagtgccctcactaatacactcaagaaatatatgttgggacaagtcacagcttcccagaaccctggagtgtctcctaaattccagatataaaatgctatcattctaaatcaatgattaggactgtgagtcccttccagcttttatatgccctaattaatattcaaatgtccttgacgtcacttggcctagctcagcccaaaggcatacacaatttctccaagtccattattccacatgggaaatgcctcatgtaaccagaggccccacctgacaaacttgccttctctcttccttatgcatctgctaggaacactaacaaatactcatgggtaactgcaggtctccatggctctcgtaggacatccatatggaaacatgtggcagcaggaagaggaggaccccagaggaaagaagaaacagcttgctctctttgagtggcagctgcaaaggaatggagctatttcctctcttcctgagcctcatccctagtgcagcatttcgtgtcccaagtccctccctaaagtccagctcttggctctgttccaagttgttccaagtgaaagtcacatcttgaaaagcagcctgaagcaggaatactaacttccgggaattcagccattaagaaagacagtaaggagtaataaacgttacctaccgatctactatgcagggtaatgtcaaaatcagagccccctagcgctgccagaaggggctgtggaactgaagaattttccaaagcactgagaagccatgttacttatgtaagt

SEQ ID NO: 41054 - DNA, 2300 bp, Homo sapien
aattacatctacaaagactctctttccaaataaggtgaattctgcggctgtgagtagacatgagttgggtgagggggtgggggtgatactgttcaacctacgacactaaggaaattagattttatttccttaggccagcagtgattttaaacttcagcacattagagttccttggaaggctttcttaaatggagagttgggtccaacccccagaatgttgattcagtaaatctaaggtggagcccgagagtctgcatttctgagttccctggtgatgttggtactgctggtctaggaactacactttgagaactgctgccttaggcatagggaagcccaagtcagaatcagacaagggagtaacaacttgagtgctgcttttagctagaccatgctggaagctagtggagaagggcttggagagaaacatgactagaggcaagtcaagcacttcggaagcagtggccctggagagaaatgaagaccctctgccaccctccaccctcatcggctaaaatagcaacaatggaactggggagaaggtagatctgagtcaaacgaacataacttgctaagtggatgtgggaggtgagggaaaggaagacgacagagtgactccaggtgtcttgtctagtttgtgtgcacaggtggatggtggcacatcccagggatgtaaggcagtgacagattgaatttggtttggggatctatagagtttgagatatctttgcgaagtatgagttcacagttgtttttgtttgtttgttggacaattagtatgtgtttgatcgaaagtagcacaccacaggactcactttggcttaaataacaaagacatttaattgtcaattctaacaggagctctgaattaagctgattccagtgttggttcagcagttcagtacatcattagggacccaagctatgtctgcctttctgtcagacatactctggatgtattagcaatgtctccccacctaggtgcaagataactgtcatgtgttcaagttaatgatctctcaagatagtcacaagcaagaaggaagcagatagagggaaaaaataccttcttgcttatgtacatctcccctatcagggaggaaaatctttctgcaaagctccaagcagcagacatccctttctatctcactggccagaactggtcaaaagcccaacccaagactggcaaagaggaagaggagagccttgaatcataattcatccctgaggctgaacaaatcatcttctcagttctctctctcttctttctatgtgttggcctctttctctcctactgaaaataagctttttgttttcctcgtatgggaagcaaaaggggctggtgagagggaggcatggccatagatagttcaggcaccaagagaactccatggcctcacatagctccagattagcagcctcaaggaaaatctcttctttctctaagtatctgtaagatgtcagggaagaattccagttggcttgggtcatggacctaccctgtgaataatcatagtaagtaaggttggccttatctttatcatcaccgctttcttataactattatatttattaatatactactgctattactactaccactactgatactaatactactagatggactgaaatagaaggaggatgcaaacttgaaaatcagatagaaagggagaaaataattctctttccaaataatggggacttggatggttgtagtaggaatgaaaaggaagataaaatgttaaagataattttaaagaaataatagactaaaaattaattaattaactaaaagaattaatttttttggatccaatgcataaactcttctaccaagggaaagaataacattcattgttttgatactgattgagacagaaatttgctcaaagcaaatttagctattttaccttgtttccttttcagcaaatcagaacttgtccacatactgttgactgcatcctgctacacagcacatttgatgccatgaaggccccgctcagcccccaatattctcacttttcaattccatctgcccacttatcattgactcttgaggattccagagtacacttgctaccttttttcctgcaagtaatgaatcccatgttcatactctcattgaattggcaaaagacgacctttggcaatataagaaggaaatggatcattcttttctaatgagaaacgtgcttcatttttcataactcctgaaagcatggttcctttcacggttgagaaatatccatcatctccacacaaccactttatcctccaagttctcttttgttgatgca

SEQ ID NO: 41055 - DNA, 2300 bp, Homo sapien
aagcaccatgcttcctatacagcctgcagaaccatatgccaaaataaaaccacttttccttataaattacccagcctccggttctttctttatagccatgaaagaacagcctaacacacccttccttccttaatgtatgtcaaaatcaattccagatgaatcaaagatataagcctttgaaaattaagccattaaaagaacttggaggaacacttatgcaagaagatttaagcatcttaatgcagaaatggtttttctaagcaagtcaaaaataaaagactgatatatttgaatacatcagagctaatactttcttcacatatataccctcaaaacaaacaaagacaaaagataacaaactggggaaaaataattgttacacttcatgaaggcctagattttattataaataaagtgttttacaaacaaataatgaaaatactaataactcaaaagaaaaataaagaccacaaacaagcaaaccacagaaaaaaatacacaaatggctttaaagaaatgggatatacaatttccaggatatcaaatgaaagaaatgtaaatttaataaaacaccatgtttttatctttgaagttggcagaaatgacaaagtttgacaatatttagtgttagccaatatgtagggaaaatcacactggtatattcatatagtgggagtgaaattttcatttttttaaagtaagcctcatggatcagctggtctttaagagtggtccagcattttatgtcagtgtggaggacaacttggcaacagctatcagaattttcagtgcacatagtctttagccagcaactctattctaagattttattctacagataagaaagcacaacaaagatgtgtatgagatattcatgcaaaagatcaaaaacaatctaaatgaccttcaacggtagactgatgaaataaggtttggttcatatccataacagttgactacatggccactgaaaaagaaatgtgccagtgtcaaatatctctttagtatatgaaatatacactatattaagtgaaataagcaaggcacaaaaagacaaatatcacatgttctcccttataacaaatatcacatgttctcccttaaatgtgggagctaaaaaattgatcacatgaaggtagagagtggatagatggagaaaagagactggaaagggtgagttgcgggggaagaggagaagtgggttaaagggtacaaacacacactaagatggaaggaataaattcagtgttggatagtagagtacggtggctgtactcaacagaaatctattgtactcaggcaaacactctcaataccctgacttgatcactactcattatatgcatgtaacaaaatgtcttatgtaccacataagtttgtacaaataaaaaaagaaacatgttgtaataatctcagaaaaaaaaaggaaagacaagaaatatgcaaggcatggaacagaatacattgtacaaacccatttggtgaggaagaaaagacaagttggatcaagataaacagagaggtaggtaactagacaggcagaccgacggacatagctgaatatgcatggaccacttcaggaaggactcacggaaaacctctgggggaaggaaaaaggaagtcagtaggccgacttttcacaggacctttatgtattattagaaacaaatttaccatctgcacatattactttttaaattcaaaactcagtaaaattttttaaatgatctagtgtaatgcaatgtagccttcgaaaaattctctgtaataataataacaatgttagtaaaaaatagtaatatttttctatttggttaatgctttcattactaaaaggcataatattttaaatgaacaccagaatatgaaagaataactcaacaattcagaagtgaggcaggtttagtcttttaggtgggaagaagctattcaactttaaaagcctaaactttatttattaagaagtatattattttaaaaacatgggtaccaaggaaacctgggcagtctaagtttatctgtagctagagccactccctacccatccccaacaatgtattcaaattcagtgccaaaagttacttattaaacacaagagatattatgtccggggggaaaactgttgtaaactttgcctgtaggaggactgatctcttgatgaaatacagaaaaaccatctcagaaaaaggaaaatgggcaatcgtcatgtaagtactcattgcctttgggaattggttttaattttggttagcatgtggaagaatttaaactataaaatcatgactgatacttgtatactt

SEQ ID NO: 41056 - DNA, 2300 bp, Homo sapien
agaatagttactgctgtctctttatttttctagtgtagtccacaaatttgggagctaaaataggtggagtttttgtttcacttatcagctttcatttcagttacatccacatggttgctgcattctggtttctgttattctatcattgggtatagttcctcggtagaaaacgggccttatccccacaggaagcagtgggtttgttattggagaaacagattggggcagaaaaagctggataccaagtttagctcttctacagattgggacttgtgggatcaaaggccactaagtggttgtagtcttcattggtagtgcatgttgatggagctgtgccacattatttggctttctctcatggtggagatctaggatcaggtatgaaatgtggagaggctggaaccctgagctctaatggagccattacttacatagcttccacagggcagaggttatggggcagctgcctgggattcgtagagagcctcttaagaaacctagacctgaaaatctgccctttaattactaggttgggaacatgtgtggaaagtgccacagggtggcatgtatgctctaggtagccaaactatgatcttactgcttcctgtaataatcattgttattggctgtaataatattgtatttatacacatttttatttaaggacattttagatttcaaatttaaatttttttctttttaaaaggatattatgaacagtgagaaaagttatgattcattgcccaattttactgctgctgactgtaagtatttaattgtgctgaagaaggtaatgtttaggttgtgtctttgtgcatcctgtcatctgtgaatattgtcatgtgtgtttttaacctgaaatatgtgaaaaatgagaacagtaagcaacattatcagtgagaattttatcagatgataccagatgcatgtgtaagatttactctaaatgtctaagagaggcatatttgagagtggtagaatcagaaaaataagactaatctatatatttccagagaatgaagttctttctgatacttgggctgtgtgtatattgaatgtgggaggaaaacttgtgcacagtatttttgcagggtgacatacagtttttagtaacttaacttgctgctgttttagtatgcttactttggcaaagtgtatattttgaatgtgtcataattctgttgtttaagaagctttcgctgagaattacattttgacttcctaaaattggcaggacttctgcttttttaaaatgtttttgttagaagtgtcatcttgaattcatctctcccaaagtttagctttcatttatgttttggttgaagacgtccttttaatttgatattgatatttgactagtaattgaaagatgaaaataagctcgggtttttcctacaatcgcttgtgaacatattgagatttcaagatatgttaaatgtttttaaaggaaagactctttttttcaggtctaaggcttcttggcataggaagaaaccagtatattgatcttatgaatcagtgtagatcatcaaaagtaagttagtactttctttttcattgttttggcctcatcacacagtttgattagtttttttaagtggtagaaataatgaattgtatgtctttgaccaaataaaatgtacttaacacagaaacaatacaaaaaaaactcctcagtattctctaggttatagcataaatgattatttaaaatttttaatgcataaaacatttatttttaaaaattatttttgttctcttagtctttttatttgctcattctacttgtacagttcacttagtgggtgaaaaaagtgtttgcattttcaaatgcatttttcactgcttgggtttcacttgagtttgtggaagtaaatctggatttaacaattagtgttttgaaacaatttattttgaaacaatttaagaatgactttcttcatacaatatgttaatatctagaattgttaagattttaaaacatgaagattttaagaagatatttatttagtccattagaaacaatcttatgatatgattgatgaaagaagaaagtggtagttttagattgcaaattctcaaatgtttgtaccattgcagaaattcttcagaaggaaaacagcccgtgatcttctaccaataaagccagtggaaattgccatagaggcgtggtgggtggtgcaggctggctatatcacagaagatgacatcaaggtagaaatctttaaaagttaaacatagaatttttattttttagtttattttacaatttttaattatagcttataattttttaaaaa

SEQ ID NO: 41057 - DNA, 2300 bp, Homo sapien
atgtcccatatccccagtgatgttgggaatgactggattcccctctttgaaatatttcattccattaagtcactttataaagcactggtttttcaggaacagccttcggaggctttttctccctgagccccgcgtggtcaggtgagtgctaccagctgaacagtggcactcggctatgactgcaggggcccaggttcagctttcctcatcattaaaaatacataaagggggcatgtcacctgcagacaagtccctctgtgttagcgcagaagtgaaacaggagagggaaattggtaccctttcttatgaaaatggaagtggagtggttaagcaaagtgactctggaattggacaaacctgggtttccatcttggctccaccatcttctagctatatcgcttccgagccttaccttcctcatctgtagaatgaagacactaataacatccagctttgggctgcagtgagatgtagcaaatgatgcatataaaatgctaagcattgtgcccagcacgtggggagcttttagtaaatagcagctattattattaacaaaaatgaggtacttggcttaaaattatggagacagagtccagaactcaacagaacctattttccctttcaaataattatttgacaaataaaagccatctgttcctttgagatatggatgtaaatcaaatgaagatgctgtatggagatacaaaatacaaggataattacacagcagaccaaggatttagtccaaatcctgtacttcactaaggccctggaactccacagtgttgtggcaggtggaggagggctccaggggtccatcctatgagaactcccttgctgtaggaaggaagcctcaattacaacaacaacaagcagtcacataggccttagttttaagcaaggtactgtcctgggtattttatcctctggaaggaatgtacaaggttatcatccctatttcacagataaagaaattgaggcacaaacagaggtttgtttagagtcacacagctgataaatggaagagcgtggattttgacccagacagcgcagctccagagtctatactcatcatcaccatgctctatactaactctcaaaacacaggaaagagaaagcagtctgttgtcttctcatttttatgctcagtcactgaatgaggatgaagtcacctttcttctgaggtgtctcctgacttctcccccaggtagaactaaccctttctctacctggctcttgtaggactctgtacagccctgcaccctgaggcttatcatagtgtagtgactcgtgtgtcatgaggcctgcatccatgcctggattgtatattacactggagcagagtctggttcctctcatcctccagagcccagcatgtggcctggcaaaaagccagcacccgacaggcactggttcaatgaatgtgaggctggttcacatcacgctgtcagtgtgcgagtcataaatcaaaatgcagtctactctatcatcgaggtcatgggctttgccctggagaacaatgttagccctctcaacatcagccaatgtcatggccatcatttatcaatcattttataaacttaaatatctgcttcttcatgacagtcccatcttaaaatgacaaacctgaggtttagtgagttgtgttacttgcccaaagacatgcagccaaagaggagatgagctagaaagtaaccttagggcactgtgtgtgctaacccatggtgcttaactccctgagatgggcaattctttactgagttttcctcttttcaaaccacaaatcagagaacagaataaatgtttaaagaacagaatctaatgagacaagcatcctactggatttttgctgattaggaatcctttcacattttagtactagttgtataggatagggagaaagacagaggaaacaggcacagacccatactatgatttgcatatttgtcttttccaaaactcatgttgaaatttaatccctaatgtcacagtattgagaggcgggacctttaagaggtgtttgggtcataaaggatctgccttcacaaatggattaatctatgattaataggctgtcatgggaggggaactggtggcttcagaagaagaggaagagaggcctgagcgagcatattagcatgctccacccccttgccacgtgatgccctgtgctgcctcggaacctgcagggtcccaccagcaagaaggccctcatcagatacggctcctcaactttggacctccagcctccataactgtaaaaaataatttccttttctttagaaattacccagtttcag

SEQ ID NO: 41058 - DNA, 2300 bp, Homo sapien
ctataatcaaagctgcatgagactagcaactttgtttgattcaccctggcacccagcacagtgtctggcacataaaagcacatgctcaatgaatgtgggttgaatgcataaatgaatgatatactcaagaagttgctctaaaccctgattataattcaacaatactgtgggcttttcaaaaaaattcaagtttccagattcttcatcccagaaattgattcagaaattctggcgtgggtccccaaaaagagcatttttaaatatctgtttatatctctggaaggatccatgagaaattagtaacatcagttgcttatagggaggggaatggggcagatgggggccacagataatagggagacttttaactgaatctccctctgtgtttttaaaaaacgtgagtaatatattatgtactcttaaaagaaaaaaaatttaaactaaagaataaaaaatgtttagtccaggtgatatgcagccaggattgaaaattcccattacagacaagttgctatttcaaagaggagctgggattggacagcacgattgagaggtgggcccctgctcagcttgagtaatgggctgtcacttaggcaggctgggaggagaatttactctacaggacattgctaggtcctgtaatcaactggggagaatgagagggagccgttgtctgttatttatttatttatttatttatctttagatggattctctctctgtcacccaggctagagtgcaatggcgcaatctcagctcactgcaacatctgcctccagggttcaagtgattctcgtgcctcagcctcccaaatagctgggattacaggtgtgtgccaccacaccaggctaatttttgtatttttagtagagacaggggttttccatgttggccaggcttgtctcaaactcctgacctcaggtgatcctcccctctcagcctcccaaagtgctggaattacagacgagagccaccgtgcccaaccagttttctgttataccaggtgttcaggaacctcaaatcctgtgtttgagttaaaaagaaaagaaatttcctgtgtgccgagataaccaagtgctcaacaagaagccaacatgtccatccttaattagtaatcaaagtcttacaaaaaaatcaaatcaattttttttatcagattggcaaagattacaagaataatagctagccttgggggaggtatggagaaacagagtcttacatactacttgtaggagaagagtgctacagccttttgggagagcaattttgcaattcaggccaaaacccttaaaggtatttacatgacaccttttgctgtgccgaacctttattaacctcattagggaagacaccaggttcaagaggccagaaacccagcaaacaagacatagggttttattagcggcttacatacaggggagagagtccagtggcaccgggctggacaagatatccaccttatatccaggccagtggtggcaggctgggcaggaaaaacacaacggcctgcaaacagcgtgtagtttatatagcattttcagttaacagcttccccttaacgacctccacctggcaactttcaggtaccccccccccccccccccccccccccccgccgcccaaactcagggcctcaatccttccttatggcccatgttcaacgggacgggacgggacgggacggggactcagatgtttctcataaacaaggaatgaatctctgggttggccactcctggattccctagcttgaaacacacattcaggtgcgtctgccatacaggtttattctaattgtatgcttaaattattactctcaggggcttttaccctgcaccttagtaatggtgtagtaattcttggatttagtaattcggcatttagcccatggaagttgaatggtttggttctgtgttcccacctacatctcatcttgaattgcaatcccaattataatccccaggtccaggaagggacctgttggaaggtggttgaatcacaggggcggttcccgcaagctgttctcgtgatagtgagtgaattctcacgagagctgatggttctataaatggcggtttccccagctcgctcttgcctgctgctacgtgagacgtgtacgcttctgtttcaccttccgctgtgattctaagtttcctgaagccggctaccctgcttcctgttaagcctgtggaactgtgagtcaattaaacctctttgctttataattagctagtgttaggtggtactctttatagcaatgtgaaaacggactaatacagaagaagtattcagccaagtga

SEQ ID NO: 41059 - DNA, 2300 bp, Homo sapien
tccttttctttgagtggattacttggtgttgggtgattgtaggaaccgagaccctctgcttcctcttacctacaatgtgcctttgagcctgaccttgaagaagcttatttctcttggtgctgatcattatctgcattagtgtgaatgctgcatgatatgtacaagtcatgtcttgtactaaatgctttgtatgcatttagccatttgacatactgtatattttatgtagatatttgttacctttctgcactcaccaaaaggatgaagatttttaagtctgttttgttcactgctgtaaccccagaagctagaacggtgccgacacttcataagtatctagtacatatttagtaagtaattacgtgagttatctatttctcaggaggaacctatgaggtgaatattatccttcctgcctcacagatggggaaactaagactcagatcttggataattttgaggatattttcttttttggggccaccatctgagactcataggtaaagaaatatgctgaaatgaatcatttcacaaggaaaatatgaagaaaataacattgatttagctcagttttgcttttggaaggcagttatatggactctatcatggacttgcttctctgaatggtatgcttaatcctcgtttcccattcgcatttgtgttagggagaaattatccttatgggccctgaggcacggatgggagggagcagaccatgaggacacacttaccaggaagcaggtctttatgcaaatgttctctcagttcctcctcaccctaacctggttatcattccatctctcaggtgaaaacaccaagtctgaggccaagagcagagctggcatttcccaggctacatgatgaagatgaagctgcctatcttttctgcttcccatttttttttctttttcttatttatttattttatttatttattttttgagacagagtctcactctattacccaggctggagtgcagtgatgtgatcttagctcactgcaacctgtgcccccgcgttcaagtcattttcatgcctctgcttcccaggtggctgggactacaggcacatgacaccacggctaatttttttttttttaatggagtcttgctctgtcgcccaggctggagtgcaatggtgcggtcttggctcactgtaacctccacctcccggattcaagtgattctccagcctcagcctcccaagtggcgggattaaaggtgtgtgccaccatgcctggctaatttttatatttttagtagagacgtggtttcaccatgttgaccaggtgttctgaaactcctggtttcaagggattcacctgcctcagtcccccaaagtgctgggattatgggcgtgagccacctcaaccggcctgcttccctttctccctctccccctccccctatgcctcccccccgcttcccctccctctccctctccctcttttttttgagatggagtcttgctctgtcgccaggctggagtgcagtggcgtgatctcaactcactgcaacctctgcctcccaggttcaagtgattctcctgcctcagccttccaagtagctgggattacaggtgtgtaccaccatgcccaggtacccatttctttatgaggttattcacatgctcagctctttggcagaggagtctttgtcactgttgtatctccagtgcccagcagagcatcaggtatgcagtaggtgcttaacaaatgtcagctgagttgatgaaatttcctcaaagcaaattcacaggcacatcctattttaaaacaaggagttgagactccttgttcccgcctttctgttgagaattcattgtgcaatctgaccaggcaggaagtgaaatggggattgttgtgggttttgtccgctgacagcaaggcccagatggtgactaattggccattatttattttactcgtatgcagcattttcggttttctgtctccctttgattgattgggtggctccgggctgcaggtgggtccattttatgcttggttggtgagtcccacaaaggcccattaaatcaattaagttggccggtgtgagaaaatctgggagggggcagggaatctgcctgggtttgcttgtcagataaatccttccggatcacggggctgccacgggagtggcttccaccacaccatctcctgtcctgggtgttgtggggagatgagtctggatcctacctggattctgcctccaaggtgagcaccatcaagtggagatgggacctctacacatcactgagaaccagggacaaggtgtgaagtgctgtaggagcagtgctga

SEQ ID NO: 41060 - DNA, 2300 bp, Homo sapien
agtgtaatcttaacttaatgggcttatcacctaattttaagatatttgtaactggccagttttagagatgctattaaaagaatcccaaaatgctaattaatcctaaccagtttcatcattatttttcagtacttaagtagctttctcttcactgtaaatgttttatttagtgattttttagaatttcattatactcttctaacctgttaaatttgtaatgtgtattggttctggaagctgctttttataaaattttgagtgttcagtaaataaccagatttaggcaataagtgaaaaaactaaggctagactctttaattgaaaaaaaatcccattttattaatgttttacttgatttttacaacctttaataacaaataatattctttgtaattaaaaatgttgtccttgatcttggacatttttacttaaaacaagacgaaattttaaatgacctattttatacctattatgtactggtttatataatattgtatagctataataatattgaatataatagtattcttatactgtatatagtattgtcccgtggtcttagtcatttatagtggttgtgggtagaagtgcttttttttgagtgcttattagcctttcctgctaggtgcagagctcaatatagtaatatcgaatttttataacttctggattatatttcaattatactttctgtggagataactgcattaaaagaaaaaaagactctaaaaattaatagacacatataaccagttggtttaagggattatttttttggacgtagtacaaaactcagcattttaatgtttgttgagaaaagtcctcagttgaacggatgttcactataccttggcaattttatagattaattagaataaagtcttttacctattcccagcttttaatctatttcacagtctgccttcaattctcccaatctggaattctcttcctttccaggttagtggtcttcaacttaatgaaataatattttttgagcatctaccatgccctcaatattctgctgaagatgtaaatatgaaagaaatgagaataaatgtataaaaaatatgtaggtattagttcttcctagttacaatttttttttttttttaagatggagtcttgctctgttgccaggctagagttcagtggtgcaatcttagctcactgcaacctctgctgcctgggttcaagtgattctcctgcctcagcctcccaagtagctgggactacaggcacgcaccaccacacccagctaatttttgtatttttagtagtgatggggtttcaccatattggccaggatggtctcgatctcttgacctcatgatccgcccgcctcagcctcccaaagtgctaggattacaggcgtgacctagttacacttctaatatctcagatcattgaatttatatacccaatagatgaagtaaggtgtgtttttggtagcaagaggtgaagtgatagtttgatttaaatcaaatattgattgtttatagtttgcaatagcatttgggaatattgatgaattttgaggggggaaaaagactgcacatagatgaggtaatatagatgagataatcacctttttctaacatttctttaaaaaaattagttagtaaaagcacccaaataacttttctgacatttgatttaggacattttcattatttctaatacagaaatcgattttataatatcagactttagtcataatagaaaaagagattaatgtcagtagcaatcaggtaaaatgtggtactcatatatgtttactaatttgttctgttaattgtatgtatatatttgtgtgtgtgtgtgtgtgtgtgtgtgtgtgtgtgttaccagtaagaaaacacaaaagtctaacacagttatttttacatgttttatactttttctggtttgttttgttttttcccaatatagtttctacttatagcagtagcagcatctattggctctggaaaatgagaatcaaattctagagattatcaagtctgtttaggatactttgatcatatcatctgtttttgtcattctaagttatagaaatcttaaaatatatttttctgtttttgatgtttttcagtattcatccacaatgcgatacctttcatagggtttggctttttggataatgcaattatgattgttgctgtaagttctttctctcactgcttctattttgagttcataaattaatgtggtctacattttcctaataatttttctattgtgattataaagttttaatatcataatgaacaaggatattttttactatatctcagact

SEQ ID NO: 41061 - DNA, 2300 bp, Homo sapien
gggggatggggtggtactcccatgagcctgagactgaaatagctctgcagaggattccagtgcacactagggaatgaagggggtttcaaagacaaggaagatatactttatgcactcaaaaagctttcatttccacagagagcattcttaattgttgttattacatcacagaggcatcaccttggaatttaaaaaagaagcgattcctttcaatgtttaagagacatcagtgtttctcaagctttcgtgtgtgttattactggagggcttgttaaaacccacatgactgggtccaatgtctacgttctgattcaggaggtgtgaagtggggtccactatttctcacgtctaaaaagctctgggacacactttgagaaccagagttagagaagtaggaggctttagtggtaacaatcctccattattcagtttaatattctacttacatgtagcacatttactacctacaagtttccgggctgagtgcagcactgtttatgataaggatgggatttagatcttgattacgctccagcagatttattaagtggatttattctctaagggtgcctaagcgtcattagacaggttcagataaagcagagatctcctcccttagaagagattagggacagcttaatgaagtaggagacctttcacctgggccttgaaagatgcctaggacctggatcaggggaaatcgtggacaatcaaattattcttcccgctttagcacagagacaaaaaaatcacaagcaaccactaggaaaggtctatgacattcttgcctctgcctctagcattaacaatttgcatgccagctgctggaatctgaacggggaggactgttctcgtgtcaagggctcagtctcagaccctccttgggcaggggtggaactggcttcgctttctctttggggcgcccagagcgactgcattagagccggcctgctcggccgaagcggcggtgggcgctgacttggcgaagggcgcagctggggcgcttcgttccggagcagagcgccgtgatcccgtcggggctggggtggcagcgcagctctccgcctgtccagagcggggccgcacgccggggcacctttcagaacaagctccagatgtggccccaggttgggggccgggtggcagctgtactaccctggcgggcgaggggtccagagctcgttttccctattccgatctgtaggtttaacgccagcacagggtggcgcaccctacctccttccaccttcacgcaccagcgcgggaggggacgcgtgtgcacgctcctcccctaggagggagggcggcccgagagcctgcagactgcgcctgcgcagcctcgctcacacacctccccgcccccccgcacctccttcccctttcgccccgccccgttcccacttctgctgccgctaggggtagcggcggcggcggcggctgcggctcgggagcgcggctgctttgagggctcgggaaccttacagagtggggacgtggggaggctagagggtgagaaagctggcgggagagtagggcggcgctggaggagggcggtgcgtggctgactcatcctctggaagatcagactgacagagacacacactagcccgccccgcccgcccgcgccgctcctcctcagccgggaggcgcccgcccgcaccgaccgcccgccctctccgggcgctgtccgggcccggccgtctcagagaaagtttttcccatcggaggggcgggagccgccgcgggccttttggaaaggaagtggggacggaacaggaggcgagagccgcgcgggcccgcggagtgcatggtgcccggcgcctcggctgcctggcaggaggacctcggggcggggtcgagctgagcccagctccttctcgcctcagccgcgccagaaaccgccttgccggacggccgcgggggtcccagctcctcagctcgccatgtcccggctgctgccgctgctgaggagccggaccgcgcgcagcctgaggccgggcccggccgccgccgccgcgccccgcccgccgtcctggtgctgctgcgggcgggggctgctggcgctcgcgccccccggcggcttgccgggcggccccaggcggctgggcacgcaccccaagaaggagcccatggaggcgctgaacacggcgcagggcgcgcgcgacttcatctacagcctgcactccacggagaggagctgcctgctcaaagagctgcaccgcttcgagtctattgccattgcccaaggtaaggggggcaggtggggggcgagcccgggggccccgacgccctcctcttct

SEQ ID NO: 41062 - DNA, 2300 bp, Homo sapien
ttcttgggaagagattacatgaggccataatagcgttacaatgggtgttaccagtaggtatgcaatttagggatgacatggctgtaaatctgaagatagtatgatctgtaccttattaatacttaaaagtccactttgtctttctgcctctatctaaagcagcattttcatttgttccatcctttttatctatgttcaacccatatccattcattctatgtgtaacctttctcataagtgacttgcttctacattttagtttctcttgttttataatagaattaaatattctatagtaatatagcaaaagcattacagcaaaccccaatgagcaaacatgtatcatatcacgtttatgatgtcctcctatttattgaccaaaacaagtcaaatagccaagcccacagtcaatgtagaggtggaccacacaacggagcggataatagaaggtgtagttcattggggatcactactataacaatctaatactaacacatagttaggagacggttgatccagggatcgaactttccacagtctgtctctggaggctacacactaaactactattctggaggtggttgggaatgggttcttactgaagaacttttttcaaacctcacttcccaggtctggggcctgtgatccaccccagtgaatcagaatatcttgggggtaggaaattgtgggggggatggggtggtactcccatgagcctgagactgaaatagctctgcagaggattccagtgcacactagggaatgaagggggtttcaaagacaaggaagatatactttatgcactcaaaaagctttcatttccacagagagcattcttaattgttgttattacatcacagaggcatcaccttggaatttaaaaaagaagcgattcctttcaatgtttaagagacatcagtgtttctcaagctttcgtgtgtgttattactggagggcttgttaaaacccacatgactgggtccaatgtctacgttctgattcaggaggtgtgaagtggggtccactatttctcacgtctaaaaagctctgggacacactttgagaaccagagttagagaagtaggaggctttagtggtaacaatcctccattattcagtttaatattctacttacatgtagcacatttactacctacaagtttccgggctgagtgcagcactgtttatgataaggatgggatttagatcttgattacgctccagcagatttattaagtggatttattctctaagggtgcctaagcgtcattagacaggttcagataaagcagagatctcctcccttagaagagattagggacagcttaatgaagtaggagacctttcacctgggccttgaaagatgcctaggacctggatcaggggaaatcgtggacaatcaaattattcttcccgctttagcacagagacaaaaaaatcacaagcaaccactaggaaaggtctatgacattcttgcctctgcctctagcattaacaatttgcatgccagctgctggaatctgaacggggaggactgttctcgtgtcaagggctcagtctcagaccctccttgggcaggggtggaactggcttcgctttctctttggggcgcccagagcgactgcattagagccggcctgctcggccgaagcggcggtgggcgctgacttggcgaagggcgcagctggggcgcttcgttccggagcagagcgccgtgatcccgtcggggctggggtggcagcgcagctctccgcctgtccagagcggggccgcacgccggggcacctttcagaacaagctccagatgtggccccaggttgggggccgggtggcagctgtactaccctggcgggcgaggggtccagagctcgttttccctattccgatctgtaggtttaacgccagcacagggtggcgcaccctacctccttccaccttcacgcaccagcgcgggaggggacgcgtgtgcacgctcctcccctaggagggagggcggcccgagagcctgcagactgcgcctgcgcagcctcgctcacacacctccccgcccccccgcacctccttcccctttcgccccgccccgttcccacttctgctgccgctaggggtagcggcggcggcggcggctgcggctcgggagcgcggctgctttgagggctcgggaaccttacagagtggggacgtggggaggctagagggtgagaaagctggcgggagagtagggcggcgctggaggagggcggtgcgtggctgactcatcctctggaagatcagactgacagagacacacactagcccgc

SEQ ID NO: 41063 - DNA, 2300 bp, Homo sapien
tttaaagagaaacctattcttaaactaataatgctttctgttctcaagatatcaggacatcttcttaagttctgggtcttgtttagtgagtaagaatcattagctcgttcagccaaaaggtcttgttatgggtagagggtgtccaggttcgtgacatcttgaacaaagaattggacaaaatgtacaaaccaaggaaagaatgaagcaacaaaatcagatttattgaaaatgaaagtacactccccaggatgggagcagcccctgtctaggggctcaacagctgggttacagaatcttctggggtccaaatacccactagaggtttcttactggtcacttggtgttcaccccatgcaaatgaagtagtggcctgcaatcagaggctgaagtaaagttacaaagttgcactcctatgcaaacgtctgattgaggccattatttcatttgcatggagtgcacaccaagtggccaatgggaaacctctagtgggtatttggattgattggtggctttctgcaaccaatcagaggtactttcaattttccttctgccctgcagaaaagcaggtttgcaaagggagtaacctctggtccttctgttacttaggcatagatagttggttttttccttttgatttagttctacgaagtcagtgtgaatcagccttaggttccctgcctccagaccctattttcctgcctcagtcttattatggagagtacttaactttctgggaatgtaacccagcaggttttgctttattcagcctttattcaagatggagtcactctggtttggactcctctgacagcgggagtgaagtagaagtgatagggtttctttacagttcttatatccaactatttgatttagtctatatggaattcccctttgtcttctttaggaatatcaaagcatttcaacaggtatttagtacctgtgagctagccaacttgttactttgtatctttttaagtatctactctttactagttattgtctaagacactataatgtctctactcactatagcaatcttctgaagattagattccattttataagtgaagattccaattttgaggggtgatacgatttactggaactcagatccttctgactttcaaatagttgtttcttggaccaaaggacaatgaaacagtgatgactatatctgcatgaaaagggaaaaagggagctgtatctgactcttcactttcagaaaataaggtggctgctgatgctaacctgagagcagcattaggctatgggaaagctttctccaaattcagatcatcattttgttacaggaaaggggtcccaatgcagactacaacatggggttcttggatctcatgcaagaaagaattcagggcaagtccgcagtgcaaagtgaaagcaagtttattaagaaagtaaaggaataaaagaatggctattccatagacagagcagccatgagggctgctggttgcccatttttatggttatttccagatgatatgctaaacgaggggtggattattcatgcctcccctttttagaccatatagggtaacttcctgacgttgccatggcatttgtaaactgtcatggcgctggtgggagtgtagcagtgagcaccaccagaggtcactctcgtggccattttagttttggtggattttggccgctccttcactgcaacctgttttatcagcaaggtctttttgacctgtattttatgctgacttcctatctcatctggcgacttagagtgccttaaccgtctaggaatgcagcccagtaggtttcagcctcattttacccagctcctatttaagatggagttgctctggttcatgcgcctctgacaatttcatgttaatttttctctttgaattcatgagcagcactgaagagagtgcatgaggtttctggaaaatagcaatttgaagtcttttagtccataagattccctgttataaatgtcttcctaggctgaaaaaaaagtaatggttgaccataaaaaagatggcggccgcagcttctccacagcaacggcaacgccattctcaagcaagcgcatcaatatatttagttccggcctctttgcacgtcatttccggcaccggcatggccgggtgagctgcaggctaccttatttaagaccgggaatttagtcagcctggtgagccgactctgaggagatggagtatcgctgaggtgatgagagagaatgtggttgttagcaacatggagagagaaagtgggaagcccgtggctgttgtcgcagttgtgactgagccttggtttaccca

SEQ ID NO: 41064 - DNA, 2300 bp, Homo sapien
aaaaaaaaaaagactgccaccgctcctgaaagttctcggcccaagatggaatttagtcaaagaaactcttacactaataaaatttgtacatcaaattaagatcagggacagttaaaacattaataaagactgaagcatttgttcatttaaaaaattttatttaatatttacatttatttttaaaataaaaattagaggaaagcccatgaactcattttccatgaacataatataatagtactcacctatctcctctacccaacttgtgttttagatgagtccttttggatctttttccccataatggcctctctccttttgctttacagtgcaatcagggcagaataacagatatgttgagtagctaatttatatttctgaagatctccatagaactcttaagttctaagtcttcatagtctttgcaccttgccaagtttgctttcctttgggaattctgtcataaccacaaggttattccccagacatgcagtttggggaaattaacccggcagtagtaaacagactggattagaaaaggtggcagtcgtaataaggatattccaataaccggggaaagctacagaaggatcttgagttaggatgatgacagttacaatagaaaggagaccagtacaagagacggtgaaaacagaatggatacaatttagttgaagaattggctgtgggtgaaaagaagaaatcaaagatgcctgaagttgtgagtttcaggtagccctgagtttataatcctagttctgactcgtactatctttggatatactagctgctgactactaactgaacaaggtagtaaccttgtcatcttgtaacttacctaagtctgtttcctcctctataaaacaaactatcaaaataaagccgatgaaaagattgaagtaaaacataaaacccttagcacagtgcctagtatccattaagcagtagataaatgatggcggtcattattagggagtagggtaaagaacagaaggttaaaaacatgagtagcagtaaggacttttgggtggggattcggtctttctactacacattacacatacctctaagcagagaaaggggttggaggggagtttgataatgtgactaataatcctcctccccctgggggggatcttgataaaggatagccacccacatggaggcctaatataaactggattgcagaatgcacttgagctgggagcccaagcgggccaggcttcttgattcctattttatcccctttaacctaggatagctaggtctatagtgcagactcagacctaacttacactttcatttgcagctgaagtttcggaacaaagacaaagatagccagatcatattaattacacggataggcaagaaagcatgagccctgaggaggaaggaagggactgtccaggtgtacttacctcaaagatgagaaatatcaaagacaggaaaccctaggttcttgcccttcagtcgctatctccttgccattagtaaaatgcggccgatgaatgtcctcacttctgtccatctgggcaggaggtgggaagggtgacgtgcaaatggatgggaggaacccttttttcggcagcacccaccacacccagcctagtgccacgcaccgcaagcgctccataaacgcacacagcgtcgcctctaccaggatcccgggcggccttcgcgggatttctcctggcgtcggctttcagactcccgagggtgggataaatcgagagggtggcatcctttggcttttcttctcccaggcagctctgaaccatgtttatgcaacgtttaatgggctctaataaaacggctaataattttgatccgcggaagcaccgactcgctcgctaagccgaatctgcgagggtgaagctgcaactccaacgccggaaagcgcggctaccgaaaagcgcatgcgccacggggtggcacgaagctagagtaagctgaggaggtgggcggaaaccatggcaaccatgggtgatgacgacatggggagcgtctctagcgctggattatgacgctggattatgacgcaggcagtgggcgcggactctgcggttcgcttgactgacggcgcagcctccgggcctagccacagcagcaacggcagaggccagcgggcgaggtcaagatggtggctccgcgggcgggggaggcagtggagggaggaggagtcagaccttagccagccggaaacaccgaaacccagagacctcctggggagccgccgccgccgccctctcggccatcgctgcctccgccgcctgctccacctcgagggacgcgagcgggcg

SEQ ID NO: 41065 - DNA, 2300 bp, Homo sapien
acaaattatggtggtggtatacgttagcagtggcaagtaggaaaggctggaattaggtagcaggtgggttactgaagcagcttgggctgaacatcacgtttacatctttagttttaagatctagcatatgatcattactactgcattctgtatctggattgcagctgttagggaggaaagtaaaccatatttaatgtcaaaagatttttaagctcaggctctggcaaccacttagcggcagcctaccaagagcaaaacacttaacctctatgaccctgtttcctggtttgtaaaatgacaataccaccacccacctctgggggatgtttgaaggttaggttagataatacctaccagtgaaaatgctttgcaaaaggaaaataccagataaatgtaaaatatggctatttattgctaagaacaaaattcggcctttattgccactcctcttttgaaggaataaagcaacagatggcttgtaattcagaaaggcttggtaaagacctcaccatcagtctgccctcagcaacacttcaaaagcactagcctacttaagaccgatcaccagaattacctcatcaacaaaatttgccaagttacaattacttaaaaaattattttacgcataaatgcatctccctctgatgatgtaagtgaagatggaaaggaagaaatgaaatataagatacttttaacactccatccatacgaaacaaagacaatgattttcagaagtctctttggcaaatgtctcatcactttttacagtcactttcaataccttctcgtttattcatggaaaattttaggactcgatttaagcatcgccgctttcatgagaatttttggtaatggtttcaaggtctgacattcaaaaccctgtctccttcgcttggatgtcatttactgcagacacttcacgatcctgtggaccctcgggtgcagcagaagtgacaacatacaagtactcggcatttggtaataaagggaaactgaggcccacgccttggcagaagtccaaggtcacacacgacgagactgggatagcagagttgtttttcgaaggctgtcgcataggacgcggtaagccagtactcatttcccaaggcaaacgggcaaagagctgcatgctcacacatccttactttctccccacctcactcaggtacaacactgaatcctcgctagggggactgctccgctgtcaactcagacaagtatcatctccttccccctcccaacccgtaaagacgaccctttgagggatgaaactgtagttcccaaagacacatactcgacccatggcctctgcgcgcctgcccgctccccggggaacgtctcggcccgcatagccgtcccgggacgtacggtaccctgttcccttaccaaagagccggaggaagatctggagcacgatgcagaaccggctttggctggaatccgggtaggagttgaagatggcgtcgatgatgtaaaggcagggcacccggagcgccacttcgagcgccgcccagacctgctgatgggccatccgcacctgctgctgcgggggccccacggccgccatgagccgctgccacaccagggctcggtgggccgggcagggccgcgcggggcagggcccggggccgcggccgggggcgggggctaaggcgggcaactccgcccctgccctccttcctctcctgtctctctcacggccagccccgccgcccgctcgcgtccctcgaggtggagcaggcggcggaggcagcgatggccgagagggcggcggcggcggctccccaggaggtctctgggtttcggtgtttccggctggctaaggtctgactcctcctccctccactgcctcccccgcccgcggagccaccatcttgacctcgcccgctggcctctgccgttgctgctgtggctaggcccggaggctgcgccgtcagtcaagcgaaccgcagagtccgcgcccactgcctgcgtcataatccagcgtcataatccagcgctagagacgctccccatgtcgtcatcacccatggttgccatggtttccgcccacctcctcagcttactctagcttcgtgccaccccgtggcgcatgcgcttttcggtagccgcgctttccggcgttggagttgcagcttcaccctcgcagattcggcttagcgagcgagtcggtgcttccgcggatcaaaattattagccgttttattagagcccattaaacgttgcataaacatggttcagagctgcctgggagaagaaaagccaaaggatgccaccctctcgatttatcccaccctcgg

SEQ ID NO: 41066 - DNA, 2300 bp, Homo sapien
ttgcaaaatccaagtgaagttcaggttcaagaccaccatattaatgcagtgatttggaggaatttgcatacctggtttaagttccattctcactgcagcttcctgctactctttggtaacaagaaagccttagcagaatattttggatttaaatgatttgacagcctctataaatctaagaaataacacatttctttaagcctcagaacaaaaggataagtgatcttaaggacaaaccccttttttcctaccccctttttccaatcaaagggggtgggactttagcacgttttatttcctaaaaaagcagcagatcagaatcatcttttaaatggtgatatatatatagcacaagtgaaaagaggggctattacccatctgtcaaagagctgtaaaggtaacaaacaggagaaggtggttatatcattttaatgggtacataatccaatttcttttgtttgcacaaacagataatttaaattaatctagattatatcagtcttatatgatttaccaattcagacaattgggcatacttataacacattcacaaaaactaattggtactgtgtcttcatgaggggtaaaaaagaaaacaaaataggttgttgcttttaagactattcattgcatatgcaccatcttttttttcagtagtttttaacaggaaaagagtattagaagataagccagataagaacagtgaagaattattctataaaaatatgtttgaaaggttcttttcctttattaacatgcttgagctgacaaagtctttaaaactgaagcagccaggcatggtggcctgcgcctgtattccagctacttgggaagactgcttgagctcaggagttcaagatcagctcaggcaacatagggagacccctgtctctaaagaaataaagaaaattttaaaaaataaagaaatgtaagtacttgcaaattcagtgatgagacagtatttctaaatctttttttttttttttttttttgagaccatcttgctctgttgcccaggctggagtgcagtggagtgatcttggctcactgcaatctccgcctcctgggttcaagcaattctcctgcctcagcctcccaagtagctggaactataggcacatgccaccacactcagttaatttttgtatttttagtagagatggggttttgccatgttggccaggctggtctcaaactcctgacctcagcctcccaaagtgctaggattacaggcgtgagctaccacacccagccaattttttggggaactaaaaggacactagagaaaagaaactggtattttgacagcagccagcttacaggaagtagttgccaacagtgtatccaagtaagttttttatatttccttaatcttatgtaagattatagctgttgactttagctatatatttgcaagacaaaatttcaaggtgtttttaaatgtagactgtttaagaactataaaggctggccaggcatggtggctcacatctgtaatcccagcactttgggaggccaaggcaggcggatcacctgaggtcaggtgctcgagaccagcctggccaacatggtgaaatcctgtctctactaaaaatacaaaaattagccaggcgtcatggcggatgcccgtaatgccagctactcaggaggctgaggcaggagaatcgcttgaacctgggaggcggaggttgcagtgagcagagaccacaccattgcactctagcctggaagacaaaagtgaaaatacatctcaaaaaaaaaaaaaaaagaactgtgaaggcttcatcaatacttgttcttcagttagttgcagagcttaggaaaatctagcatctgcaagctgaaaagatttaaaccacatttaaaaaatacacaatcctctaatctactgctaattatgagttggcaagttaattgctacttgcaaagtcattttctcaacctccattctgttaacagttttacattctaattatttttatagaggtcttttagatatacattgtttgcaacagatgttttggagcccctgccatgtcaggaaaggtacaagttactaaggctacacaggaagaaccaagacagtccctgtctttatccatccaccagatgaataggtacactgtgcctggcactttagataaggcattcagtgagtcaggcgaggacccctgccctcctggagcacataagcagacagagtccaagatagtagtgctgttatacaagtaggaatctatgaccaggaccatagggcacatcaactgtctgctttgaggggaaacaggagagagttatac

SEQ ID NO: 41067 - DNA, 2300 bp, Homo sapien
ctgagctcaagcaatccacccacctcagcctcccaaagtgctgggattacaggcctgaaccacacacccagctggcctctgttattttcataaactgtacttttgcctacattcctataggaagctaattttccatccgaccattagatactgtgaatttgtagcttggtcatgtggtttggtccatggaattgtgtgtggaaaaaataaccagtacagcgtggagcagtgcacacaatgaagagtaccgcctgctgtgtgtagtcagagccaaatatattagtaaagttgacataatgactagtgcacacttaactgctgacatttggtttactttagaggttatggaaatagtgactggttatattatcaaaatctctttttgtccaagttgtcgttaatatttcctacactgcaaaatttcagcactttgttaatgaaaggaaaatatttttgcttattctaacccagcagaatctgaaaaggagattttaaaacccaaacatttggtaatacagacatagacgacctattttaggaagactatttctatttttttaatttttaatttttttttttttttttgagacagaatgttgctctctcacccaggctggagtgcagtggtacaatctcagctcactgcaacctctgaccctgggttcaagagattctcatgcctgccgaatagctgggattacaggcatgtgccaacatgccggctaatttttgtatatttagtagagacgaggtttcaccatgctggccaggctggtcttgaactcctgcccttgagtgatccacccgccttggcctcccaaagtgctggcattacaggtgtgagccaccacgcccggcctgaagactgcttcttaagaagtacatttctatttctaattttaaaatttagcattttcaagagagcaaagggggtaaaatagtcctgcacatcaggaaatatgatatagaaaaatatagcaagagaggcttaagttaaacagagaaattgtttccccaaattaaagtgcttagaagaggtaagcacatttaagaaaataataagccacctgttatcctgattcagttgaacctaccatttgtgagaacaagggggagcactgtgttgaagtgaaaagacaaacagaatgaacattcgttgtatcctctgaatattgtcattatactccgggaccagaaggaagcttcttgaaaacgtaacaggtttttgtcgtttaggctgggacttggaattagagcagtgaagttctgttccaagttggccatgccaggtattgttatcttggacaaagtactacacctctctgacaccagcttttatactcaggttattttgaggatcaaatgagacaatggtatctggtacttggaaaaaccttcttatcaagtactctttaagatattcagggctaccactttatcatgtaattttctttttttaatagcataattgagttatttgctgtttagcaaatacttagatttcatttttgagggaaaccttgttcattttgcccagtggcaataacttcttttataacagcacataaaaaactggttgcaaaatggaatagattagcatgcagtatgaagctctcctgggcttctcgcttggtgagttgactcccactgatggtgctcccagtggcaaggggccagtggtgttactttctgaaaattaaagggcccagataattttgtaagcccagaaaatgaagtatttctttccagaagttgtaagttataaaagccctttgataagcctgatgtgctttaaatattcatgatttttgtcctgtaatttctagagaattaaatacctttaatttaaaagctcttttgacatcattaccttcctcatgctaaaatacaatttgtaatgagaattttttttttttgcattatgcagatattttgaaaaacagtttgaactgtcagaacaaacaaaattaccaatgtttcttcattgtcgaaactcacatgctgaatttttgggtgagttaaaaccaaagtctcattcagaacttaagaattttgtagaaatcaagctatttgctaaaagttctttgtttttaattcacagacataatgaaaagaaatagagatcggtgtgtagggggagtggtaagtataaaatagtcatttttaatacaggttgaacatctctaatccaaaaatccaaaatactcccaagtacaaaatgctccaaaatctgaacctttttaagcactggcatgagataatgacacctttgctttctgattattcattgtacacaaatt

SEQ ID NO: 41068 - DNA, 2300 bp, Homo sapien
ctttaggagagtggggctaaaggaaaccatacagaaaaaaatttatttcaattatttattccaataaagtcaccttctttaagaagtcttttcttgcttattttatctgatgctaatccctttactaattttcttatcaccttagcactaaagccactcattcatactttcccaaacagtcattgtactacgcccctaggaaaaaaatataaataccataccagtatctgccttaagagtttgatctagtgggaaaggcatactcatatttaattataaataatgtggtataagttttaaggagtgagtaggcagacaggcaacagggtagttggtaggcagaggaatattttggccccaaactgccactctaaaaccttgtcagaggtaacaaacagcatgcacaagtgtttatagagcagcccagggatgggctagaaaagtgggcaggactggaccacagaagggctttgtatggtgtgtaagcatttaggctatcctgaggagcgtaaatgaaagatttgaagcaaaagaaacatttagctgatttgatttttagatacaccaaaatggagtctacatggaggatggatttaagacattaacttgaggcaggaatttggttgtataacataaacacacttttaaaaagttatgtggcctttctttacggagtacttcatggctctttattccatctccctcatcaattatatcaaaggttaggatggaaaggctaagacacggcaatgtcttatttgacaacccctccccaaacccctactccaggctttcccacagcaatttcaaaacctttttcctggcacttaacatattctcccctgcatttgcttttgactgtacagtacataggtcttaggtctccagtctgaaaactgcaccactagattttacagttccacaggacttagcacaacgtctttgaaaaaaaaaaatactgcttaaataactctcagatctaaatgtataatcctaatctcttgattgccagaccacattcccaattgcccagatatctctacctggatgtcctataattatctcaaacttaacctaatccaaatggacctgggtacctctcttcaccgccaaactagtcatgcttccatttcatatttaagtacttttccaaaccctgagtcatctttgttcactctctactaccggccatgaacactcagctgctaaatgctgcacacatctcttccatttctctctcttttccattaccctagtttaagctcttgaaatgcttccctacctctccctatttcccacaaaacctacataatagctatcaggattaccttgctaaagcagaggtgtgatcactgtcatttcccaccttcaggtagctggaaaccccacaaaacgaggatcatgcccatttaaatcccgcagcattctccctctcgttctactgatgccgactggatcattgtacttgccaagtacagtttgtttttctccccattacttgtgttttctagtttctccaccagatggtgatgacagtacaactgggagctttgtgccctgtgttcctaggccagtgccaggcccacttgaggcgctcactaactatgatatgaacgaatgaatgcttgagtgaattggtccccagaagcggtcagcctctccgccaaggcagaggggaagggccgggaggtgcacgtgggatgaatggaaacatagtgattggcctttttggagttttcttcttaaaaaactgaatacattacagatgttgaaaacagcacaaaaatcataactgtacggcttgttaatttttacaaataaatacaccctcgtgaatccagaacctagatcaagaaccagagcattaccagcacccagaaacctccccgcgccctcctccactgagcggccctttcaacccttacaatgccggagggcgcaattcctgggtcctgtgaccttggtgaccgacgcccgggacaagtcagaaagacccaagggcgtggaaaacgctcctcttaccgataaacttgaagcgactcatgactgcgcatggaggacctccccagcggaagcggaagtggccgccggcaactccgcccttccggctggccccgctcagtcacccgcagcaggcgtgcagtttcccggctctccgcgcggccggggaaggtcagcgccgtaatggcgttcttggcgtcgggaccctacctgacccatcagcaaaaggtgttgcggctttataagcgggcgctacgccacctcgagtcgtggtgcgtccagaggtaagggatggggac

SEQ ID NO: 41069 - DNA, 2300 bp, Homo sapien
tttttttttattattattttttgagacaaagtttcactcttgtcgcccaggctggagtgcaatggggctatctcggctcactgcagcctctgcctcccaggttcaagcggttcttctgcctcagcctcatgagtagctgggattacaggcacccaccaccacgcctggctaatttttgtatttttagtagagacgcggtttcacatgtaggccaggctgttgaactcctggcctcaggtgatccactcacctcagcctcccaaagtactgggattataggcgtgagccatcatgcccagccaacagtcgtgatctaacaagcaattcgaactacagctctagagacaaatgagcgcaggtggtgacagcactaaatgaggctgcccgagtacatacaacaacacagtatgcctaggatggaaccacagagaacagcacaatgagggcaaatggaggaagaaattaaggcaaggattgagaaagaatgtcagatctaaaaaatgctgagccataactgtcatagtagctagtttatatcattttcctctagaactatggactttagtattcccagctatagttcagtattgcttgaattctttttttcatgtttaactttttttgacacataattattgtacctatttatggggtacatgtgatattttaatacatccatataatgtataatgatcaaatcagggtaatttggatattcatcacctcaaacatttaccatttgtgttgggatacctgaatccctgatggctcaacttccttcatcatcgatttgtttacatgtccattttccccactaatccgtgagctgctgctgctcaaaaatggatttactaacatttatatatttagcatagagcatagaatctgaattgcaaattctgtcaaatcaataaataaataaggaaaactcaaggaagaaactaacaatcccatcacattgtacttggccatcttcctgccaaatcaagagaagtatgtcagtgattttctaatagtcacatatatgcaatctgggcttcgagggtaccctctgtaattcttccaggcctactccattttccatagagtttttttcccagaaggccttcttataaaactacgtttggagagtcgtaagactggagtggaggcgaggcactcacacatcttgggttgttagcccaccctgcaatgaatttaggtgattaaaatctacacattttaacactatgttctcagactagtctcagacggatagaggtcgaaagagaattatgtaagaggtgaaaaagatgtaaaggtaatgaaaaggactagatgaagctaaaaagagaaaagctaatgggaggggtgggagaatgatgatgctttggagaaagacctaaattttaaccctggctcagacacttagaaactctatcaccttgcgcaagttaccagctgtgctcatcttcttatctgtaaaataagcttaagataattcctaactcctagagttttgcagactgaagaaaataatgcatagtttattgctgttaatattggaaaggagaagatcgtgaagaaaacgattgagcgagcgctggacccatgacaattacaattttaggcactttcctttatttcacttaattttcctgcgaccctctgcgctggtcgtgcgtccgttttactaaacaaaaagctgacgcccagacccgacaagcaactctacaaggtctcccggccataagtggcgaagcctggatttgaacccgggtctaccataggattctgtgaagcgagaggccaccttccaattccgttcccgaagtccttgaacctccaggtacccaggggcctctccacctccatggggccccgagggtcacctccccgagtcctgggtccccatcccttacctctggacgcaccacgactcgaggtggcgtagcgcccgcttataaagccgcaacaccttttgctgatgggtcaggtagggtcccgacgccaagaacgccattacggcgctgaccttccccggccgcgcggagagccgggaaactgcacgcctgctgcgggtgactgagcggggccagccggaagggcggagttgccggcggccacttccgcttccgctggggaggtcctccatgcgcagtcatgagtcgcttcaagtttatcggtaagaggagcgttttccacgcccttgggtctttctgacttgtcccgggcgtcggtcaccaaggtcacaggacccaggaattgcgccctccggcattgtaagggttgaaagggccgctcagtggaggagggcgcgg

SEQ ID NO: 41070 - DNA, 2300 bp, Homo sapien
tggtccccctgcctgctgctcagacagccctcacagccgcggcaacctggaagctcagaatcgacaccaagagtggggctcctcttggggacagagggtgggacaaggctgagggcattttctagaatgagtgcctggctgctggacaatgaccacatggttgtctcaagggagaggaaggggtatggggaatttggaggtgtgaaggctttctcccagaccaggtgttgcgtgcctgtccatcctcctccctcccttcccgagccacccaccagaccgttggatgagccatgtcactgtgtcagaggctgtgtgcttttccgctttttagtttgcacccccacccccctgcccttgattgagaatgtgctcctgagcaatgcgatgattttggaaacctagaatgaacagattcatttgaagatgctttggaatttttaaatttgcataatgaaatgagcaaatcactatcaccattaaatgaggcttcattagttacattatcaaaaaccattgacaaggccacaaattgagggcactgatcaatttccaaacttctaaaacgtaggtcaaacatagatgcttatttgctgtcaaactcatgtgcattctttgcaccccggctcttttctcttgcatcacagatcatccgtgagcagcagagccccaatgtttgttttatttataaatattcaggtttcccctcccttgaatgtcaatgccattttgtatctccgcactcatcctgttatattaattttttttccttccccccccctttttttgtttgtttccagttgtctaacgggttttctcactatagtttatcaagtgagtcccacgtggggcccacgggtgcaggccttttccctcattgcctgcctgcctcccgcctgctccctcgggtcacctctgtccaccttccagactacgctcattattacaccattgggcccggcatgttcccgtcatctcagatccctagctggaaggtttgtgtctctccccctcctcctctccccgtcattgcctctgtgctcacccctcttctgttccaaccccctcaccccgactatcccctcatccccttcctttcacactctgccttcttccccataatgcctctccctcaggaaactcccattgggggagaagcagaaagcagccggcagctctaagacagcaatttccacaggtagctggggctgagggtcttccttcaggggactttggtcaatccctgatggacggcagtgcagtgtgcaccgcaggcagcggcaattccaagtccaaaggcccagttttgcatcaagttgaaatctatgggttggtccctcccgggggccacctgagggtgtcagcatgatcagagcttctagggggtttaggggggactttccttctggccatgtttcccattttccctaatgagctccctgctgggctgtggtaacagaaccataacccaaagcaggtttggggtgatcatgttgaacttaacagtacacgcagactttagttttagtcttgagtgttcaaacatgtttgctttaatataaagacgaactttgaaaatgatcccctagcaagtccgatcaatgctcctccaggaggataatctgctctcttttgagaggaggaccctaatttgaaaagtaggccccttggctgccagcgttttaagcaggttttgactttagccctcacaggcggtgtgggcctctcaaggcttctcggaatctttctactgcccctgggcgccttcctttccttctgagggcttgagagggcagggagcctgccatgccctttgaggctggtttcctgggaatggagggagaagggctgatgttgctttagtgctcgctggtggccattcccctaacgggaagccatctgggttgttaaggagcgctggtcccttcagacaggagaagcacgatgtactgcccactggtgggtccccttagcttacaccggtcacctgttaggtggctgccgggtctcctgctgccacctggtgggtgagggtttttaatctttgggcagagacgaggaaaagggaggtacacagggggctcccaaagggtttccattccttgccctttagagcctggagagggcatgcagagggcctgtggcttgtcccagccggaggttccccttaaggggaccagctgccttctctggggagctgtctatggggtccccgcagccctccagtggaggcagaggccctggctcctgaccgcacttgttttgcataggactgggctaagcctgggccctatgaccagcct

SEQ ID NO: 41071 - DNA, 2300 bp, Homo sapien
accctgtcttaaactccagaagtggttgcctgcacctaactggggtctgtggacctggccagataattcctaaacatgggccaggctccgcatagaccccactttcagtttttcatcatcagagacctgtctggaggtcttgttattactgggcttgttctacagcaagagcattcaagactctccactagagagtcaaaggaactgccaaggattcccatgggcccccagagccaggagagcggatgcttgccacctttgtctttaggagcagatccttctatccagacagaggctctttgattgagattgacccaacaaagccagcccgtgcccgtttttggaaacacccacaggctcttaccttgtttccacatctcttagcctcttcagaatgttctgcaaggaaagaatgctgtctggctctgtgttccagggttgtgttggcagaagagttggtgggggttgtgcagtgtgagaaggcaagtcatgaagagttgccccaggacattttccttgtcaggaataagccaggctaaatgtgccctttgggcattgaaaattggaaatggctggtcctagaaaaacagctgccttaaatccttttggggcatgaataaatactttttttacatcctggaaaattgtggttttgactccagcaaggaccccagggaggaggggcacttgttccagaagctggtatttcagcaagccgtgcttgggtctctgttttttgcagggagaggtgatatccagcctcagttggacagtgctctccaagatgtcaatgataagtatctcttattggaagaaacagaaaagcaggctgtccggaaggctttgattgaagaacgtggccgattctgtaccttcatctctatgctgcggccagtgattgtaagttaatggaaaactccagaaggtttaaactgctggtgtagaggtggcttccttctaattttatccatccactgttgagtcatggagaatctactgtcaggaatcatgatggtggtatctcctgtacagaccagcgattcagtgcaagttgatggccatgtagctcactcctcattcactgttctagtaccacttgttccccgttactttgtctcaccaagtcaagaaggcccagcagggtggttctcaaagtgaggtccccaggtcagcagcatcacgtgggaactggctagaaatgcaagttcttgggcccaacccagacccaccaagtccaaacctctgggggtggggacccagtcgtctgtgttttaaaggagcactccaggtggttttgagactcactgttgtagccgagtactaaggggtgaccatgagatgaatatccaagagcctcaatgaatcaatttagacttaatttttaaggaaatcatttgcatgccgtaattgagaacttgcactgcaggcgttctggaagctgattcgaaggtaccagctcatttcccttagccctagcaaaatgtctgaatttgagttgttcccctgagcacagaacttttccatggatcgttctagcccggcccgtggtcccaacttggcacttcgataaagcacatgggatgtttcttccatggtccccagctcctgtcttacttgtcttttactaagttgctggaaaagcacaagaaagaaggggaaaagttagcttctgttgaacacacaggcactgtcacaaagatctggaccaaaatatatccaagtcgtgtcatccattgaagctaagcaacttcagaaaagggccacagtatgaagagggctgtgctgcaggatcccgtgggaacacacagtcagaccatctgagcaggcctggcagtcccccaggccctgggagggaggcctgtgtgttccccactgtcccctgtgcacaggtcactcctccattatggcagatttctttttccatctcatttcccaaaagaaaaggcatgtagtgccttcagcaaagatttgccagtcccaacagtgccttttctgaaaaactgaaagggttatacagagaccctaatgaaaacaattggactagagcgatgaagggaatcactcatgataataacatttcatgaatgacttttccttcaggaagaagaaatctcaatgctaggggaaataacccaccttcagaccatctcggaagatctaaaaagcctgaccatggaccctcacaaactgccctcctcaagtgaacaggtaggcttcaggggttaagcacttacaggatcaaaccaaagaggtaaaagctcaaggccctgagtgttcctgtggcatgtgtcacgtcttaa

SEQ ID NO: 41072 - DNA, 2300 bp, Homo sapien
gtgggaggatcacttgaggccaggagttcaagaccgtctggccaataaagcaagacccaatctttataaaaaaaaattgaaaaactagctgggcatggtggtgcacgctggtagtcccagctgcttaagaggctgaggctgcaatgagctatgatcattccactgcactccagcctgagtgacagagcaagactctgtctccaaaaaggagaaaattatgcagagacttctcaagcagcaaatttcttatatatagtagttcccccttctcctcaggggatatgttccaagaccccccgtggatgcctaaaactgcagatagtacccgaaccttacatatactgtggtttttcccatgcatacatgtctatggtaaagtttaatacataatttaggcacagtaagagattaacaacaataataatagaacaattataacaatatactgtaataaaagtcatgcgaatgtagtctctttctctctttcaaaataccgtattttaccacaccatgggtagctgaaactttggaaagcaaaaccacagaggaggggccagtgtagtataatcgttgggtagcacccctccgtggacttagatacatactatctacacatttgtactcacttgactgatgagagttatatacacaaagctgtccatactgtatttactggccatctaaggcattttcaagggtgatctttgactataattttctcataatgtgctaacttagaacttattccctgtctgagaagtgacttttccttactaaaatctgactaccttttctattgggatgtgctttaagcctgattgcctcttgctccaaattaaactttctcctctgcttatgagtgaaaaatacagaatatgttcctacatccaaggcaattttccctgaccctttctttcttcagaccaaatggttcattgcatttaatgttctctacatcactaagagggatagatggaaactgcagggcccttcctgcgaggcggtggggcagagaataggttcagtgttaagggaattaggcagtgtggctcaaccctgcctctgtaccattctttctgtgaccttaggtgagtcccttgacttctctaggacttggtctccattgaaacatgagcagattggcccaattggataaccccttccagctctaacattttgtgttgaaactattaaacagacatttatcaagcacctgctgtatacacacatgacattgtactaggggctgtgctgggaaagaccaaaatcctgccctgaagaagtttaggaagtatctctctggtttgagtgataggtaaggcccctgcataggcagcccaaggtggaagctcatgagctggtgtcccctgctgtcaccctgctgtccccacctacagatcagatttgtagtagctgctcctttggacacagtgcctcttggtccatgtttatcttttagggcagcaggcttcttttgcaagaggccatggtctgggggccatactctgtgtcacactactctgccattgtagggagaactggtacaggcaatatggtaaataaatggatttggctgtgttctaataaaactttatttgcaaagatggtttgctgaccatgtgttagtcattcaaaagactaacaccctgtcttaaactccagaagtggttgcctgcacctaactggggtctgtggacctggccagataattcctaaacatgggccaggctccgcatagaccccactttcagtttttcatcatcagagacctgtctggaggtcttgttattactgggcttgttctacagcaagagcattcaagactctccactagagagtcaaaggaactgccaaggattcccatgggcccccagagccaggagagcggatgcttgccacctttgtctttaggagcagatccttctatccagacagaggctctttgattgagattgacccaacaaagccagcccgtgcccgtttttggaaacacccacaggctcttaccttgtttccacatctcttagcctcttcagaatgttctgcaaggaaagaatgctgtctggctctgtgttccagggttgtgttggcagaagagttggtgggggttgtgcagtgtgagaaggcaagtcatgaagagttgccccaggacattttccttgtcaggaataagccaggctaaatgtgccctttgggcattgaaaattggaaatggctggtcctagaaaaacagctgccttaaatccttttggggcatgaataaatactttttttacatcctggaaaattgtggttttgac

SEQ ID NO: 41073 - DNA, 2300 bp, Homo sapien
ttcaaggagttctcatgagagacaagggcctggtggtcaggcccagggaaaaaggccacaagagaggtatgctttggcaaacattgctaaagttggggtatttggggcattgaaatttaagcatgtggcaggaaagctagaccaagtgtccactgggctaaggccccttatcccaggagttcaggaggctgggtaaaagagagacctggggcatggaagtcagaaaaccagggttggattccttccaacagtgcaacaaggaccagaatgataatttccttcaagtagacataatacgtataaaatgcccagaatgcacacagtagaccctcagcaatgtgcctgggacagcacaccaatgttacagaagtgaaatggggccagggctggacctgagccttggcctcatccctgcttcttctgttgataagatttatcgaatgattacttacgagatgccaggtaccacttgaagtgctttcatcgatcagctcatgtaatgttcagaacagccctatcaggtagaagccatcattatccccatttacagatggatgaggaaactgaggcccagaaaggttaagtaacatacctaaaggcatacagttagtaggttgtgaactggagtttgaatccaggcaatctggctctacaagcagtcatcttgatagttagaataccaatagtattaaaatcacaataatgattggcagcaaacgatgtgtcaagcacccgttattggcaaggtgaagatgagtcggatgcattcgaacgcccttggggacaggatccagcaggggtgatcaagagatcagttacttcctgaaggtaacacccttccgggtgatttcggggagacggatggggaaggtgggttgcagttaagagttgggcagagtgatccaggggaacattatcttctgcagctgtgctgtgtaactccatgcatccctttgatccataaagttttcaaagccagaccttttcccattacggagtgaatctgacacaagtgtacagaattttgcacttggtttcttttggccccactccccccagtcttttcttttgttatgttttgtgcttcaaatggttagctcaagggttaaaggaactgtccggagttaggtgcctatgtcttaatatcttttaaaagttgctcatttgattctcctccctctggcccatttggcgttcatctgaatgagggctcctggttatgcagataggcagtggagctgtgaaaatggaccactaggccccaaatcaacctgggcacatttgcgctctgcaggttcaacctcccaggagggctccctgcggttataccaacgctggctgctctcagtgggcctgaaaaccatcaaccgtccaagtcataggcaatcagcaatctcgatagactgatggatcgtggacagaagctctaacgctgtttccattcatttagcaacagcaaatcaatccactttcccagcatcctgcaactttatcgaactcggcatcccattgcaggatacgcccccgaactctccttaattatatatttcgctatttgcaatcaggactcggcgatgcagtcctgacatcagagaatgggcgtcttctcagaaggccgcagtagcggcagcagctttcccgccctactgagcgctcactacaagcgggctctgggctaggcgcgccacccgtgcaagtccccggggagcggcggtgcaccctccgtcccgcgcgctcgcagccattgtaggggtgggcgctcgccaggcagggtgccgacacgccctctccgcgctgcgacgggcggccgggggaggagagggtgcgctgtgcgcaccggagggagaggctccggcccagcgccgcctgcccgccagcagaccagcaggctcctctttgcggcgggtgccccacgcgcctctcgggcgcgcgctcccagccccgcccgcgtgcggcggccgcacggccgcgagagcgcgcctccgcttggcgggcacggccgcgagcgcgcgtgcgcccctccgaacgtccccgggagcccagccagagcgagcgccggggccgggcgcgcaggagtgaaaaggaggcggcggccgcagctgcgagcaacagatccggacgccgcgagctgacccgctctgctgttgggcgatttttttttaattgcagaaaaatttattaaattggaaaatcttgcgtttttcaatggcgctggccccgggtcagcgggcgattttctctgcatcaagatgggctttgccgtttccgtagtgggcaccagtggtggcctgattgtcagt

SEQ ID NO: 41074 - DNA, 2300 bp, Homo sapien
gatactggaaaggtataacactaataaccttgggaagctataacattaaacagtaacaattagaatgaagagaataaagacacaaatttaaattcatagtgtactgtattagcacttttatgactggttttagtagtgcaagtggctacagcttttcaggtggattatagcactggtgagaagagacctttcttgatcttattcttgtgttctcactcttgttctccttttcactgtaaaattcctgagagaattagccaaggatgcagaatatgatcagaaatctggggccataagaagctggagcagcaaaacacattcacagtgcagccagcccttggctcccagaattcccaaaacaagtgtgctcccttcagaaatacagtccttggagtaggaggctaacagagctaaggtactcatttccactatactataacctggttttgctatggaattgtatcatcatttcagaaagaatttatgccgacaactcatgcgcttaattgaaaatatgctcatagacctcctcgtactttttgagtcacaaaacatcagcaggctctctcatacagaaggaggagaaaacagagtgtgtatccttcacatgtgtgagcagtatcttctctctggctcttcagggtctcagcaagccatttccccatagtataataatttcggtaatcaaagtgacattctgtgcatgtattgtcacttcttaaggtgtttagagcatgccaacaaatctgatttattagattcatagttttaattatttgtttatctaagagcttgattacaaatttgtaatgaatgcttaaatgtctggggagatttaatgcgaagttttgtgcttttgctgattatgtgtaaatagtgaataaatatttggaattgttaaatgctaaatattagaagaagtgttgtttatagattaatgagttagcacattcataaaagacaggtaacagtgactttttctctctgcattaataaccactcagacattaatgggtgtcagtgtccttatccatgcggagaaggggttgaattcaatcattgctaagttttcatacatctctaaaatgctggatcataatgaaaattcagaaactctttcgctcatgttcacaccagatttttaccatcctacaacaacttagaccttcagcatgcctttcattcttttataatatcacagctgcctctgtgtaaatagactgtcagcattacatcaaggcatatgtctgattgataggtctaccaggcacccttacgtacaatcaaaactcagcctgtcttgaagataattaccagcttcagcacatctcagctgctgtcaataaactttcttgtgtgtgccagcttcctatagcaatggaagcaaaccagaactgcccacttcttatgacattttccatcaattttttacaaagcctgagcatttgaatagtgcttcactgtttacagagcaatttccctttctcacaaccatcctcattttacaggtgaaggatctaaaacctgaaaagaggccaaatgattcctcaaaaccacgcaagtacgaagtagcagagcggatctcaaatccaggtgtgtctgacttccagcctaatggcttttcttaaaaacacccccaaactcttggtaacatctatgcaatgaaaagggttgtcatgaaaactgcttcccagtttgttaaattcttatgcaggtctccagtgtcagaaacgctgagtatcactaatctcaagaccttctctctgctatacgagctctggcagagcttgtctccaagggctagacaggaaaaaaaaaatctgggttcaattaaaatatatcaataaagagaactaaaaggagctccaaaacgttgctgcccttctgcgggctgtctgtgtgtaatgccggctccttcactcttttatggcaccatgattgtgttttaccctcccgactgttaactgccaactgttaactgttaactgcccaaggttgccctgctgatgtcatgcctgaccatatgacttgctccagccaatgaaatgtaagcagaagtgacatatgcagcatgaccagtggaagcttcgaagagctattgccaatttccaccctctctctggaaactgtcattagggttagggaaactgtcatgagatctgcatattttagatagaggctgcttgccttatttgggcacctaatgaaaaagacatggaggccaggtgcggtggctcatgtctgtaatcccagcactttgggaggccaaggcgagtggatcacctgaggtcaggagttcg

SEQ ID NO: 41075 - DNA, 2300 bp, Homo sapien
aactgtcattagggttagggaaactgtcatgagatctgcatattttagatagaggctgcttgccttatttgggcacctaatgaaaaagacatggaggccaggtgcggtggctcatgtctgtaatcccagcactttgggaggccaaggcgagtggatcacctgaggtcaggagttcgagaccagcctgaccaacatggcaaaaccccgtctgtactaaaagtgcaaacacaaagggaactgcgtggcttgtttctacctgaacattgtcaagtgatttcatcctttgaaacacagttgtgaagtgtgtccagcagtctgagaacaagaagaagaagaaaatctaatccttcagggtgtctgtgtgccagccctgctctcagcacttcccatgtggaactcctttacttctcctaacaactccatgacatgggttagactgtgattgttcccatattgttggtagggaaactgaggcatgcaggtgttacagagctctctcaagtggcaagctttctgggtggttacagagtggcagagctggggtatcccatgatgtcaccacactgctatatggaaaagaacattaatcgagcacctacgtgcttgattctcttaattctgtgactgaactctcaaaacaccctgggtaagcactatcatctcctattttcacaagtgaaaaaactgggattcaaaaaaattaagtgacttaccaaatattacagagctagtaagccaagacttgaacactgagatggaattctaccttttaaggtggctaagcaacagaaggatgttcctttcccaagggggtaagaagcagtggccatgttcagcacaattgtcctatcacaggttcatggcagggaccgagcagtgaggatgggcactgccctgtgtcctagcagagggctgccttctggctccccagccttggccagcagcccttctatcttcatgccatgacctatttttgttcacccagttagtgtatggcctatttctttccttaagaattacttcataactttcacagagtaatagcacatgctgagcacagcattcatgaacttggacacacgcacacaaaatgtccctttaaattcacagagcagtatctgagatccaggtagaaagaccaaaaggaaaattaagaacagactctcagacctgccttccctttgcattcaggttggtttcctttttacaactgcccaagtcatgagttcatagggcctggatggctgtaccggattgctctccagctggtctctctgcatccagaaatttctacaacctactggggtaaaatctttctcaaccctgcttttcatcatcacatcttaaatatctcgagttggttccctattgccaaaaaaaatccattgtccatgtagggttcttctgccgaaacgaggaaagagtgagttaaatgttggtaggtgatatagagatagtaattaggcaatataattcgatgttgttgaaagagctgagctatgaaatgcattgtgataaaggggctgcctgtgtaagtaaatgggtataatgaggtgtaaaactccctttctctctctctttctgcttcataagcctttctgcttctcaagtccagacctgctgtttttggggtttccttccaatttttttgctgcttccctggggccttggctcttgggcctgctgcctcttcccactctacacctttggattccttatctttggctccaccttattgctccattctccaaagacaaatccacaaggcataggattttacagaatatggggttacagaaacagcatagggaagtgtaaaagcctagaagcttcttacagacgcagccccttgtctgtagctcctgactcccacttaaatgtctgttggaagcaccctggggtagcagaacccagctcagaagatggggcttatccaccatgccttttcctaacctgacacccacccagataatcttttcaatatgcaaactagagcgtatcaccccctgctcagagcctttctgtgacctcccattttgcttcccaggactccttgctccttagccaggtctccaggtcctccgtgatcaggtctctgctcttctgcagcctcatctctgccattcttcaccttttgtgctccaacccaatctggttttcttctcatgctttgaacaccccaagtctgtctgcttcaggagcttcgtactggctaatcattcaccacagcatactcccatctatacggctggctcttatattatgggtctcagctaaaatgtcatcccttcaaagagacc

SEQ ID NO: 41076 - DNA, 2300 bp, Homo sapien
gtgaatgagagggagcaaggatgggtatctatgggactgttaggagggtatggaaatccttcaaatggggggtgatggttgcttgaattagaggtgaccctggtggttagaagaaacaactacaggtgagaattatttattacacaacagatgaggcttatttatgaattgtatatggaaggtaaggaaagggaagtgaaaagaagggcttctgggtttccatataactggatggatggttgaaagaatattggaagagaaacaggtttattttgttttattttgtgtttatatgtgtatatggagaagaacagtgagagagaagacagattatgattttgatttttgacattttggttttgaggtgttattgagacttcctgtatgagatgccaaatagaccattggttatgagtgaagagctcagacatgtagcttgggctggagaagtaaatttttgagttgtctgcctaggtggtatttgaaaatgtgggagtggatgagattgcctaggcagagaacattcagtgataagaggagaggatgatcttgagggactgacttggaaaagagactaacaggactgactagagatgttggaagaaaaggaggagaatgtgatgtcacctcaaaagagtgtttctagaagacgagtccgtagccatatcaaacctcctgaaaaaggacccgagaactaaaaataccagttgcactaactaacatcatggaggtcattggtgatgctagtgatttttttgttgttgttgttgcaggagaaatgttaaggttagtggaaaattgatgaaatggaaacattgtgagtaaaaagagaaaagaaaagctgagggactatttggggatgggggtggagggatggagagtttagttggtagtgcgaagtttccaagaagataggtaggaaagtgagtaccagtaaagggcttattaaaataccaaagagcccagcactttgggaggctgaggcgggcagatcatgaggtcaagagatcaagaccatcctggccaacatggtgaaacccagtctctactaaaaatgcaaaaattagctgggcatggtggcgcacacctgtagtcctagctacttgggaggctgaggcaggagaattgcttgaacccgggaggcagaggttgcagtgagccgaaatcctgccattgcactccagactggtgacacagtgaaactccatcacaaaaaaaaaaaaaaaaaaaaaaaaggtcacagagggactctgtattgtaacaggagggaagaaagaaaacggcagggtgcagacttgagtagatttctgtttggtagaggtgagatgaagggattggcttctattttctctgtaatgaaagaggagggattaactacttttctaggtgttaataagggtgccttgtaaacgaattgttttatatgtgaatggatgccttagctttctaactttcacaggtaagtaaatatatatccatgttcatagcggtgggaacagaaacaataggtgtttaaaaatactagattgaggccgggcgcggtggctcacgcctgtaatcccagcactttgggaggccgaggtgggcggatcacgaggtcaggagatcgagaccatcctggctaacccggtgaaaccccgtctctacgaaaaatataaaaattagccgggcatggtggcaggcacctgtagtcccagctactcgagaggctgagacaggaggatggcgtgaacccaggaggcggagcttgcagtgagccgagatcgcgccactgcactccagcctaggcaacagcgagactccgtctcaaaaaagaaaaatactagattgattttgattctaatagtgatgataattaatctgatgatattctgatggcaaggaaaagtataagctccaatcaggcccctgtcgtaagccgcctgacaagtgagagaaatgaggttcacagttggctggtcacagcacagggaaaggaaatccacccccacgctccttctggtccaggaccctaagggttaagatcaacgagagtgggccatcactgtttcctagaacggccccagcaaagccgccgggggagatgagggtaacttcctgtttctgccttccgggtttgagagtttaggaccctgggttggtggggtcagagggagagggggtaccttcctcccggaccgctgggggtgcagggcgccttgggtgtagcacccagaacagtgagttccttcttggggggaagggagccgagggttgcgggctagaggagtggaaacagccccgtccaggctgcagtggac

SEQ ID NO: 41077 - DNA, 2300 bp, Homo sapien
catggtgaaacactgtctctactaaaaatacaaaaattagccggcatggtggcacgtgcctctagtcccagctacccgggaggctgaggcttgagaatcgcttgaagctaggaggcagaggttgcagtgagctgagattgcgccactgcactccagcctgggccacagagcgagactctgtcacaaaaatttaaaaataataaaagagtcagctgctcctctattattttaacaaaacagaactcacagataccaataagcagtttattgaagaattctcttcaggaaatgatttcccatacattgaactgattctcttttctgcagtccttttaaatttgatgtcagttcagacagccaaacttactggtaacagtgaggaatattgtagaagaaagaataaaagtattggaaagcaaggcagttattgataattatgcatactggggaaccacaagatttggagaccaggactttgacttttggtttcatcattacgatttaatcacagctgtgatttagtcaagccatttaacctctttaattttcattttcctcattttaaaaatcaaagttgttttgagggtcaagtgaacgcctgtgcgggtgttttaccaaataattattttattagcagataaaacataatattgggggtgaaaagttataagaggtgccatgtttttttaaaccctgccaagtatctgatacagaattgcaaaggatgttcgagttcatgaagaagttgccttctccccacagaggcagagtgacttgtaacatctgtaaaaggtcacagtctggttagcggtagccagaatctgggtctcctaactctagttgcctagtcttgcttttatgcgccagtgtcgttcatcattcattaaatacatgttatggaggataaattaagggcagagcattgtgctaggtgctgtgggtgatcttatcagacacagatctttagggaatctagagattaaaaagtatgaataaagttatgtgacttggtgaaggtcaatggcgatttggtggaagaggtgacaatgcagccacgctccaaaaggcagaagggatttgcacctattatcataggggttaaagaaggaagtccagagttaagaaacaggatgagcaaagacactgaggtcttaagcctcaataaattttaggtaagtttcatcgtagtagaataagggctgtctcactccgagacttttgcacacttttgctccctcggactgcttgtcctggacaccgtgtaacctccccctgggcgcctcaccagacttctccaggccaagggaaggaccacctcttgggtttccatggctccctctctaaccacccccttctcaggacacctatgacacgactatttgacttctttgcctccgagcccccacccccaacgtttctggtcttgagagaacgggctgggcgcatccgtgtatctctagcctgagcacctggagcgtcctctccttttcttcttaaggcaaaagcctactcattcttccagcttcagctggaatgtcaggctctccacgcactcatggccctcccttccgccctctccacatacacagggcagggaagctgtgtctgattcctctttcggactccggggactgacatatcataagcgctcaataaatgctagcggaatgaatggaaacgttccgacccgaggcagcggatcactccaggcttctcctcaaagcgagcacacctcagtccagggagggcgcaggagctggggctgctgcggtgaaccaaccccaaccccgaccccgacgccgatcccggccccagagcgcctcctaggcgacccctggccccacccacgccggagccggcccgcgcccatccccacgccccaacccgcaccacgcaacatcgccctagcgcctttcggggcgtcgccgcgcaggttgcgccgcctccgattggccaaacgcggcatagcgccatctcggcctaccgcgcggtgcgcgccctcattggccggcggcggcaggagcaggggtagggggcggggcagcacgcggggcgcgcggtatgggcggactcgcgcctgagccccgcccccggtccctcgtctgggccgagcccgcccagctggctgagacgcgtggagcctggcggcgagtgggggcgtgcgacggttactctggttactggggccgcgccgcgctggcgagagccgccgcccgcgagggatgctggtgaggaagccgtcgggagccgccgccgccatctgagggaggtaccctggaaaccaccttttatcggtgggg

SEQ ID NO: 41078 - DNA, 2300 bp, Homo sapien
agtgacttgtaacatctgtaaaaggtcacagtctggttagcggtagccagaatctgggtctcctaactctagttgcctagtcttgcttttatgcgccagtgtcgttcatcattcattaaatacatgttatggaggataaattaagggcagagcattgtgctaggtgctgtgggtgatcttatcagacacagatctttagggaatctagagattaaaaagtatgaataaagttatgtgacttggtgaaggtcaatggcgatttggtggaagaggtgacaatgcagccacgctccaaaaggcagaagggatttgcacctattatcataggggttaaagaaggaagtccagagttaagaaacaggatgagcaaagacactgaggtcttaagcctcaataaattttaggtaagtttcatcgtagtagaataagggctgtctcactccgagacttttgcacacttttgctccctcggactgcttgtcctggacaccgtgtaacctccccctgggcgcctcaccagacttctccaggccaagggaaggaccacctcttgggtttccatggctccctctctaaccacccccttctcaggacacctatgacacgactatttgacttctttgcctccgagcccccacccccaacgtttctggtcttgagagaacgggctgggcgcatccgtgtatctctagcctgagcacctggagcgtcctctccttttcttcttaaggcaaaagcctactcattcttccagcttcagctggaatgtcaggctctccacgcactcatggccctcccttccgccctctccacatacacagggcagggaagctgtgtctgattcctctttcggactccggggactgacatatcataagcgctcaataaatgctagcggaatgaatggaaacgttccgacccgaggcagcggatcactccaggcttctcctcaaagcgagcacacctcagtccagggagggcgcaggagctggggctgctgcggtgaaccaaccccaaccccgaccccgacgccgatcccggccccagagcgcctcctaggcgacccctggccccacccacgccggagccggcccgcgcccatccccacgccccaacccgcaccacgcaacatcgccctagcgcctttcggggcgtcgccgcgcaggttgcgccgcctccgattggccaaacgcggcatagcgccatctcggcctaccgcgcggtgcgcgccctcattggccggcggcggcaggagcaggggtagggggcggggcagcacgcggggcgcgcggtatgggcggactcgcgcctgagccccgcccccggtccctcgtctgggccgagcccgcccagctggctgagacgcgtggagcctggcggcgagtgggggcgtgcgacggttactctggttactggggccgcgccgcgctggcgagagccgccgcccgcgagggatgctggtgaggaagccgtcgggagccgccgccgccatctgagggaggtaccctggaaaccaccttttatcggtggggaagtgcagtcgcggtgggcggctctgggggccagcgaaacgggaggcctctaaatctttaggttggggctgcattgccctggagccgcactcttgagtccgaggccatcttttgttggagaaggcgtcggcgttggcgttttcccgaggttgggctgtacagtgtctccgtccgcggaaaaagaagcctctgaacccgcgccggcccgcagcccccgtgccttccggccgctgctcgccgtcgccagaggctaggccacgtttcccccagtgccgaggtgtttctgtgaccctccctccactcccattcccttctgaaagggcacctgctcttggtgagaaaagaaattatagcacgaagagccagtatcagaagagtatccatcacccgcagcaaccgctcagggaacaccatcaaaaaagaaaaaaagggaatatctggatttcctgggcgaggaggagcgagtctgctcgggagctgttccagcaggcgatttttaaatactgctttctacgccctatacaacttggcttcacatacttttacactaactttatatgatttttaaaaactggtctgatcggacttctcgtcctgggacactgtttactggagtctggccggctctccgtgctcctcttggtacctcattttggggagaaccttaaacccactcgagcagataatctccgccttgaccggtgccaccaaagaagccttggaaccatgtggacttttctgggcattgccactttcacctatttttat

SEQ ID NO: 41079 - DNA, 2300 bp, Homo sapien
gttcagcccttcacttaaggtgctgtatgggctgacttcatggcaaggaattgttgggagccatctttggcaaccagttaccacattattataatcagattgctttccaagcccctagaactaagaaaaatgattgttgcaggggaaggcacacaggcctgaacaagaaggggtactcaagtctgtgggcagaggggaatgtaagaaggagtagcgtaatgagacaaattacctacttcaagaactttctgaaacctcatcaagtccgaggagttatttcatttgtgtaagtctttctcgcttccttctccagttgcccttcgccttctaccatctgctcacccctgctatctgcactggctgtaggaggaagctagtgggaaggaaagggatgggtcaggaagcagttttatcgagagtctctgtgttacagaagatgcttagaaggcacaacctgggtagtgacatgctcaaagacttatgtgtacaggaaaacatcacatgtatgttttgttggttggttggttttcattcctagtgacatctttttttcccttttccttgttacttggcttctgcctccgcttctctctctgttctctctttgacagcttgtgagatccctttgcatgttttagaaatcaaccctgtgtctgccctttggatttcaaatccatcttctaagtcatttaccatggaaaagtttttaagtgttacatactaaaataggtcattctttttagatgctaggtttctttctctagccccgaattcctagatgtcactttactaaagatcacccagtataagaatacctttcccaacagaacacctaataaatgctccatactgacaattaaatgtatgttacacttcttatttctttattgtaaagacacactgaagcacttcatctctctgattttttttcttcagggctcatctccagcagtatagcaggcagctagagaggacagacatcacctcttgtaaccctagtattatttatgcactccttatacttgtcagtgccaaggaatgagttcagcacaaagggcacaaagataaatattgttaatttcctgtttgcctgctgcagttttctataagaccagtcattctctactcttttaatgatcctggcttcacatcagaatcatccggggagattcttaaaaacagagatgcttaggactacctctaacctacttaccagaaactctaagatgctaggtgattcccttaagcagccaggcttgagaaccactggactagaaggtgagatgtttaaacatcttcatatccagcctggcaaagaggtattcagcaaggagtggttgggtaaagatcaatccttgccttcaagaactttcagaatgagctgtaagcaacgataatattcagtatgctaagtgatctaaccatcctcagagagtgcattggaatacaagagaagcaagtaatggattctgctaacagtgctagatacctaagtgctgaattttatgagacttttggaccagtttgatttagtatttataaatcatcttcacagaattttgcagaacctagcatctgtaattttaaaaggaatcttggacatgttcttaccttaagcttgcagttccatttctgggaaataattggacaaatgcctcaaaatgatgtacagggatttgtctctgagctctctttatagcgtttgaaattatttgctaatatatcaaatagtaggagatagcttgtataatcagggtacattggaaccacacatgcccagtggttccttctccctagcacagagatgagctgtatcatatctttttctcaagagaagtgactaacatgttgaagaagaggccaagagtgttaatctagcaaagtccctccacatggaaaatatgaagagtgacagataaacaccctttcccctataaaggaactcattatttcttaaaatttttttagtgagtttgggagaaaaatgtgtttcttatgtgtacacatgtgcttccttaaacaaattgagattttcacactttttttggggatacaggttctttaatggaggagccaatctctctgcacacctggtttcatctaataatatacagacaccagctctgaggccagttaatcatccccagtgtccaggcacagagtagtcggtccgcctcacaatgttggactttctagccgagaacaacctctgtggccaagcaatcctaaggattgtttcctgtggtaatgccatcattgctgaacttttgagactctctgagtttattcctgctgtgttc

SEQ ID NO: 41080 - DNA, 2300 bp, Homo sapien
caagactttcgtgtgtcaatctcttgttttaatccttagtcccttactcaagaattacgctgtagacaactttaaaagaacatgaggaggataataataaccaaatatgttcggcaatagtaaaacaaatattatgggtctttattacctaggtaaatcacctttctaaaattctatatataaactttatattaaatttttaatgcaaaagcatatgagttatatttaatatacttttactgaaatgaactcactgcttgtaatctgttttgccccatgaagggcacttgtgttttctatttctaataatgcaagcatctcctgctaagtttttgaagatggaagaagttaaaacaagattagctgaaagaaggaaatcacttagttacattttatgtactagacctcctaacccggactagttatattttccatgtaacaaatggaatttccataatttgtacaaatataatttggctagagtatttggtaaatagccccctcgttggctgaaggactagtcctgaagaacagaatctaagaaccatcattaaaaatgcctaatcaagttgcagctaagaggtaggtggatggctttacaaagtgttaagactcagctaagtcttaaaaaaccactttagaattaggtccaaataaacactgtagaagaagctatgttaaattatcctttcagaggttctcttggtgctagggatcaagaacacttgaagatcagttttctcaatacaggctatattattattggcatgaaatccagagatcccactatattttcttattttcttttacaagtgccggtaacttcatttttaataatttggcgtggaactgtgattttcagtttgggaagtaatcctaatcaaaagacatgctttcaagaataaggcatgacatccttacaccaattaccctgagtacagaataatatttcttaaggaaatcgaattgtcgtggacaaacagtttaccctcttcagaggacaaaagaaggcaggtctatttttagcctttcgcaaaacctcagttccataaaggaagcactggtctccacaaatccattatcacaaacaaaatataacggttgctgatcaagataaatgcaagctgcatatattttccagaaaagttctgaaatgaggctgaacctgaaatcctgggaaaggcaggtgaaggacaattagagaaggtgtcccttgtagtgcacaaagacagtaaaacttcgccctcactacgcctcacctatgtttgagggagctccatgcgcttgcaatcaggagacccagttttatggctctgtgactttttttctttctcctgtccgatcataatcctgattccgatcccaggaatcagggccctgggaactttttttttttcccccaaatgcaaaggattttgacatcagtatgtcacaggtgaaggcattaaggcgcggcgagcagcaatgacttgcccaaactcacagcccatggcataactagaatgcaaatccacgtctgtcagcctgtaaaagtcctcactactagcctttcagttttctcaaaagcaaagagaaataacgacgacatccatacagcagtgttcccggaaacttggaaggatgagattcggaccaagcagctgaacggtgcttcctaaagcgaggaaggggtgtgcaaaatgatttccccctaagcggagacgaagagctggattacagcccccgccccagaaagcccctaagccctccatcccgagtcccccatccaggctgcacgcgactctgcagacctccccgtggccagcgcggcccagcggggaggggaagggggccatgcaaaaatggggcgcgctcactccatccccactcacctgtcagccgggccgcgccacggcgcacgcgcagggccggaggtcgcgcgcggagccggcacccagtttccacccctccctcaaggcggcggtcctcttctatccgcagtcccggacctggagcgggtcagaccccgacttccgcccctgactccccaggcggtcacatgaccgaagcggctgggagcagggaggggcatcatgtgaccactcgccggcgacggctgatgacgcaagagcccgctctcacttttcagcggcaggcgaagggggctgaggaaaggaggtgggtctaggcaggggaaattggggtgccaccagacggagacagcttggactaccaggtagggaagaagcgggggacggcaatggggagggtggcaggagtttcgccaccctcagggacactccacggggactccgagccgg

SEQ ID NO: 41081 - DNA, 2300 bp, Homo sapien
ctatgatcatgctactgcattctagcctggacgataagagtgagacgctgtcaccaaaaaggaaaaagaggacttttcctcatcctgctcccaccatgagaaaaccttctcttcagttttctttctatttatttatttattttttgagacagagtttcgctctgtcgcccaaactggagtgcagtggcatgatctcggctcacctcaacctctgcttcctgggttcaagggattctcctgcctcagcctcccgagtagctgggattacaggtgtgtgccaggacacaccaattatgttatttatttacttatttatttatttatttatttattgtatttttagtagagagagggtttcgctatgttgaccaggctggtctcaaacacccgacctcaagtgatccgcccgccttggcctcccaaagtgctgggattacaggcataagccactgtgccagggcctctcttcagttttctatctgcccacatcttacccatatgctaaagtctgaatgtttgtgtcacccaaaatgtatatgttgaaatcctaacttccaaggtgatggtattaggaggtggggcctcttgggaggtgatgaggcccactttcatgaataagattagtgcccttttaaaagatgctccagatagctgctttgccattccaccatgtgaggacacagcaagaagccacctatgaaccaggaaacaggccccggaactgtgagaaataaatttctgttgttcataagctacctagtttatggcatttccgttacagaagcccacattgactaagataccatctttcatggcttggtttaagtggttctcaaccaagaaggattttacccctctcgcaaggggacatttagcagtatctgtagactttgtggttggcatctagcgggcagaggccagggatgctcttaagcatcctacaaaacacaggacagccctcaccctgaccccacagcaaaaaattatctggcctaaaatgtcaatagtgcatcagttgagaataactggtttaaatcaatctctcttggatccctccccaggtaataacactgatctttttcttcccggtacctatgatctccaagaaagtttagaacaagttgtgcatttcctgagttttttctctgcatgttatttatagacaatatgttgacttcctttaaatccatgggagccttgtacaagtcagccagagctgcctctcctttttcaacatgcaaggataatcccttctctctgaatccttctcatacaattgcttttccctccctcatgctaccattatccctatcacatgcacatgtacacaacacactcctattatgaaactcatcacaactatttgctcacatgtctgcagcttctttaaactgacacctccttaaactagaaccctgacatattctattgcatataaagcaattcctcacacaaaataggggaccaataaagatttggccagttacaaaaataacaacagacatcatcatttctcggtcacctacagaatgccataaactggtgtcccggcactttattctccttatcgctaattctcactgcaatctacataactgaagaggaaattgaggtccagagagtttattcaaacgaccttcccgtggccttacttttaaagtcagttcaaacaaaatctatttggatcaaaaattcgtaatcttgcccctacacacttgaggcgaaaggatggagagatggcgtctcggacaggagggtaaactgtcccagactcactaccgtggcgtgaaaagttccacaaccataatccgggtagacggacccccggctcggagtccccgtggagtgtccctgagggtggcgaaactcctgccaccctccccattgccgtcccccgcttcttccctacctggtagtccaagctgtctccgtctggtggcaccccaatttcccctgcctagacccacctcctttcctcagcccccttcgcctgccgctgaaaagtgagagcgggctcttgcgtcatcagccgtcgccggcgagtggtcacatgatgcccctccctgctcccagccgcttcggtcatgtgaccgcctggggagtcaggggcggaagtcggggtctgacccgctccaggtccgggactgcggatagaagaggaccgccgccttgagggaggggtggaaactgggtgccggctccgcgcgcgacctccggccctgcgcgtgcgccgtggcgcggcccggctgacaggtgagtggggatggagtgagcgcgccccatttttgcatggccccctt

SEQ ID NO: 41082 - DNA, 2300 bp, Homo sapien
tagcaaatgggctcctttgaagcaaccttgcaaaaataataattttttaaaaaaaaaaacctctaaatttctaatgtgtattgtcattgaaaattgaggagtgattgtgttgataaaatcaagaatcatatctcaatgttattaaatagaaagtaatgatgattcactcttaaacatattctaacaaaattattatattttaaggaattataagaactataaagaactataagcatccagatgtgtgagagtcaggtaaggtggagtgagggaggcgatagttatctcaaaagaaagagaattactttgtatccaattacctaatagtcccgcatgctaaaaataatggagcatccgtcaccttaggcattagaggggaaaagcctcaaattttacagcttgctgaggcatcttttcttcaaagagcaacaggaagatcatctttgtcactgaaagactcacaacatatcccacttctgtataaatcccccaaaaagcaaaatttataaagacattctggagccacataagtaattagtcagaataaagaactcaagaaagggaagatattgtaagagttttttttttaagtagcatagaattaattgtgactagcagttgttaacagagtggtgtgccataaagctaatgataaatgattcctcaaaaaagaataatgtaacagactaatagcagggatctacaattatagaatgtttctcaacaattaggcaggaggaagacaaaagagtccaaggagagtaaaaaatggctgttttataattagcattgattaaaaaaatacaggataaagaaagttcaaagttgagcagtagcagagtaaaaataggatgaataatttcctaagttactcattctgttcattaaagagaggaggggaaaaaacttaatcaatatggctaaggggagagggaacttcttaacctatatggctaagggagggggaaagaaaccattctggaagcataaaaaaacaaaatgtagctttaaattaaaaccaaacatttattaccatgcagtgactaccctatgttgttaaaagacaaggattcgaattggcttttaaaaaaaattcagccactatatgatccaaaggtacatctttaaaaatatcataatggagaggttgaaaacacataccagacaacaaactaaaaaatttggggtgctactgttgaattagaggcaaaagtattatactgtgcaactttattattttttgctgttaaaaattcagtaaacactgtcaaagcaatcctcataaaactttcgtcctatcagaagacatttagaagtacaaggattggaagaaacacaactgctgctgcaatttggacttttttttcagagtaaatgaacattcgcacacaaaaaaagatatagaggagcgactgctcaaagcttaaactaataactacacactgtactttgtatgctacagaaagtaatttacaagatcaattaaatatttataagatttatactggccacaaagtgaattttaagggattttaaacattgaaattggccaagctctgtggctcacacctgtaatcccaacacttcaggaggccaaggcagcagatcacctgaggtcaggagttcaagaccagcccgaccaacatggtaaaaccctatctctactaaaaatacaaaaaattagcccggcgtggtggtggacacctgtaagcccagctactggggaggatgaggcaggagaatcacttgaacctgggaggcagaggttgcagtgagcagatattgcaccactgcactccagcctgggcgacagagtgagactctgtctcaataaataaataaataaaggtaagcattgaaattggacttgccacattctctcaccataatgctgacaaatacacatttacatcaaatattaactgaaataataatttgaaatttaaaaaagaaacttatctataacacaagtcaaaggctacgtcaaaactatagttaaaaatgattcacaagttaatggcaagaacatacataacttaccaaaatgtgtaggtgggaagagggtttatcaaaattagaggaaaattgttgccttattaagctcgatagcataaacataagtgagttacacagcaatgcaaggaaaaatctaaaaaaaatactaaggatagaaaaatgaaagaataatgacaatagcagcaattaatgaattagaaaagcagaaaaacaataaaatgatcaatctaagagctggattactgaaaattgaaacaaaattaagatcaaaagaaaatatgaag

SEQ ID NO: 41083 - DNA, 2300 bp, Homo sapien
ctatctcacttgatgacactatatcgtctctttagatgacacaccaacctacctattcactttgaactttcccctttggttgagcaatgcctagttcttaaacaccctaatcatcagtaactcttactataaatgacatatgcttatctttctttggaaattcttcatctcctctatctcactgggtcacgtcaccatgtcaatgatctgtcaaataaggaaccttagtcatttctgctcatcctttcttgggcataattcagaacactgagagagcttgtgtggttttcccaccctcactgcatggagtatcacccccattttgctcctttgtttgtttatagacaataatggaaatttttagttacctcctggctggctatccataactatctctaatattcttagagagggcttaaggtgtagcagacatatttggaaggatccagcaggggcttaaatactgcctgcctcagtccctctgtgtttttgagcaagttacctaatcaccttgagtgcgttttgtcatacgcacaggggaaacacctgtctggatgaaaatacctgtctggtagggctgttctgaggataaaggcattttatgtaaaacgctaaacatggggcttggcacataatcgctgtttaaaaatggtggcaatgatttccttaaccctccagagctgcttcccatacctcctcactccatcatgtgtcattacagcccctcccttggcagtaattctgagtgggtggcttccttctcagagtcctgttgggacttcactctgtggtacaaaacaccctcaagaattgcttcaagacttctttccagattgcttcaagatacttcgcaatctggtcaggtactgcggctcacgcctgtaatcccagcaatttgggaggctgaggtgggaggactgcttgaggccaggagtttgagatgagcgtgggcaacatagtgagactccgcctctacaaaaaaataaaagattagccgggtgtggtggtgtacatcctgtagtcccagctatcaggaggttgaggtgggaggattgcttgagcctgggaggtcactgcactccagcctgggtgacagagcgagactgtgtctcaaaaaaaaaaaaaaaaaaaaaaaaaaaagaaaagatacttcataatcttttttggcccaatccttcgtacacatagtctgcccaccatccccaaagtcatcctctgagctctaaccgcctcatttcaagacatccttgaaactaactccaaactaaagcctttccagattgactataatggacacttgctacattccaacccgtgagaaaaacaattcccctccagcagggggaggtgggaaggactcagccttggtgggtcacacatcccgctctcaacgtgccatgtgacctgagctgcagcacttcggtcctctaagccaggggcgcagaatgggtgtccccatgctccttctaggctctctgaattcaacgttcatggatcccctgttctgttgctgtgtgaataacctttatgtcccttgcctcagcgctgttctcaagggcagagaccattatctgggtaactcacttagcacagcctggagcgctgtgctacagatagtacttaacgcatgcatttagatgacaatgatcaaagcacctccagtgaggcacagacagctgccactagatgactcagacctctctgcaaaatggcttaatttagcaccctttcagttgtctaaagaacagactctgagtaaaggacaaagtgaactgaacaccctttaactaatttaacctcacaatggccctttaaggtcaggagttattatctctacagtacagatgagaaagtacagacacagacaactttgtctgtttatcctgagtccacggcagacccaggagcatgaaggagtagtggaaaaaaacctgcactgactgtgagggtgacctgagctctgagcaggcctctgccattcatgagttcagcatgccactgatcttggtggaggtactcctctccttgggccttattttcttcatctgggaaatggcctcgcagtggttccaaacttggtggtatcagaaccaccaggaaggccgggcgcggtggctcacgcctgtaatcccagcactttgggaggccgaggcgggcggatcacgaggtcaggagatcgagaccatcccggctaaaatggtgaaaccccgtctctactaaaactacaaaaaatagccgggcgtagtggcgggcgcctgtagtcctagctacttgggaggctgaggcaggagaatggcgtg

SEQ ID NO: 41084 - DNA, 2300 bp, Homo sapien
gtgaggacatgaaatttgggaggggccaggtggaatgatatggtttggctgtgtccccacccaaatcttatcatgaattgtaactcctaaaattctcagacgtcattgggggaacccagtgggaggtgactgaattatgggggtgggtctttttttttttgagacagagctctattgcccaggctggagtgcagtggcatgatcttggctcactgcaacctctgcctcccaggttcaagcaattttcatatgtcagcttcctgagtagctgggattacaggctcacaccaaggctaatttttgcatttttagtagagacagggtttcaccatgttggcaaggctggtcttgaactcctgacctcgtgatctgcccacctcggcctcccaaagtgctgagattacaggcttgagccactgtgcccggccaattttgtatttttagtagagatgaggttttgccatgttggccaaattggtcttgaactcttgacctcagatgatccacccaccttggcctcccaaagtgctgaaattacaggtgtgaaccactgtgcccggccttatttcttttttaatagagatgaggtcttgccatcttgcccaggctggtctcaaactcctgggctcgagtgatcctcctgcataggcctccattttaattagactttttgtacacacacacacacacacacacacacacacacacacacacacacacttatttacaaaagctttggttctaaatgtgggcttcgaatatattttcattttctaaattatgtcaatagggaggaggagagtatggagttaagaatggagattttaggactgggctctccagattctggtcccagctcagccatttcctagttccatctctgactttccatgggtgacttcgcttctctgtgcctacttttccttatctgtaagaactgtccttctctcactgggctatgaagattataggagttaatataatgtaaagcacttagaatagcacctggtatacagtaaataagtactcaataaatgttagctattattagctattcttggttttccagtgccatcagggtatgcttcaaatttggtttaattaaatagtaaggttgataaaaggttgctaatggagacaatagattggtgctcatcacacaattagaatataattgaagacattcaatttaaagaccctgctggtgtcagtccatagactctcaggggtcacaggacattagggagcatcttgttgattagagacattagagagcatcttgttgaacaccttcactttatggctgaagacaccaacatccagagggatgaagtcacttgcagtgaaccatctagaaaaacagagagcagctggaatgtggttactgttgatggtactttaggctcttggagggctgcagcaaagtattcattataggcatcaatcatcactgcaatgcactgattagccagtcactggagcattctattccattcagaatgacaataaaagcatttatatgtttggaactgtcaatatacaatgtaaatacaagaaagtaaactgactttgctttataaccaaatgctattatttactatactcatagaaaatgcctcccaataggggtgtttttatatgtttcaatttcaaatatcacttgaaagacattcttttttttttttttttttttttttttttttttttttttagaggcttgctctgtcgcccaggctggagtgcagtggtgcgatctcggctcactgcaacctctgcctcctgggttcaagtgattctcctgcctcagcctcccgagtagctaggattacaggtgcgcaccaccacacctggataatttctggatttttggtagagacggagtttcaccatgttgccccggctggtcttgaactcctgacctcaagtgatctgcccacgtcggcttcccaaagtgctgggattacaggcatgagccactgcacctggctgaaagacattctttagtcaaaactattataaaaatcagtctgatgtccttgaaatggaaaagcctgcacctctggaacaatccatacatcaggaggcatgcagggaggacactgcagatgatcaaagttttatttaacattatagaacacttaaaaataaacaatatgattgcatttctgttgtgtaactttgaaaaatgttttcaagcacacataaaagcaacaagttttacccccaacaagtatgctatgcagccagtccctaactgctggggtcagcactgctctcaacagacagctggggtaggaggt

SEQ ID NO: 41085 - DNA, 2300 bp, Homo sapien
ctccctaactcctgttttcccctacaaattgtaatctctccttccagtcgccataaatgcttaggagcttgaccgcaccaccccttatgagctacttaaccgcagcaagtaacttcatctttcgttctttttttaaattattattattattattttttattttttgagactaagtcttgctttctccccaaggctggagtgcagtggcacgatctcggctcactgcaacctctgtctcccaggttcaagtgattctcccacctcagcctccccagcagctgggattacaggcgcgcgccaccacacccagctaatttttgtacttgtagtagagacggggtttcaccatgttggccagattggtcttgaactcctgacctcaggtgatctgcccacctcagcctcccaaagtgctgggattacaggcgtgagccaccacgcttggcctaacttcatccttctaaggcttcagtttcttccctgtgaaatggggcaaaaaataaccccatagtgtggttggaaaactgaagtaatacatataaagtgctaagaacagtgtccgacacattgtaggcctcgattcatgttagctattattattattttaattttcaccttctaattcccagcgtttagctcttggtagatgcttaattagtatttgttgaatgaatggagaattaataaggaaaatgatttattcctggggctcgacctggttttagaaaattaagtatttagcagaaggacaagtaagggctctctaataatagttatattgttgggtgcccagggactccaaactgacctggttcactcaagaaagaaaaatgacagattccaagttgtttcacgcgcaactttgatgctcttccaaatcacacggaatgaatgcatgcgcaccaccaggcagggctgcccgggtgcaggcggtatctctggcagtggccagaatgacttccaccagcctacccacctacccaggttggcactcaggccctagaccctgcggcgcgtgtggaggctggggagggagtaggaatccggcggcagccacgtgggccccttccgcccgctccccacatcctttgtttcccaccggccctggctcaggaagctctttctgcgagtcaccgcgaaggggcggcccgggagcctggagaagctatttccgtgcaatccgggcgggcggcaggcgcgggggggttgggggggcgtggaggtggaggcagcgcagaaggcccagtgtttgcttttatttcctccaacagaaggttctatttgtggaagcgaacagacgctggggattagagctgggagggggcaggaaaagggaaaaaaaaaagccacatccactaccacgcacaggtcttccccggaactaccgcgtgggggtgaatgactgattctggaattcatcacctccctatccccctccttcctccggctgcagccgggcctcggcggcgcccacggctccaaccggagctccccaggcgctgggcggtggggggatccccggggcgaaaggcgtcgccgcggggctgcagcgagcggcgggtgcagagaaccgtggtgcgcgctcccgcctcgcgcccgcagcccattgtgcttactgtgaatgaggcgcgcgcaccaatcagcggtcgcttcgctccccgcagccccgtccctcccgcccacttccccgggcccttacgtcacgggaacttttcctccgccccctccttcggcttctccgctgagctgggggcctgcgggagggcgcgcgcgccgcctcctgcccagcccctcccagccctgggggcgtgtgcgcgcgtccaggccggcccgggacgcaccacctgcgcccgagcgcgcgctgcccggagcatccccagccctaagtccacccccattccccccacctcctactccctctccccttcccccagtctcctccctccgctccggagactgctcgctgggcggcggggccggagtcgtcgcagccacctcattgcacaacccggcttcccaactgtttacacagcccggcctgtgagtgtgtgtgtatacagcgtgagtcaccaggaggcggaggaggtggaggaaaaggagaaggaggagtgcactggccgggatcggtgcagcgctcacactcactcacagtcactctctctgagcgcgtctcgctcgctctcatacacgcccggagcccaggagcgctcaggatcccgagcgccgcgaaaaagttcccccggcttttgctggagactcatcgctttgggaagtgcatttgcttcgtggctccgccgagc

SEQ ID NO: 41086 - DNA, 2300 bp, Homo sapien
ttctgagatagatgatttcacattctggctctaccatttctgagatagatgattttgggtaacttacttagtttctctgtacctaagcttcctcattcataaaatggggaaaatgacattgatctcacagagttgttatgaaattaaatgagatgatgggcagaggttctggtataccactttataaaagaatgctgcagagataaagacagcttagaaatacttgccataaggctttctgttttaatcagggtgggagatttaaactaaaggatgttttatcagcttcctttgctaattactctactgctgaatttgtagtgggatggatggttttgggcatcagtcatgtatacccatgaaccctatatctcgtggagaccacctgcttcccttctggaattatctcaccccagagactgccaccaccaacagcttcttggggtccccactctgggctgctctctgtctgtttcacaacccactgcaaatggtgggagagcctgtgggctgaggagatttggtcactttgtgcatatctctaagttcctgtttctctgggctgggactgagcccatccacatgcccatttagatgatgaggaaaaatggagggtgttgagctggatttaagaaagtgctcctctgagcatctgtgatgtgccaggccctgttctgggctctgggaattagggatgagccagccatgttcctctttcttcccagaactcagagcttgctgcaggaggtggacttgcaaatggatgttttcaacacaagatggagagcgtagcagcagaacaaacccagggctccagggaagcacagcttagctttgggctcagggaatgacgctcagggtgagtttgagctgagtcttctagcataagtaggagtttgccagataaagacagaggggaaaaagcatcccagatggaggaagcagcatgagcaaaggtggggtgaggaaacagctcagcctgtgcagtgtgtgccaggagcttggtgttgctgcgcagggagtctgagtcaagggaaaggtaaagccagcagagtaagcaggagtgtagaccacatcgtcatccaaaggactgaagaacagagggacctggcagatgggtggtagagtagatgcagggtgtaagagatttctgtgaccctggccatgggtcaccataacaggtgatgatttctgctttcttggcctccaggaaaggagagtttaaggaagtttgcagcatcatatgggtctgtttaattctgaagcccactaaggtttcaccatcgggttacattctatttcttaccaaacctaacagaagattttatcatgttgcttcataacgtatggtgggacacagaggaggctgataaaccatactgagtgcgtgagtaggggatgggggagaggaagagaagatggggacatcctatcctgtgctgcatgactccaagaggtgatagtcagggtctggggagagcatgtgtggtttgtgtgtatgtgtgagggtctagggataaggccagtgatgggctcagaggagaagtttggtaagcatttggaaatcctttctactcttccagatgaatgaagaagtgaatccaaacctggaagtggatatttttaaaaaagtcccatcatcattttgggagctgagatgtcccagtgtcacaaaagagaatttctcaatgaggaactgaccagcgagggagaaaaataccctttaaaaacacttcctgctagaagtcaaatggtgggcaagcaagagttgcaccatcaatgcagcattcttctgggttcattttctgactttggaagaggttggtttctacaaatgcagcgttctgctcccggatcaccagcttccccaaactctagcgacaggagttgaaactttcagtggatcagtttgtgcagggcctgtgctggcatcaaagggttgcctgatgatgaatctgcagggaacgaggagggagggaagggcttccccagtcgtgccagaggcagagtgacccaggacataataagtcatgcattgcattcctctgccaccatgcagacttgtggtggccattccaaaccactggagagaaattccattttattcttagtgatttttgcatgggagacagctgacgttcaggtccgggctcataatcttccactttcgtcgatcctgcaggaagagcgggctttggccaatggccattaacctcccgctgcctggcagaccttttgtaaggctcagggatgaacgacaggatggctgagggaatggcctttgagttagacctcccccg

SEQ ID NO: 41087 - DNA, 2300 bp, Homo sapien
tctataaaattcactcttcttccacctgatcttgtgttgtttcatgaatgcatctgcttctcaactagacatctgcaactcctgactcagtccaatggtatgatttcatagttgtttaaacaatgccatcagaaatctgttccccagagtatatggcatgatccttttccaccagactctaagattgttcctttttgctgaagatagaacaccttagcctataattgattgcaaggattttatggaaacatcagtgtaaaacagaacaaacaaaactatcagtagatgacaaaagtctaaaaatggctatcatgtacatattattgataattttcaaaagtgaataatctgaatagagttcattataagaataatgcaattgacaaacacatctggctgtttctgttgtacaaaacaaaataaattcaatccaaaaaacattttagagaaaatatctatcaacacaatgtattagcaatattttcaaagaggctatattacatccaatttataaaaatgcttatatataaccttacaaagaaaacattttcatatataacataaaaatcctgagacattagatgccacaaatacctagcacttcattagaatttactaaaaatatatcaaagttatcaagtaaatagagtcagtacatctgaagtagattctaaacattagagtattaataaaaatgcatagataagtgaagtgaatcctcaacgtaaaactaccagcctagcatatactggttccagataaaagaagtaaagttgcaaccaagttaaagtttgaaaatataattaattatgactgataacactatactgcttttatctaacaacaagcaaagcgaccccaggactctgataaatagaaatacatcatggacagtgaaaacattaacaattctggcgtttgtgttgtcatctcttatagcacctcctgtttccctggcaatcctcagaacccagacaggagcgtggccccatcagtgcatgctgaagggcgaagggctggtaccgagaattatccatttcaagcagaaggaaaatggaccagttgtggtgttgggacacattacaggattgcctgaaggccagcagatgccatgttcatcagtgtgcaaataatatacaaggctgtaccagtgcaggtcctcactttaatcctctatccccaaaacacggtggaccaaaggatcaagagaggcatgttaaacacctgggcaatgtgactgctggcaaagatgatgcaatgatgtgtctattgaagattctatgatctcactctcaggaggccactccatcattggccatgcaatggtggtccatgaaaaaccagatgacttgggcaaagatggaaatgaagaaagtacaaagatgggaaatgctggaagttatttggcttgtggtgtatttgggaattcccagtaaacattccctaggatgaggtctgagtgccagtaacacatgtgttatcctgctagctgtagaaatgtaacttgataaacatttaacactgtaatcttaaaagtgtaaagaaaaaaaaaacacacacacattcacaattctccagaaacttcttatgtagaatacagttttaaacatgtttatgttaatgacattttacccacacaaatttaatctatgcaaacctgagcatctcttccgattggacaatgcttcctagacatcttgtcaatgataacatatcaaacaatcctaactgtttccaattcttgtcttttcccacggtgaaagaacacatctttgcaactttccagaggtcctctgggaaatctcaaaggcaattttgggcactgaggaggctgagaagactgtgcttgactgttagctgaaacaacttttggctgtttggcagaggactaacaggccctctgctttatgtgaatttctcactttaacttgtttgctccattttgggtgcagacccagccccatgtgcctgaccacaaaccaacatttcctgtctcaattctcctattcatataacgtttgaggacgtttgttaagttttaagaattccctcccacccccagattttcgcagggttttgttgatttcccctcaactttccacaggtatcttaaaagctttgctcactcatcccttctctgacttaggatttgagcatctttctgttatgctgttgccccactcctattgcaatactccccttcttaagaaagtttttctagactaatgtctagattaaacttcttttctttgacaataatgatgccatgacttggacaaaatgcccattgcctctgggtc

SEQ ID NO: 41088 - DNA, 2300 bp, Homo sapien
aagagaagtttcaaagccactggagccagattttcaagggccttgaatcatagtgcgtactttttcctttctgtcagcaagaggaaccataagtttcttaatcagggggatggtagcattagatttgtgctttatgaaagtcacttcagttgccaggtagtggaaagatcacaggatgggaggagaataaaggtgtgtagaacttttaagaagctactagaattatctagttcacagtttttcagcctctatgctattaacactttgggctggataattatttatttgtgggttgtgggtagctatttttttacactgtaggatgcttagcagcacccctggcctctactcacttgatgcctatagtatttgtccctaaggtggacaccaaaattgtgtcagacattgccaaatatcccccgagggacaaaattaccctccattgagaatcactgatccaggcaatgagtaataaactataatcaaataagatggttattaggatgagagaatgagtcagataccaaggacactgaatgaaagtgaattcccaccgaaagcaaccatttgtccttgtgcaacacaacaggtgcactgcctgtgggggcagggctcctcagaagaaggatagactcctcttacaatgactttttttctcctaaaaccatatggatagacaagttctagatatttccatctattacgttggatttggtaatcaagaagccatacttctttgacagtggaattctgattctttttggcagggagtgaactcctcctgttcccagtccgtggcctttgagtgagctcccatccctggctcctaggacgggacagctaacacagagctccgagtcaagcagacacagtgggtgccatcctgacacctcaagggaacagcacatctgggaaaagtgtctaatagagaagaggagtcaagagaagaagggggagaatcacagccctgaggacaccatctatgttctggaattctaccatgcttaaaggtaggccacccgtggactctttaatttaatgagtcaaaaatttgcattttgcttaagccagttggtttggattatctgaataactaagggtgggtcacattgtccaaagaaactagcagtcttctgtaaatatccaagtagcagcattatagaatgtagaaggatcactggatgtagaatcaggcctcagagctgaatctaagcccagtcatacattcttgtatttgtgtaattattaactcactgaatttttattgagtgtgtattgtgtactgggcaatgaactagactctggggccatcatgaggctggtcttccctgcagagaacttacattctagtgtttaactgatgagtgtcaaccctgattgcatattacagtcacttctggtagtttttaaacattccgatgctggggctccatgccagacaagttaaataagaatttcttggggtgagacagacatcagtatttattggagtaattctaatgaaatgctggggtcctcttttcattttgcagaggaggaagctaaggcacagagaagttaatgtgctcaagactataccactggtgagaggcaaagcaaagatttaaacccaccttgagttcagagtcttccctcttcttaataactaaactgcaccataatttgaaagacacagtaagaaacaccatggtatatttagtccaatgtaattttatatgtgtgtatgtatatatatatataatatatatggtatatattatatatatatggtattatatatatataatatatatatggtaagtttgttttcagaattctcaccttttccttttccttttcttgttcccatcctcaacaatttcaaactcacacacatgtcttctgacatagtttggccgtgcccctgaccaaatctcaccttgaattgtaataattcccatgtttcaagggcaggaccaagggcaggaacgtgggggcgattttccccatgctgttctcgtgataatgagtgagtctcgcgatatctgagggttttataagcatctggcatttcccctgcttgcacttactccattctgccgccctgtgaagagggtgcctgcttttcctttgccttctgccatgattgtaagtttcctgaggccttcccagcgatgtggaactgtgagtcaattaaacctctttcctatagaaattacgcagtctcaggcagttctttatagcagcgtgagaatggactaatacaccttccctatgcatagatctaacaagttctcatctctgtcctattgaaaatattc

SEQ ID NO: 41089 - DNA, 2300 bp, Homo sapien
caactatttgaaatgagcaaagcatgtctgagagccatgttgtaatctctgaccaaatgttccaggtgacaagacggatgttgaaccctcaacaggcattcatggaagaatctacactagacgccagctatcaaaaggcaacatttcttcactcactcactcacagccccataaaaccaggaagcaattcttgacctgtggccaaattttcccctaaggcatccatcaagcatttattgagtacccactcagtgccaggcattcagatataaaatggatcagggcttgttccctctgaggctttatagttggtcagttcaagatatgttgttgagccactattgtgcacctgagaacagctcatcaagacaaaaggagacacacctagtcagctaggcattgcttcctcacccaccagatctctgacctagagtgctggtagcaaattgtcctacaactgtgtcctctcagttcaattctcccattcccagccatcccagtagcacctaggagcaaagtggcctcccaaatcaggcagtagcagaggtctcccaatctgatgaacataggatgaccagccataatctctataagcctaactcttgtctataatatggtgatcatatgatggcaacaaatatcactcaggtaacagcagccccccacaccatttgctatcaaaaggactggggtgtgttggattcattcagtcacatgcgcctgaggccagccagtctgaaattattgaaacagaatcgcacagcacacagtagtctcatgttgatctaacttatacttcagacttgctgaaggactaatttctatcacagccctgccaatattgattgtttggactcaaaattacataagtagaatgatttttatttttttctcctaaactagaaaggatcacagtagtgctagtatattcctgtttccactggctggttatacatgctggaaaaaattagtcaaaagaaagcaactgaagacagaatataggtcttgaatcgcattcttaagtcccctacgaataagtctgggtgcttgcagtagtgcctaaacttgtttattgtaaacagagctgttaatcctccaccctcaccggacccattattttaaaaaaataaacaacaacaacaacaaaaaaaacactttggtagcctacatttaggtaaaagaaacgaaaccagtggagaggtggaagtgtccttttgtggtggaggttagtaggcattactggtctcctgtcacttccctaagtcaacaggaaggaaatatatccactagggcctctgctaatttgtttctaatttaaggacaattagaattaggatgtaggaattaggcaattcctacatcccctaaccccccacccccccaaaaaaaagcagtcagagctgcacgcttctctcactatccaacgaactggtacctctctggaaataacggaggttatgaactttgtactaacttccaggggtatctaataaacagagcggtggtcttgggacccagtcagtgaataagtcttcgttctgttttatactgtttcttttctgcgattttcttttctaccccaaagtttcccactactaactctgaaaacacctctaggatgacgcactcttcgagctgtcctggtgaagaatcctttcttgtgacctttagggcaagaaatatgttccaggaaagaaaagaaacgactgttcctccttctccaggtactctgggaaaaaacaggtcaaagggaaaaggcgcaaacaccaaactctccttccctttctcatttccacactggcaagttgtgtttgccttctaacttgtctcggaaggcaagcagagctcacagcaccagccccaggcggcgggtggattatttacagggggatttaaacccgctccggcgcgggggcgtggccgggcggagtcccgaggcccgagtgggcggggcgggggcggggctcccggccgctcggcgcaatgtgaaaaagacccgagctcggggagtgagcgcctgtctctttaaatgccacgggctgcgctcccgcccgggagcccggagccggatctacaatcccgtccctccagctccggtgcttgttgctcgcccggcccaagcgggagctgttgccgccaggctgcgaggctgccgtcctctcctcctcgcgccccacctcccccgagagctggctgaggaggggcagcagccccagctggcgggaggaagcgcggtgtgaacagggattgccccccgccttcaagtatcggggcgctacgcagccgcgggggaaagacat

SEQ ID NO: 41090 - DNA, 2300 bp, Homo sapien
ccaaatatcacaacttctctatagacactagactcattctttggctatggctgtgtccgttatcccaaactctatctttaccccagtttttacacttgcaaaagtagagaaactttaaggtccaccagcttttactaacctccctcttgctctgatagctgtgtaataatttttgtatccttcccagtgggttcccagtcttttcatctgctaggaccatctggtaactcatcaccaaacatggtgcctgacagcatcactggtgccctgcaaatgtccacctgataaatgagtgaattaatgaatgaataagaaaatgaaggatactggctgcccctggccaactatatcttggctttggcttgtcattctagatttgtgatactggcttctagcagaagcttaaagcctcttttttgttcttttgttcctctaatgtactccccctgcccctccaccaagatgggaaggagggctgatctgagcattcaggtttcagaatgctaattggatagcagccaattagaagtagatccgtaaggatttaattagactttctgggtagatttggatattgctttcaaaatgaaaaggccccaaatccaggttcccctggattataatagttttatggctctgccctgctttaatttgaggctagttggcaataccctgtccaggaaaaaggaatcttccatgtagtcctgtctgttctactgaggtctacatttgggttttagcaaacaattcagctaatatatattatttttctttgttctcaaggatttaatggcaagatgccattatagacaagaacaggattcagacactttcgtgttatgtgttcttgtccaaatactgtgtcactctgcactggcatcccaatcccaccaacacctttagcaggaacttcctgtttcaataacatttctcaatactctacctgattgcttagaatccatgagacagccatattctccatgtctaggtccctatcttatttttgttgagatggtgttaagactttatttgtgaggcttctggggaagaggagtaaggtattgatcccactgactggataatttgggtctcaaaatggataataaataagcattacatattttgaccacttccttggaggagaacttcttggaatgtgcaccatgtccgctgcactttttttgcacagatatctaagttggagaaacatactactagataaatcaatttgttctcttagtactcatgatatggttcctgggaacttctgattcaccaaattaatcttggccaggtacatacctggcaggaatccaaaaattccccaagtctccttgaagttcaggatcatcattcttaataaatacaccgagggaaaaaccatggagagtttgtcccagatgctgtgaatctggcccggggtacatgaagaagtccttaattgcagtcatttacatggtagattctctataatcatttaatttgctataggtctatgatttttagtccttcttctctaaatgattgaacatgtataattcccatttcaatcatattacctggatgaacaaaagtaacgctagactcattcatgcattctggttgccaaggaaaaggaaaaaaaaaacaaaacaatcaacaggatgtttaaactgtcttagggcaacttcaggccatagtcactggtgttcttgcagactatgagatattttacattctgataagggataaaaattcgtgcctcacatggctcccatcacactaagatcttgcaacaataacactactgattcagacattaatcttaagtatccagggagccctaaaacattgtatcccactagcaaggaccatggtaattgccacgtaaatcccctccattatgtggcccttattatgaccagccagccaaggcttgcctttaaatcataccaattgaaccgagccttgtagaaacactatcacctacgcatacctctgcttcttttcattaacctgctatcctctttacaaatgggattcttcacccactcccttcttctagattagcaatgccctgttaagtaaacgaacacgaaattcaaagggaaacaggagcaatcatcattaccagctgccgtgttaagcattgcgaaaacgctcacgattcacagaaaaatccatgctgttctttgaaggcattcaagccttaatagctagctggatgaatgtttaacttctaggccaggcactactctgtcccaacaataagccctgtacattgggaaaggtgccgagacatgaactttggtcttctctgc

SEQ ID NO: 41091 - DNA, 2300 bp, Homo sapien
tgagacaatatggacttgacttcattttgtgagaaataaataatctaagtaactggtcaaacacattttgtgcttcttaaaaaaaggtggtacacacacacacacacacacacaacacccgatataatacaatattttcaaatgacactagaaatattttagtcaggtctaaaggaacagaagttaatgataaaatgataaacaataaataatagctactgtttcatgagaaaattacacacatcttacttgacttaaacctcacaacagaattgagcagaaagttattaccctgagaaaggggacttaaggttggcaggataacaagtgggagaatctagaggtaaagtcatatctatcttattggaaacactcaagaacgtcaaataagcatgagaatttgagcaagactgaaggagaacgtttaagttccctttccaactcatatcccaattctggaatctaatttctgtaacaagtaactatattccttactacagaagtaaagatggccccatggagaaactggcagcatggcatgatggaaatggaatagaatcaggaattgttttgtacctgtgtgtgtgtgactttggtgttctgactcagacacatatttgagaggtagagaggggagaagagggttgccacattatgtaacagaaaggagcccactgcttaaacacttaccttgtgccagacattgcactaggactttattacctgcaacccatcctgcaaaactgtgaagatttgatatgatcattctcattttatggttgagaaacaagggttaaggacattaaaaatttactcaatgtttaaacatttgcctgtcttattctaaagccccttctcttttcacaatccctttaagaaatggacatccaatatttgagtggcagaggcaaaaacatggcctaccagaaccattatgatagctttacaatatgcccaccaattatttgatagtcctcctgccaaatggtgaaggctaattaccctcctacagaatgtgactcacttctaatgaataaaatatggcacaagtaaaagtgtgcgatttcagagactaggtcataaagaacgcagtggcttcttccctgctctctctttcttaggtcattctctctgggtgaatccagctgacatgttgtgaggacactcaagcagctttatggaaaagcccacatggtgagcaactgaggcctcctaccaacagccaacaagaaaccggggcctttgccaacagccaagtaagtgagacattttggaaagtggatcctccagcccccgttaggctcccagatgacaacatcccctgctctcatcttgaccacaacctcatgaaatacccttatccaggatacccagttaagccacaccacaattgctattttacaaaactgtgagctatgtgttagttgtttttaagctattaagttttgaggtgatctattacacaatgataaacaactaatacacccatccagtgctgaagaaaggggttgtcaggagggtagaatttgcactattaaatcttcatagagtgctatttcccgtcactacagcacacttgtcaccaactataaagaattaggtcagggaatttctttggttgcagcccattttgcctttggttgttaatggtagaaccgtttccccacaatctgcaggaaataagaatcagaaagaaggacacaccattccatagcacagaacacaagtagatggctcccatgaagaatctagcatcatggtatggcagaagcagaatggactcaggaatcatggtgcctacactggaatttcagatcggccactgacacaatggacacattattcaacatttccaaatcttggcattcttatccacaaagtgaagataataattgtcaattcacaggtgattatgatttaaagagattacttttgaagagttcctaacacattcagtcaacatttaatgatgcttcaggcactgtgttcattgctagtgagcgtatgacacacacagccatacggtcacagagctttcaatgaaaagtaacataattgctcatttcaccaggcccccggcttggggcgccttccttccccatggcgggacacctggcttcggatttcgccttctcgccccctccaggcggtgggggtgatgggccatggggggcggagccgggctgggttgatcctctgacctggctaagcttccaaggccctcctggagggccaggaatcgggccgggggttgggccaggctctgaggtgtgggggattcccccttgccccccgccgta

SEQ ID NO: 41092 - DNA, 2300 bp, Homo sapien
cagcagtttcagaggcaaaggccgaaggatcgctttaaccgaggagtttgagaccagcctgggcaacatgaccagactgcctctctacaaaaagtttaaaaaattaaccgggtgtggtggtgcactgcactcccagctactgggctggggtatcaggctgaggtaggaggtttgctttgagcccggggggatcgaggctgcagtgagctttgattgtgccactgcactccagcctgggtgacagaaggagaccctgtctcaaaaataataagaataataattaataataataggccaaaccaaatacccatcaccttctgctgtgcctcccctttccccaataaatccagtgtcttgctttcaaattttgtggttaaaaaagatgatgagtttctaagacgtgggggctaaagcttgtttggccgttttagggtttgttggaatttttttttcgtctatgtacttgtgaattatttcacgtttgccattaccggttctccatagggtgatgttcattagcagtggtgataggttaattttcaccatctcttatgcggttgaatagtcacctctgaaccactttttcctccagtaactcctctttcttcggaccttctgcagccaacctgaaagaataacaaggaggtggctggaaacttgttttaaggaaccgcctgtccttcccccgctggaaaccttgcacctcggacgctcctgctcctgcccccacctgacccccgccctcgttgacatccaggcgcgatgatctctgctgccagtagagggcacacttactttactttcgcaaacctgaacgcgggtgctgcccagagagggggcggagggaaagacgctttgcagcaaaatccagcatagcgattggttgctccccgcgtttgcggcaaaggcctggaggcaggagtaatttgcaatccttaaagctgaattgtgcagtgcatcggatttggaagctactatattcacttaacacttgaacgctgagctgcaaactcaacgggtaataacccatcttgaacagcgtacatgctatacacgcacccctttcccccgaattgttttctcttttggaggtggtggagggagagaaaagtttacttaaaatgcctttgggtgagggaccaaggatgagaagaatgttttttgtttttcatgccgtggaataacacaaaataaaaaatcccgagggaatatacattatatattaaatatagatcatttcagggagcaaacaaatcatgtgtggggctgggcaactagctaagtcgaagcgtaaataaaatgtgaatacacgtttgcgggttacatacagtgcactttcactagtattcagaaaaaattgtgagtcagtgaactaggaaattaatgcctggaaggcagccaaattttaattagctcaagactcccccccccccaaaaaaaggcacggaagtaatactcctctcctcttctttgatcagaatcgatgcattttttgtgcatgaccgcatttccaataataaaaggggaaagaggacctggaaaggaattaaacgtccggtttgtccggggaggaaagagttaacggtttttttcacaagggtctctgctgactcccccggctcggtccacaagctctccacttgccccttttaggaagtccggtcccgcggttcgggtaccccctgcccctcccatattctcccgtctagcacctttgatttctcccaaacccggcagcccgagactgttgcaaaccggcgccacagggcgcaaaggggatttgtctcttctgaaacctggctgagaaattgggaactccgtgtgggaggcgtgggggtgggacggtggggtacagactggcagagagcaggcaacctccctctcgccctagcccagctctggaacaggcagacacatctcagggctaaacagacgcctcccgcacggggccccacggaagcctgagcaggcggggcaggaggggcggtatctgctgctttggcagcaaattgggggactcagtctgggtggaaggtatccaatccagatagctgtgcatacataatgcataatacatgactccccccaacaaatgcaatgggagtttattcataacgcgctctccaagtatacgtggcaatgcgttgctgggttattttaatcattctaggcatcgttttcctccttatgcctctatcattcctccctatctacactaacatcccacgctctgaacgcgcgcccattaatacccttctttcctccactctccctgggactcttgatcaaagcgcggccct

SEQ ID NO: 41093 - DNA, 2300 bp, Homo sapien
gccgtccagaccctcgcattataaagggccggtgggcggagattagcgagagaggatcttttttcttttcccccacgccctctgctttgggaacccgggaggggcgcttatggggagggtggggagggtggggaaggtggggaggagactcagccgggcagccgagcactctagctctaggatgtaaacagagtaagagagccgcatgaattaactacgcgcgcctaccattttcttttgctccctctcaaaccctctccctttctctgctgctcctccgtagcagtactgtttgacaaaccgcatccttgtcctgtgagtataaatcatcgcaggcggaacagctgccctccacaccgagaacgcactgcgcgcccaccgccacgccacgcgcgtaccaggctgcagggcgcctcgctaaggctggggaaagggccgcgctttgatcaagagtcccagggagagtggaggaaagaagggtattaatgggcgcgcgttcagagcgtgggatgttagtgtagatagggaggaatgatagaggcataaggaggaaaacgatgcctagaatgattaaaataacccagcaacgcattgccacgtatacttggagagcgcgttatgaataaactcccattgcatttgttggggggagtcatgtattatgcattatgtatgcacagctatctggattggataccttccacccagactgagtcccccaatttgctgccaaagcagcagataccgcccctcctgccccgcctgctcaggcttccgtggggccccgtgcgggaggcgtctgtttagccctgagatgtgtctgcctgttccagagctgggctagggcgagagggaggttgcctgctctctgccagtctgtaccccaccgtcccacccccacgcctcccacacggagttcccaatttctcagccaggtttcagaagagacaaatcccctttgcgccctgtggcgccggtttgcaacagtctcgggctgccgggtttgggagaaatcaaaggtgctagacgggagaatatgggaggggcagggggtacccgaaccgcgggaccggacttcctaaaaggggcaagtggagagcttgtggaccgagccgggggagtcagcagagacccttgtgaaaaaaaccgttaactctttcctccccggacaaaccggacgtttaattcctttccaggtcctctttccccttttattattggaaatgcggtcatgcacaaaaaatgcatcgattctgatcaaagaagaggagaggagtattacttccgtgcctttttttgggggggggggagtcttgagctaattaaaatttggctgccttccaggcattaatttcctagttcactgactcacaattttttctgaatactagtgaaagtgcactgtatgtaacccgcaaacgtgtattcacattttatttacgcttcgacttagctagttgcccagccccacacatgatttgtttgctccctgaaatgatctatatttaatatataatgtatattccctcgggattttttattttgtgttattccacggcatgaaaaacaaaaaacattcttctcatccttggtccctcacccaaaggcattttaagtaaacttttctctccctccaccacctccaaaagagaaaacaattcgggggaaaggggtgcgtgtatagcatgtacgctgttcaagatgggttattacccgttgagtttgcagctcagcgttcaagtgttaagtgaatatagtagcttccaaatccgatgcactgcacaattcagctttaaggattgcaaattactcctgcctccaggcctttgccgcaaacgcggggagcaaccaatcgctatgctggattttgctgcaaagcgtctttccctccgccccctctctgggcagcacccgcgttcaggtttgcgaaagtaaagtaagtgtgccctctactggcagcagagatcatcgcgcctggatgtcaacgagggcgggggtcaggtgggggcaggagcaggagcgtccgaggtgcaaggtttccagcgggggaaggacaggcggttccttaaaacaagtttccagccacctccttgttattctttcaggttggctgcagaaggtccgaagaaagaggagttactggaggaaaaagtggttcagaggtgactattcaaccgcataagagatggtgaaaattaacctatcaccactgctaatgaacatcaccctatggagaaccggtaatggcaaacgtgaaataattcacaagtacatagacgaaaaaaaaattccaacaaacc

SEQ ID NO: 41094 - DNA, 2300 bp, Homo sapien
acctgaacgcgggtgctgcccagagagggggcggagggaaagacgctttgcagcaaaatccagcatagcgattggttgctccccgcgtttgcggcaaaggcctggaggcaggagtaatttgcaatccttaaagctgaattgtgcagtgcatcggatttggaagctactatattcacttaacacttgaacgctgagctgcaaactcaacgggtaataacccatcttgaacagcgtacatgctatacacgcacccctttcccccgaattgttttctcttttggaggtggtggagggagagaaaagtttacttaaaatgcctttgggtgagggaccaaggatgagaagaatgttttttgtttttcatgccgtggaataacacaaaataaaaaatcccgagggaatatacattatatattaaatatagatcatttcagggagcaaacaaatcatgtgtggggctgggcaactagctaagtcgaagcgtaaataaaatgtgaatacacgtttgcgggttacatacagtgcactttcactagtattcagaaaaaattgtgagtcagtgaactaggaaattaatgcctggaaggcagccaaattttaattagctcaagactcccccccccccaaaaaaaggcacggaagtaatactcctctcctcttctttgatcagaatcgatgcattttttgtgcatgaccgcatttccaataataaaaggggaaagaggacctggaaaggaattaaacgtccggtttgtccggggaggaaagagttaacggtttttttcacaagggtctctgctgactcccccggctcggtccacaagctctccacttgccccttttaggaagtccggtcccgcggttcgggtaccccctgcccctcccatattctcccgtctagcacctttgatttctcccaaacccggcagcccgagactgttgcaaaccggcgccacagggcgcaaaggggatttgtctcttctgaaacctggctgagaaattgggaactccgtgtgggaggcgtgggggtgggacggtggggtacagactggcagagagcaggcaacctccctctcgccctagcccagctctggaacaggcagacacatctcagggctaaacagacgcctcccgcacggggccccacggaagcctgagcaggcggggcaggaggggcggtatctgctgctttggcagcaaattgggggactcagtctgggtggaaggtatccaatccagatagctgtgcatacataatgcataatacatgactccccccaacaaatgcaatgggagtttattcataacgcgctctccaagtatacgtggcaatgcgttgctgggttattttaatcattctaggcatcgttttcctccttatgcctctatcattcctccctatctacactaacatcccacgctctgaacgcgcgcccattaatacccttctttcctccactctccctgggactcttgatcaaagcgcggccctttccccagccttagcgaggcgccctgcagcctggtacgcgcgtggcgtggcggtgggcgcgcagtgcgttctcggtgtggagggcagctgttccgcctgcgatgatttatactcacaggacaaggatgcggtttgtcaaacagtactgctacggaggagcagcagagaaagggagagggtttgagagggagcaaaagaaaatggtaggcgcgcgtagttaattcatgcggctctcttactctgtttacatcctagagctagagtgctcggctgcccggctgagtctcctccccaccttccccaccctccccaccctccccataagcgcccctcccgggttcccaaagcagagggcgtgggggaaaagaaaaaagatcctctctcgctaatctccgcccaccggccctttataatgcgagggtctggacggctgaggacccccgagctgtgctgctcgcggccgccaccgccgggccccggccgtccctggctcccctcctgcctcgagaagggcagggcttctcagaggcttggcgggaaaaagaacggagggagggatcgcgctgagtataaaagccggttttcggggctttatctaactcgctgtagtaattccagcgagaggcagagggagcgagcgggcggccggctagggtggaagagccgggcgagcagagctgcgctgcgggcgtcctgggaagggagatccggagcgaatagggggcttcgcctctggcccagccctcccgctgatcccccagccagcggtccgcaacccttgccgcatccacgaaactttgcccatagc

SEQ ID NO: 41095 - DNA, 2300 bp, Homo sapien
gagagctggagacccagagagggcaaacagcatcaaggtcaaagttgagtgagtcctgggtgaaagtgtcttttcagccaggggagattttccatgcagaagggactgggcatcaactgtcaggacatggacagagacgtctgccattagaagctggtcctctcatagcccaccagcatcccccaggaggacactggcttcctcaaggtcacagcctttggtttctggaaaaaatgattaagcagtgaaaggattaaggtctcacagctcctatcgcatgatgtatagatgcagaggtttctcatcatcttctttttatattttaaaagatggatgacaactagatgccaactgcagctcaggcacctgcccagtccctctcagagccgggcacaaaacagacacctgtctagcccctcacagagagccaggcacaaaacagacacctgtccagcccctcacagagagccaggcacaaagcggagacttgtccagctcctggcaaggagccaggcacaaaagagatgcccatgagtgtaaatgaatctgtgaaacaggcagaacaggagcatcaactgagtaattgttttttctttttcaaataagaacatttgcgttgagaagccgccacgggaagagatgtgatgaaacactacacagaaagagggaggagcctccgggtaggttggagtgagtaggatgtagggtagccggcaggggagaagaggggcaaccttctgttccgtaatattgataccacccatttgtgtgtccaatttttgctggtttgtgacgtccttctagggtccatgagtaacccccaccccattgcctagctgggtgcctgactccccttaagtgctcagtagacgttgaactggacgggcgctggcgtggtggctcacgcctgtaatcccagcaatttgggaggccgaagcgagtggatcatctcaggttcggagttcgagaccagcctggccaacatggtgaaaccttgtctctgctaaaattacaaaaattagctgggcgtggtggcgcgcgcctgtgatcccagctactccggaggctgaggcaggagaatcgcttgaaccaggcaggcggaggttgcagtgagccatgatcgggccactgcactccagcctgggtgacagagtgaaacttcatctctaaataaataaataaataaataaataaataaataaataaaataaactttgaactgaacaggggcagctcttacatctgtccagtctcgggtttatgcagatagaacaagataaccacatcccacatgggaggccagtgtccacttgctcctttggaggaactactgggcatttaagggactcgttgaacacactctgtaggtcaactctgcccggagtggagggagctgcgcagaccgctggccctctgcacgggtttgcaactcggcttctggaaacagcgggagacgtcgaaggaggcgagaaggtgcgcgcgcccttctcaccaggccggcggatgctgggtggtacccaaagaggcgctcagatcactggagctggagctcagtcggcggtcttctgcgggaactgcacctatcccggagcatctctggccctcctatttcactgaactcgccttcctcagcaggaaagtgggaagaccgcttgcttccaggacggtgtggggaagggtaagagggctcagggaaagaccgtggaaagctcggcgcacaagcgagctggcatcaccggggattccctccggcccggtgggactccggcgcgcttgtagcgaggacccccagcccagggcagagcctaccctccgctcccccagtctgggcccttggcggccgcagtcgcccaagcccgccccgcctccgcgcgcggccctctccggctcagtgccctgcgctgccgggaagcaggctgaggggcgcaccgggcggcgggcggggacctggggaaggccgggagcgccgggaccgaggacgcacgcggcgggccgggccgcgcgcgcctcccccctcccccgaggcccgagcgcgagccgccgtgacgtcacgggcaacccgccagccccgcgctcctccgggcagagcgcgtgtggcggccgagcacatgggcccgcgggccgggcgggctcggggcggccgggacgaggaggggcgacgacgagctgcgagcaaagatgtgccccgggacccccggcaccttccagtggatttccttgcggaaaggatgttggcggtccctgtgacctgtggagacacggccagatctgccctccagtaagttccaattttgtcccct

SEQ ID NO: 41096 - DNA, 2300 bp, Homo sapien
agtaaggctaaggaccctgaggtggacggatgattttggatcatctgggtgagcccaatataatcacatgcgtccttaggagtggaagagggaggcagagagttattcagagacagagatatggccacagaagcagagtcagagatgccttggtgttgtatttgaagatggaggaagaagccacagccaaggcctatgaagcagcctttagaagcttggaaaagcaaggaaacacattccctctcagccaccagaaagaaatgcagccctcccaacagcctgattttagctcagtgagacccatgtcagacttccagaaatgtaagatcataagtgtgtgctgttttattttttatttctttttctgttttaaaccactacgtttgtaaacatttctttggcagtaatcgttgcttttgatggaagttggagcagtggtcaagctcgtgggctttggagccagtctgccagtccgccttgtttcaaaccccttttcctttctctctttctttcttccttccttccttccttccttccttccttccttccttccttccttccttccttccttccctccttccttccctctctctctttctttctttcttctttttttttttgagatagagtctcattctgtggcccaggctggaatgcagtggtgtgatcttggctcactgcaacctccgtctccttggtttaagcgattctcattcctcggcctcccaaatagctggaattacaggcatgcaccaccacacccagctaatttttgtatttttagtagagacagggtttcaccatgttggccaggctggtcttgaattcctggcctcaagggatccaccagcctcggcatcacaaagtgctaggattacaggcgtgagccaccgcgcccagcctcaaacccttttcctgtgattttttttttttttttttaaagctgtgtgaccttgtggaagttgcttcacttctctgggcctcaaatttctcatctctaaagtcggttaacaataatctacaactcatagttttttgtgaggatgaaatgagggtttcatacatgcagaaagcctggaagtaagttttagctgtggccattctgggcaggaatccctcactaggtaacttagagcggcggatcagggcacagacttgggagacagactgtctagcttcagatttaggcttcttactagtctgaagtagaatggttgtttgttcctccactgcttcatctggaaaacaggggcaggcatcccagggtgtttgagagatcatatcagatggagaggccagagtttttagccgatacatcatagacattccccaaaggacagttattgttatcattgggtggatggggaatattgagcctccagccctaggcattgtggatcaatttgttcttcagttatctttggaataatttaaatacactggattgggaagacaaagctatcaccctcctgatgggagagtgctgggtacctagcaggtgctcagtagttagtgaatgaatgagtaagaacagaacaggtcctaggccctgccctgaagaggctcacagtgcaggacaaggcctggagtcaggccagggttttgtggttgtctttaaaaagaaacaaaacaaagaactacttcctaccagctgaccctaaacccctcagctccctgcagggacctctcagccctgcaggggagcccaggctatgtgccaggcctggccttgctgtcagctttctaagccagtcacaaacattctcctctcaactttataatggatgccccccagcctcctctcccctctcagggtgctcctgaggctatgagcagctggcagttccctgtctgagaggtccttcgtaccgcaggagaggcagctctcacctgaaggcctccctggacaccggtctcaactttgtgtgttaccagttatggagaattatttttagtgagttacactctgttagggccaaacacaaggaggaaagagtgactgaatactgctctgagtcagtgactgtgacaagactgtttttttcttcttccctgttgcaggcctgatcttttggccagaaggagattaaaaagatgcccctcaagatggctgtgcctgtcagctgcatggagcttcgttcaagtattttctgagcctgatggatttacagtgatcttcagtggtctggggaataacgctggtggaaccatgcactggaatgacacacgcccggcacatttcaggatactaaaagtggttttaagggaggctgtggctgaatgcctcatggattcttaca

SEQ ID NO: 41097 - DNA, 2300 bp, Homo sapien
gtctgctccatgccccctctggcatggtgttggaggccgggggtcagagatttggggagtggtgggcagcagctattctcttcttcctttccagggggatgtgtttggggacacatgtctgtgtgttcatggagctgttagggcctcttctagaagccaccagtttgcgttttcatacagtggctgggatccatcattgctggtgttattccttcacatcagagcaaacttcttcctttcttttttatatatagcagctttattgagatataattcacatataattcacctgaaactcacccatttaaggtatacaacacaattttttttgtttgtttgtttctttgagacagagtcttgctctgtgacccaggctggagtgcagtggtgccatcttggctcactgcaacctccgcctcccgggttcaggctattctgcttcagcctcccgagtagctgagactacaggcacacaccaccatgtctggctaacttttgtatttttttttttttttttttttgagacagagtctcactctgttgcccaggctggagtgcagtggctcgatgtcggctcactgtaagctccgcctcccgtgttcatgccattctcctgcctcagcctcctgagtagctgggactacaggcgcccaccaccacgcccgactaattttttgtatttttagtggagatggggtttcgccgtgttagccaggatggtcttgatctcctgacctcgtgatccgcccacctcggcctcccaaagtgctgggattacaggtgtgaaccaccgcaccagaccccaacttttgtatttttagtagagatggggttttgccacgttgcccagactggtcttgaactcctggccttaagcgatccacccacctcggcctcccttagtgctgggattataggcaggagccacggtgctcggccaacacaattgttcttaatatattcatggagttgtgcaaccatcaccacaatcaatttgagagcattttgatcaccccaaaaagaaatcgtttttattagcagtcacctctttattcccacaattctctgcgtgctaagaaattgttgagctacttgtactacaaatatacctatcctggaatggtcttttgtgcctggcttctttcacttggtgtaatgttttcaaggtttatctgtgttgtagcatagatcagcatgtcatttctccttagggctgaatactgttccctagcacaagtatattgcatttttaaaaatctactcatctgttgatgaacatttggggacagcaaagctctagttgaaaaatcaagatgaaaaatcaaaaaaatatagttgaaaaaatcaaaaaaatctagttgaaaaatccagcatcatgtgattaaggccaaactcaacttcacaaaagagagcctctactattttgggaaagatctagaaggttatctgtaagcatatggtggatgttacaatgtgttcagtggacacgccattcagcttttattcagcacttaccatatggtgggcactatggtaggattcattaattaatttattgaaaataattattgagattatatagtcttgtgaaaagatttatcagaggctgttctgtgaattttagaggttttttgtttttgttttttttttgaaatggagttttacttttgttgcccaggctggagtgcagtggtgccatctcggctcaccgcaacctctgcctcctgggttcaagcgattctcctgcctcagcctcccaagtagctgggactataggcatacaccaccatgcctggctaattttgtatttttagtagagatggggtttcaccatgttggccgggctgctctcgaactcctgacctcaggtgagccacccacctcgggctcccaaagtgctgggattacaggcatgagccaccgtgcccaggtgagttttagacttttttggggtgtaagaatgggagcatgagtttgtgttctcagctcgtttcatttgatttcagatgtcagctctctttaggagagaggcgtggagaaaaggtgggactctctgcagtcctgttcttgttctgcccacttccctccagtcatggtctctggccggctctcttctccccagagtggttcttttcctgcccctggtgtccctctaagacccagatgtttccagcacccatttgagaggctgattcagcccaggcagtgtctggcctagggaaggtgactgcaggaaatgttaaaaaatgggggctgttatcatgcctgagcatcgcacagtccctccgttgtgactaatt

SEQ ID NO: 41098 - DNA, 2300 bp, Homo sapien
agtgctgagcagactgagctgttagccatcctccctcctacacctcctcactcgaaggtgctccttgtgagcacctgaatcttgagtgtgagggaaggagacataaaggagaattcccagcccaggcccttttgggtgaaagtcagtcctcccaggtcagtctttagttctggtgacacatctgtctcctaagtgactgccagctgtctcttcccatcccccaatcagcttttctcccaagagtcctttaagcaaattccatctgagcctggtgacccctgggccccggtgcttatttgagacagtgggaaactcctccaccttcaggttcaggagtggaggcagcgtggagcagtggttggagctcccacgcttgaagcaggaccagcctcacctgggaaactggccgcatctccccacatggcacaacagctttgtggctaagggctggacaggcagatggcatacaggagctgggacacccagaaacacccaggtctcagcctcccactcctatgcagggagagtaataacagcatgccgccacggggctattgggtgctaaccccaggacttggcacacagtagcacccaagtgaggtgagctgctttctgcggttagcattcccactgtcaagcctgcatcatcagtaaaagggagattagaagagcatgtgccccggaagtttattaaaaggattaaatgagaagattcatgtaaagtgcctagcacagtctctgacacttagtaagtgctcaataaatgagctttctaatggcttaagttggagggaaactcccgtcctctggcacacagcttttccaggaacccgggccgccagggaaggcaggggacagcctcagctggaagcagaagagtctctggcctgtgactaaggcacagcgagtcagaatccagccgctgggcagggccggcttgggccgatgcctggcctggcccccattcagggtgatgcgtttttaccgtaaggtctgggtaactccacagccggcactgggcctccctgtccctgggtggggcctgacactcacccatcaaccatgacagccgcttcgtaaaagaggcggggactctagagcagtgagggcccagtgagaaagggcagattcacgggtttcagcgtcatctgctaaatgccacccccattggtttaaccatgtgagaggtgttagtatagcacggcaggtctgggtgccaggctgagctccaggacaggagccaaagtcaattaataccagggatggggggtgggggtggctgaatagggagaggatgctgatgggcagtggcagtgaagggaggctgagctccctcccaaaaacaggagggaagaaaaggaaggtaggggagagaggagagagagggagacagacagatacacacacacacacacacacacacacacacacacacacacacacagctcctggagttcaaacattccaaactcaatgcagcaaatgggaggttctggtcacagggggctggtcttcaatgtgtcccataggccaggcactactgggtgggcccttcacctacatagtcttattgtaacaacagctgggacggcatagtgatctggtgtgtgggcaccagagtacaactacgaagttccacatatggaccagccccttccttgctgactaacatgggacaggttaattaacagctctgtgctccactctcctcacctgtaaaatgggaacaatagtatctcccctccccagccaaaggctacacatgaagatgaagtgtgttcagacatggaaaaggcttaaacaggccctggctcgcagtgagcctccgatgaaagtcggctatttctgatgcctcttaccacagcctgtgaggcagaaattctcaggcttctttttagagctgagaccaagggggttcagagagggtgagtgacttgctcatggtcactgtattgatccgccagggctgctacaacaaattttcacaggctgggttgctcagacaacagaggtttatttcctcacaattctgaaagccagaagtccaggatcaaggtgtggtcagagttgtttcttctgaggcctctctcctgggcttgtagatggccacctcctccctgtgtctacacgtggtcttcactcctcctttgtcatcttaatctcttcttctgataaggacacccaccagtctgaccatattggagccccgccacgtgagctcagttaactgtacctctctagagaccctatttccgaacacagtcacgttctgaggtatgggtgagtaggacttcaaccta

SEQ ID NO: 41099 - DNA, 2300 bp, Homo sapien
ttcactccctgtttctcccaccaattattggcattggcatatttctgagcaagttctctccttgtggcctgtcactctgtgggtgggaagtgaccccctgctgagcaggttcagtgttttgaggtggggctatgaccttctgctttgcaccgggctctaaacaccctggcctgcccaggattctttgcagctcctgggagaagcttagaaattttaatttccttaatttccatggaacattgctttgtgtgtgtggctaaaaacattaattaaaaacattaatcagtttggctgccttggaaagaggttcttttttctgcaggagccaacgtgctgggttattgcaaccccatctccccagccccttacaaggaggaggggacaggacatcagcttgcaaaccaacacttcagccctgtatttgtggatttgtctcttggtgtcaggcagactccttagctcctctgaactttagtttccacatctgtaaaatgggaagaaaggttatgtgtctcctgatttcttggggactctgtgtgtgttcagtgaggtgccaggaggacagtccttagtgaaatgtcctctacagaatttgctagtaaaggcgctgttgttataattagctggatttccctggtagtttacagactgcctcttctgcgcactgtctcatttaatcctgtcagcgcacctggcagacgggtagtgtttgaatccactctttttcacagatgagtacactggaaagggagggttacagccaggcctggagctgagaacctttgatggaagccccaggctttggcccaatctcattgccttcatttgctcccttggccccatgtgctgagtccctacactaagttacagtggtgagatagaaagaggggaggccttttcatttcctcctgggaggagaggaagaagttaagtctctagcatttgcctaagtagtgctaataaaagctgacatttctatgggcttataatatccagagacaagtgctaaactctgcaaagattctcacttaacaccaggaacaagcctctaagatgagaaactgaggctcagagagctcaagtttgagtacttgttcagggtcctaaaaagcctctttaagtagtagaactgggacaccaacccaggaagcctgagaagagcccaccgtcaaccaagaggctgtgcctctgccctttttgggtaacgaagcaaattcattttgacaataaggctaaaagtgctttcctggtcacaatgcctgaggcgtgtgggaggctgctcactggggagcccagaggcgctgaggacagcatctttctgcgtgcctagctagtcaaggggacttttcagagtaagggggaattcactctgtgctgctgggaactggactctgagtgcaggatgcgttaagcctgcactgaatgggaggaggcgaggactctgaggcttgcagaaccactgcagatctgtccgtgataccaacacatctaaggaaggaatatgacaaccagagtgcctcagagaagacaattatggccaagttgttccttggggagagatgaggaaatcaaagtggggaatacaagccacctgcccgccgttcttgcctgtggggcaaggatgtttcaccagctattccagagttgagagcaaattccccttcagaacttttcagcgttctttattctgagtttgtgctgactaagcttcatgtcattcatgatttggctgccagtgaggatggtgggggggcctgaaaagggaaaagggcaccgtactgtaaatgtatgaatggggttttctgtgggggccacaccggagcatcacagttctttgaaggacaggagagaaggtcagtgcctggatccccaggctaagtaccaggcgctgctttaggatagcctagaagggtggcccctgggcctcattctccacactgtcccaccccttttgaccacctcatctagccatcttgatgatcagttaagataagaatctctagtgaggctacatttttttgtttcctgaataatgcatgatgtccactgaacacatgttactagatgacagtgttgggctcagataaaacttacaacaaaattaatctgatgcagcctccatggctcacatgatccccaccatgtatgaaatgggctgggcacccagggacaggctattctcagaatggggttattgggtgtgtttcttattcctctctacctagtattcttggaagaaggtgaatgaaaatgctctagtaggggagggaaacatgattaatgggtgggggcttatgagt

SEQ ID NO: 41100 - DNA, 2300 bp, Homo sapien
aactggctgtggtggcatgcgcctgtagattcagctattcgggaggctgaggcaggagaatcgcttgaacctgggaggcggaggttgcagtgagccaagatcacgccactgcactccagcctggtgactgagcaagactttgtctcaaaaaaaaaaaaaaaaaaaggtttgagaagggttttcctggtcattaggtggcttttcttcattctgtgatctagagacccaggtctcttccatgttgttgttctgccatccctgggaccttgaagttactccaactggcagcggagatgaaggacaggagagaaggcacaccacttcttaaacacgtcttctggaagtaggctacaatcatttcacttgccagggataagttctagacgagctttagaagggggatggtctttgggaagccaaggtgggaggattgcttcatctcaggagttggagatcagcctgggcaacatagcgaaaccctgtctctataaaaaatacaaaaattagccacgtgtggtggcacatgcctgtggtctcagctacttaagagactgaataggaggatcaccagaatctgggaggtggagattgcggtgaaccaagatcacaccattgcactccagcctgggcaacagaccaagaccctgtctcaaaaaaaaaaaaagggggcgaggatggtaaccattctctgccataaataccttagtgttgctcaagaataagtgaggttgggtttgtgaacctacccttgcataacatgtgtcaccaactatggccttacttatttgtggattgtttgtaggtacacatggcctcacaggaccattcgtgtggtcctgaaattaatgtatccctttggaaatatgtggtagacatctctctgtgttattaaggatagatctccaccatgaatggaatggctaatgcttacagctggatcatgatttacattaactcctcccttgctggtatcttatagattgtctttggttttgttttcactacaaaggagacagcacgaattctcctacaggctcaccacacaactggtgctgtgagggagacgaagatgagtcatgcctgtactgctctttaaacactcacaattgaataagctacccaggtgacacgacatggttatcctggccagaaagccatggcttttcctaatcagagcttcagtgctgtggaaacttgaagtttggagggtctgatgtctcagtctggatgaggatgagttccctgccattcctgggttagcagctcccatcctcttagattccaagatggtggctcatgcctgtaatcccagcacttcgggaggccaaggtaagagtatggcttgagcccaggagttcaaggcaaaactgggaaacacagcaagaccctgtctcaaaagaaaaagaaaagtttccaagatggtgtagaacatcagagaggggctcttggagattatctggccatcgtcaccccacctgcttatagatggaaatgcatagactcagagaggttgggggacatatgggcagctatagaaatccagtggacctcaaatcccgacatttctaacctgaattaaattctctcacccttgtatggaggtcctagagtcctattttccaaactttgcctctgaatgtctccatgtcaaagggtttctcagtgtgccagagggcaatggagaatggagcagaaatgaccacagaagaacaggtgggaagattcctgcaacagcaaaaattctgctgcccggttcctgagacatgaagaatgtgttgtctacacaactacatggccagctgcctccttaattttttcattttgttttgtttctgagacagagtcttgctctgtagcccaggctggagtgcagtgagctcactgcagcctcaacctcctaggttcaagtgatcctcccacctcagcctcccaagcagctgggactataagtgcatgccaccaagcgctatttttttttttttttaatttttttagaggcagggatcttgctatgttgccagggctggtctcaaactcctgggctcaagttatcctcctgcctcggcctcccaaagtgctggaattataggcgtgagccatcatgcccagccctccttaattttttaacatgaattaataggacctggacacacacagcctcatttatatcggcagccatcacagcctgccacatgtcagatgaggtctctggggctctcactccttgtgtcgggggtgatgccacatgtggcccagctgtaggtcacattcagctcctgtgttcaccaggatcagatgga

SEQ ID NO: 41101 - DNA, 2300 bp, Homo sapien
gggaattcaagcctaatttggatatgtgcctgatgctgggccatgtgccagtattcggcgaagggagcactggcacacacactttcgcctgctgtgcagtctatttcgggactcagtctcagttgctgctgctgcaggtgacctgacagatgtagagtgccctgcatttgccctggattaaaaatgccaccatttctgatgcaaacttgtccaaccatctttccagtcctctcacccagagcattcattcaccctcacaagggcacactcatcattatggttcctgcctccctcctccactcctatctacctgactaccattcctacgtataccatgcccctctggaatgtgccatctttttgagggaagacaaatatgtgactggcaattaggaaatgaaaggtctaataaagctggggatacaaggaaaggagtagtcaatactacttggctgtctggttggagaaaacttcacggaggtggtaaacatctagcagttctccaagaataaccagagtgaagaggagatttcagtcaggaaaaagaatcttatgtaaaagaacgaatatgctctaagtgtcccggtgtcctgtgggtacccaaatacaccaagaagacaagaagtgaaattcaaagagtaaagaccagtgagtgagaatggggagctacatgattccttgactctagagagaatagcagggcttaaggaaaggaaggaaatgctggatgtttgctttataaagattgctctatcacctctgagatgtatggtttcgagaggggcaaagctgtatgcaggggactggtggaaaccagttagaagtttgtttaaataatttgtagcttaatcattcaacaaatatttattgcacccccaaatggctgccaggttctcagctagatagcccacatagagcagtgagtgagcctgacgtagccccaacacaattagatctcctgttcttcaccttattgataaagccttccctgaccatctaagcacttcttccataatgtcctgcttccctctggcactgaaattatcaccctgaatttgggctgtgccttggaacatctgcctctttcgtggattgacagtgacagggacagggcattacctagaccttctttgttaccctattcactggtgaaaaagtaaaacagcttccagtctaatggaaggatgttttagaaaggatgacagatataaagcaagaagcagaatgaattgcataatttggatgaagggttttaaggagggagaatgtagtggccaatgaaagcattcaacacaagagcccagcacagtctgaggtgtcagtcaggggcccgggagagttccttttttctgttagataatttagtcccccaactatcttgtgagttaagcaatcatagtcatcaatttacagatgcagaaacaaaggcttaaggcagggagtcaaaactcttgcttgaggtaaagtcttccagctcaaaaatgaatagtagctgcaagatgagaaggcaggaaggcagattacaaatgagactttctcactctgcctagtcatggcagttgtttgccattacctggaggactcaggtttcagcctagagtctaaatcttctctctccctctctctctccaggttgaactggtttgttgaactttatggatggagccagccaacaggatgacattgtggcagagaaagaagcttgcagcttcttgcatcagaaaatcagatagagcctctctggcaagaagctgcagacacaaaagaagcttgcattgaaggtgactcagctctggcttttcagcaatgccctaacattggctatttaaaaagaggcaaagtagcttcagtgagacctcaaaccaattgcacagctagccactgcccataaagaagctactggtcagaaatgctggctccttcatagacaaaacggcaaagtacattgataggggctgctggtccaggaggatctttatatcctggccaagtatggcatttgtctctgtcacctggaaaatggccctggagcaggcatgtgactgactcgttctgcaaggcctccagacagctaaatgaagatggcttctagctaagaaacagaggggttcatacacatgcaaagataacttccccacttgtctctgatggaaactcaagggccatgtggaaatggcgtggatttgggactcagctgatgaacttggaagcccagcccagccagtcagcagtttggtccagaacctgtctgcacctcagtgtctagtaaatggaggaagggagaaggagatgaaactaat

SEQ ID NO: 41102 - DNA, 2300 bp, Homo sapien
cttccttgatttccatgattagattaggaagttcaagtcaccttacatttctactttgtagcaatcattgcaattgaaattaattaattttttgtttaagtatgtgtgtaatctagtcaaaagaatagctggagggacatacagaaagacattgtaatcccaacagtttgggaggccgaggtgaacatagcacaaggtcaagagatcgagaccatcctggccaacatggtgaaatcccatctccactaaaaatacaaaaattagctgggcgtggtgtttagcctataatccctactcagatgctgagctacttgggaggctgaggcacaagaatttcttgagccccagaggtggaggttgcagtgggccgagatcgtgccactgcactccagcctggtgatagagcaagactctgtctgctggtaactgaagagaaaaatgatcaaattccagggaataatggaaacattttaatcatttcccttactcagtgctgtcatctttcaatggatttccccagttctaccttcctttacttttctccttaagagtccagattcactcagaatgcccttttcacttactcccatttcattttgaggcttcttaaatccaaggcccaagacagaaatttcaatttgtctctggtcctcctgactgacactcaaactctttttaaaaatattttgctaataacaatcacatcttatggattgtctttcatgtgtttctatgaccctcaaatctcctatttcaacagagatgagaacagaaaggaatgaagtcccaacaacaattcttacctgccacatccactgggaagaaatagacaagataaattagggagaaagaagagttcctataactggaagtcaacacacatgttcaatcttcactcccaagtcctaaatcctacctcacaattttcttgctttctcccttcactccaaattaccatagtactgctttattatcttagtctatttcggctgctgtaacaaaatattacagattgggtagcttataaacagaaatttattcttatagttccggaggctgggaggtccaagatcaaggtgccagcagattcactgtctggtgagggccccatttcctctttcatagatggccatcgttttcctgttccttcacatggtggaaggggtgagggatctcttgggggtctcctttccagagcattaatctcttttatgagggtatttccctaaagtcccacactaactaatcacttcccaaaagtcccacatcccaaaactcttatgctggggattaactttcgacatatgcattttggtggggacccaaaccttcaggctatagcacttattttgagccttatcctttcttattgctacatattttactaagatgaactttctctaggctccacagcacaatgtgttcactctatccaagcacctatcataatatgctgtaattgatttttctgatgtttcttcctatgaaattgtgagctcctggagttgaggaaccatgtttcattatgtttatgtacctaacatatgagaaaaatgactatttctattctgaaagggcaaatatttattaaagaaactcactctattttaaagctgaaagtaataattttactcaattgtattacagtgaaactctggtacattttgagaaattctgtagttttaaatccccaaagacaatggtctaaatatagtactaaaaacctatctaattctttgaatggacattcataaaattggaaaaacaattggttaagaaatatatggcaaaataacctgagtaatcaaataaatacgactttaaatacaatttttagtttttttaaataaaatgggactatctagtgttggcaagagtgtagtcacatagccattcttattaatcttcaaagtgtagattgctaaaaagtcttttcaaaggcaattcagcagtaagtaccaaggcaattgaaatacaactgataccaacaatagaaatgggtttgttgtgattttcaaaaagtaattccgaagtatcacaactcttcctcttttccttcctttcccattccctcttcactttccctttcctctcttgtagatggcatcaccagaaaccaagaagatggtaaggcctggaggtggcagagctgaagaggtgagagaaggaagcctgatgaagaaatacaattctaatggtaaacctagggaatcaggaaatcaatttaactaagccagcttcagttatggcttctggacaatccagtgttgtaaaccctttaaacagaaagtcatcataag

SEQ ID NO: 41103 - DNA, 2300 bp, Homo sapien
ttcaaccactctttggaatttccttggagtcctccactggtttctctgcattcagttagctgatgaactaggagaaaggagtgcaagatttctcatggtattttaaggggcaagaactggaagtggtatgcaccatttccacccaaattatggtggccagagcaattcctgtatccataactggtcacttacatttagctcttggctcaggaggaaaatagatttttcataatcatatagatggtgattgaagccatgggagtgaatgagctcacttaatgaatgagtaaagacttagaaagatggcctaggtccgatatctgacaagatctgtataataatgatgatgattagtaatagtgaaaacttttagagcacttaccgtgttccaggcacatctacatatattaattcatggactccttataaaagccctttgatgtactgctattattatatctttttatatagataaagaaataaagttacagagatagtaaataactctctggaggtcacatagtaagtaagtggcagaataagaatttgaagggaaggcaagtagtttgtttccagagtctatgagtttaatctatgtcatatgctacataattactaacctcaagtacctgaaaaatgtcacattaatatgtaagtatctttgctacgagttcccaaggggcaggactaaaactaataaatggaatttaaattatggaagtgttcagccctggaagaaggcagctctaacagagctatctaaaagaaagcaaactgcatcctgagctagtgagattctcatcagttgaagtacccaagcataagaagaacaaatccttggtaaggatgtcatagagaggattcaagcatcaaatgagtgcttgggagagataacattttttattattaatttttattttaagttccaggatacataacatttatgttttccatatattcaccaatttcttccagtgaatgtataacacttctgccagcctgatttctgaattagttacttatagtaagttccaatttccgcattttccacgtactggccctaaaaataggaggagaaaggaaagaaaacataaaagaagaatgtgcctctgtcattcagatcttataacttacataaagagagaagacacacacgcgtgtatcatcccttgaattgccagagagccacctatttagaatcttatcgggaagagattgagaagtgatttatagatggcagaggatctcaaggttagttcagatgtgttagctctctgcacaaaagtccttttgtcccttcactatcaaggtggttctccagttttagcaagcattgaatcacttgaagggcttgttaaatcaacctcaactttcttattcagtagatttggattagggcctgcaaatttgcatttctaacaagttcccaggtgatgttgctgctgctggtcatgtgatcacactttgggattcctgctccaaggcttatcactcaataccataatcttcagtttatgtgtctagcttcttcttttgaactggaacacagacgatcttgtcttcgaatatgcagggtccaccctattgttcctcagtaaatttgtgtgaagtaagtaatttgaaagaaatgtgtagttttctagaagcacaaagagggaaagaaactatggcagtcagcagggaagaatcctatgttctctcctcccacatgtttggaaacatgattcatgcttggaggtgtcttagattaaaagcaaccttatgcaagtacaaatgtgtatacaaataccccattttataagtatgcacacaggactacagtccccaaaggggcatcagaatattttcttctcacctttcttttttgtcattttccttcctcttcagactgtcacagccacttcatgaaggaaaatattctttcttgtatgttgaatgtaatttgccccttcctggagtccattccctttgggttggcgctggctgaactttgcagtcttcactgaagggggaaccctttctcactgttctctgggagagcagcccctttgaagtcacagctggcttgactaaactcatttcctccatccacaatgtgcctctgatgtagtgttggctgaggctccctcttgccggctcctgctcttgaaacacacccaagtgcaatgttcaatgtgagtgtttggcttggcttaaatttggccaaatcatctgtactttgtttcatttgaaagccttacttttttcttgctctctctttttctctctcaactagttcattccagatgtttttgatttgt

SEQ ID NO: 41104 - DNA, 2300 bp, Homo sapien
aggttttcccactctaacactcttcatgtgaaagggtgttggtctgcatgttcattcgtacattgattttaagtggtggtttaaaagcagcaattcttggacagcagtgccccctaatgatcccatttaatttaagacatcggggtccaaatgatgttcaaataactcacccacagttaactcggacatactttagtgcttttcagctctgtagccagctatgttctaggtgctgctgggaacgcaaatgttcagaaaatttatggtaaggcttgaatgtgccttccaaagttcatgtgttggaaacttaatccccaatgcagcggtgttgacaggtagaacccttaagagatgattagctcatgagggctctgcccttacaaatggattaatggtgttatcatgggagagggttatcaatagaatgggttctaataaaatgatgattttctcttttcctttcacatgcacatgctctcttgccctttcacctttctccatgggatgacacagtacgaaggccctcaccagatgccagcgttatgttcttggacttccaagcctgaaccatgagtgaatggactctcattgtttgtaaattatccagtctatgatattctgtcagagcagcaaaaaatatactaggacaatctacctcctgggagctgtttagagcgctaactccagcctgcatctttggcagcagcacatatacctctcattctggctggctgtgctctgccacattgacctgctttgtcacttgcaacaacctcttgcctgactccagagtctgcaaattttatttccgctttctgattggctctcttgaccctctcctccaccctttactacttatctcactattgccactcatctttcaggtcttggcacaaatgtcacacagaaatgtcttaccccactccccaagcaaggacacagtctcctgttatatgagtttatctcacccttcattttttcttgcaggccccatcacaactacaacaaaactattatttgggccattgggtgtataatgcctctctcagcactcacctaactgtaagctccatgaggacaaactcacctctgtatccctagtacctaacacagcactggaatgtggttgccactcattaataatgtgtttacttaattcagaaattacagaggggtgtgaggtattggggtgttgctgagttcacttttgtttttgttttatttcttagaagaggaatagtggtagattaaatttcttaaagcaacctggcatttaaaaaatcaaaatgcctgtttacttttttttaaaataaatgtatttgaagtttacaacatgatgttatgggatacatataggtaggaaaatggttactacagtgaagaaaattaacatatctatcaactcagatcattactttcttgtgacaagagcagctaaaatctaattatttaacaaatatctatcgcaagaacaaaaaaccaaacaccgcatattctcactcataggtgggaattgaacaatgagaacacatggacacaggaaggggaacatcacactctggggactgttgtggggtggggggagaggggagggatagcattgggagatatacctaatgctagatgacgagttagtgggtgcagcacaccagcatagcacatgtatacatatgtaactaacctgcacgttgtgcacatgtaccctaaaacttaaagtataataaaaaatatatatatcaccagcaatacaactttgttactatagtcctcatgttatacaattagatctctagacttgttcatcctacatatctgctttgtattatatttttaaaataactttttaagatgaatttattctttcactttgaatcattttaaggtagccaatattgcatagaaataaaatgtttatgggtttagcaaagttacaattgactttctctttgacccattaattctatttctagaaatctaccctacagaaacatttgcaaaagcatgagatgacaaatgtgtaaggtcattcattatagcattattcataaatcaaaacattaaaaacaactcaagtgttcagcaatggggaacagttaaataaactgacacacaatggagtaacatgcagctattcaaaagaatggggacagtatctatgtagtaatatggaaaattcatctgagtgtattgcaaagtgaaaacaggaaagcgtagaagagttataatatgctaccttttgtgtaagggaagaaaatatgaacctctatatgtttcatatatctgcaaaaacaggaggacga

SEQ ID NO: 41105 - DNA, 2300 bp, Homo sapien
tgaacaccttaacacaatttttaaaaggtccatgtctattaaattcaataaatggatcatctttgtatttattcctattgccaatttcttttttcccccctcagtactgtttcttattcttcctagtaattattgaatgaatgctggccattttgtacaataaaatgcataggttcctattgtgtattgagattggcttctccttttgcctgaacagcttggcaaagttaataatggatttggggatgtggcatcattgcaggaagatgacacctcaatcaataccggagattacaggggtatatttatgttactcccacacatttcaccttttgtccatcttcactgcttgcttatctggattggaccttaattatatctcaactggattcctggctgatatttcttacttccaacctctccatttattgcaattttgccatagccattagattaagattggcaaaattcccttctggttgcatcactacttctgttcaaagcctccaatgacttaatgcagagaactaagatcccacaaaaaaagaaacaccatattttccttccgaatgaatcttcatgtgtaacagaggagaaataaagaaaaaaaattagaagctgggcaaagtcctaacatccagctttattttttccatgcaatcatgaatggaactccacccttgtataatactttctgattaaataatatgtttttataatcaatataaaaattcatatcaggaattttgaggtaaaatttcttttaaaattttattatgataagcattaatttttaataataaacattttctattaaaatatagaaatactttataatctcctctgattgtgcagatcttctagaatttagaattgtttcttgttaacatgtaatatttcaatttaaaaacctcccctcccccaaataaatggcagagtcacaccacaggaagaaaatgtaattcaaggtaacttttttcttttaataaaaacatgctcctctcttcacctttgtgagtataaatttgatattatatgtaaatgtgccttgtaaactctacagtgctataaaaatgaaagctattttacttaataattaacattaatgctaataaaatattgccccctattaaaatgcaattgctcttggaagactgagacattaaaccaagtatgcatgacttggtgagaaatatttcatcagcaacttttccatgcaataaataaagtggtgtgatggagtaaaggagaaaatgtgtgtgtgtgtgtgtgtgtatgtgtgtgactgggagaaaaacaaagacacaaaagtcaggcccaaatgcttctttgaggcagaattggattaaaacctgggtgacagagtgataggttatcatgacctaataagcttgttttggtgacattgctaagaagttataactcatttcctgcctctgtcacttcagtaatgttctttgagggctccatttcctaggcaataccctgagaaggttggaataagggtctccaactctgatagtctacgatgcactggttcaacagtccatgagaaggtagagggtggcagtgtctcatgtctccctcaagctttatttgtcataaatccaaccgatgccccatatgagaattggaccttacaagagatagagatgaccttaggaatgaactagtcttacattctcattttacagaggcgggaattaagaggcaaggggagcaagtgtctggcaatgaaggccacacagtgagctggtggcagaaccagaattgcaactcccttctccttgttcttcctgctggtttgtgggttacttacttattgccacaatcagtgggattttaggtataaaaatattaataaaggtagcagaaatggaagcttctggtgcaaagaagcctcatctttataattagtttcctcccttctttcctttcttcttgtccttattcccttctttccaactgccctgtcttctgtggttttccttcttttcttgtgcacttgagatattgcaagtgatgagcaaaacaggtgtggcctcttccttcactgggcttagagtcacataagagacagagcaagtaaaatattacgctacagtgctactggcccataatcaggcaactgcagagtcttagggggttatctaatgtagtcttggggtggctggatagacttcccaaagaaggtgatgccgaagctgaggtcggaaattacgaagatcagctatgtaagttaaagggtgaggggaaagggagcccaatgagagggagagagggaaaaaacagggagcgtg

SEQ ID NO: 41106 - DNA, 2300 bp, Homo sapien
agctggagaatgaagggtggactaattgatccagacaattcagtctattgctaaggcttctctctaccccacctccattgcagtcttttcttggctttttgccaatgagttcttcagagaggcagtagatggcagtagaggcttttgaatgaggactttcaggttgcttggctcacctaatttcatcctcccatcctgacactgctgggaatgctgctctggaaagattctctgctgcctgcagagctgacagctgctgcctgaatctactcatctgtgagccacaaaggggcaaagtttaaaggaacagcacttcttagctgttcacagttctacgagggcagggcagaacaggaccagctggtgcctacagtccagttacttctttgctctgtccctggggtcggatctcacctgtttttgatctttggcacattttcctgcaatgatgaacgagtgaggcgggctgggagtgaataaggagacttttagggtaagagggcaacccgggccatctttaggacaagaccaatttctcggaggaatttatatttgcacatgatggttttaaaagagctttcatacacattgattcatttcatctttgaaactaccctttcagttcggtagaagcaaaattgtcagtttcggcagatgaggatgcagagtctcagggtaaatgggaaagtggttttttcaagtcagcctgctctaatgtggtgatcagaactcaaacccaagtcatgtatgtatgtatgtatgtatgtatgtatgtattgatggagccttgctctgccacccaggttggagtgcagtggtatgatcttgtaacctccgtctcccgggttcaagtaattctcctgcctcagcctcctgagtagctgggattacaggcaccatgcctggctaatttctgtatttttagtagagacggagttttactatgttggccaggctgatctcgaactcctgacctcaagtgatctgcctgccttggcctcctaaaatgctgggattacaggtgtgagccactgtacccagcctcaaacccaagtcatttggcaacttagttcagtcctctttctattgagtaaggcatagcaactaacgtgccccatatttgagttcctgtaggtacttataagctgggttatacattttaaaaatctttatcatttactcagtatgtgtcaggcactaaaccatgttctgagaatagaggtgaaaaataaataactatccttgcatactgctctatatgttccagaaactgttgttaatggctttaaaaataattgccaatttaattcctcttagttagtgtccctttgaggtaggtattgctttaacccagtttacagatgaagaaactgaggcacagagaaattatgtaacttgctacagtaagtagtgaagccagaatttaaagggaggcagtagcatcctttttctttttcaaaacagctttactgagtgataagtcatgtactccataatttgcctatttatagtgtataattcaatggtttttagtatatttgacagagatgagcaaacatcacagtcaattttagaacatgtctcataacatgcctcatccccccaaaataaacctgtacccattaacagttgggacgtggtattcttaatagctatactatattgtttccatggatgacacatggtttttgtctttcaagagttctgttgagttcaggacacatagacagattatgacactacagtgtaataagtacagtgacagttgatgctcaaagagcatatagcttacagtataatgcagagtcttaaagtaaggactttaacagaaagagagagagagacagagagcaagagagagcatgagcctgaattttctgcttataatagagctatgattaatgcatcaagtactcctggaaattaaaatgatgttcatagaggggatacttagattttgtatgctggggtcagttgtgatgttaccagattagtcaatgactcctttcagcccccttggggaatgtgatggggatggctgggtgggcaatgggcgtgggcatagtctgggataaacagggaaggttaagagcacctagtgcttggtgtctgggaggtcatgaggaaaggcttcactgttactctcagggtcaacctggtgtgatgcacacaccaattcagcagccaagtttatctaggatatgtcaatctcacaagttatagaaacttccaagaagtagcaacaggacccaggagctcacagctgggttttcacttaatccttgtacagtgttgcctca

SEQ ID NO: 41107 - DNA, 2300 bp, Homo sapien
aaagtaaaaagcttccttccagcaaagaacaatcaacaacagaagaagaaaacccaaagaatgggagaaaatatttgcaaactaagcatctgacaaaggatttgtaagcagaacacacaaggagctcaaacaattatacaggaaaaaatctaataaactaattaaaatatgggcaaaagttctaaatagacatttcttgaaagacgacatacaaatggcaaacacgcatatgaaaatgtgctcgacattattgatcatcagagaaacaccattcaaaactacaatgagatatcatctcacatctgttaaaatggattttacccaaaagacaggcaataacaggctggagaggatgtggagaaaaggggacccttggacactgtttgtgggaatgtaaattagtacaactactatggagaacagtttgggccttcctcagaaaaactgaaaatagaactatcgtatgatccagcaaacccactgttaagtatatacctccaaaataggaaatcaatatattgaagagatatctgcactcccatgtttattgcagttccactcacaatagccaagatttagaagcaatccaagtgtccatcaacaaatgaatgaataaaaaaaatggtacgtatacataatggagtactattcagccataaaaagaatgagatcctgtcatttgcaacaacatagatggaactggaggtcattatgttaagtgaaataagccaagcacagaaagacaaactttacatgttctctcttatttgtgaaagctaaaaattaaaacaactgaacttacggagatagagaatagaatgatggttaccagacgctaggaagggtagtggggtgggtgtgcaggggtagggggaatggttaatgagtacaaaaagatttagaaggaataagatctaatgtctgatagcacaatatattattgactatagtcaataataatttaattgtacatttaaaaataactaaaagagtataatattttaacacaaaaaataaatatctgagatgatagatacctcatttaccctggtgtgattattatacattgtatgcctgtattaaaatatcccatatatcccataaataaatatatacatctatgtacccataaaaattaaagacaaaacaaaactaaaaactacagctttgcacaaaggctattgcaaccttaaacaaaaaatacttctgccaggacatctgtccaccaactgcctgtctaaccttggactggtgccacctttgttactgatccttgtaagcaaagaattgattcaaaacaattgtgtaatccttcttatttttctttttaaaacttttttcttcccttacctgtctgaatacacacatagtttgtgatggcacgcatattcccattgcaatgctcattcttgaataaatatcactgtcttttagagagcttttctttatctgttatttaggttggtgtgactcacataactgttcccaaacagctaagttacttttctccgacttctggaatacccaatagcaggttggggcctatagaatgttggtacacagaagggttatgtatgtaattataattttatatttcaagtctatagtttttacaatggaaattatagaacgtgaaagttaatttggaacatcgtgtctggtggtgatatgcagaaagcacagtctgagctttgtcccaagtgaagtgcatatcaggttcttacagtggaaagggaaggcataagacttttatgaatattaaaagaaaacaaaagtaaagtaaatgcattgtgaaatactgtcagctgaaaggaatgttgctgtattgagtgtcagttccaggaagttactcaaaacttaaaggtgtagcaatcctgtttatacagtttctgctcctataggcactttacttcatcttgaaacccatagggagtaattggaaaggacatgggtttcaggcaagtttttaattcctttcacaaatcccctttttatttatatttaaaataaagattgttgtaagattggatttagataatacatgcatggtgcttaacacagaggaggcattaagcacagtaattcctgttgtacagagccccacatgtaggcagttcagaggtgcttcccagggccctggcgctagtgcctgtccctcctgctgaagttgcctttcctggtgtccagtgattgaattctaaattcagcacatataccagaggaatacgagccaaagaagttgttccagctagagttgctgggaatccatgaatcaaagacttgctcagctagttctgtat

SEQ ID NO: 41108 - DNA, 2300 bp, Homo sapien
ttctctactgaatctgatgtaagtataaaagttatgaagtgtgcttttttaaaaagagtgtatgtctgactattacattggaaaatatggtctggctaaatgtaaaatatttagcagtaaattattactgctaaatagcaaagcttgatctataagaaagctaaccatttagttgcaatatcagtatttgttcctagtgataatacctttgtagccttggatagagagtctttttaatttttcaattggctcctcttgtataattattttgtcacagtattttcctcctaaaaaatgatttctgaaaagaaatttgaaaaataagggaacagatatgtaaacacattcttaagttgactttacatatgaatgttactttattgttgctgtagtactgttttacatatgttgagtttaaaatttggtaatgtaattattgaattttaaaaaaaatgtggtatatttttgactatttggcaggtttattaggtagaattgaattatgacttgctccaagcacaaaataacgttaccgtttttagggatctttactcccagtttcacgtgtaaacaaagtttctttacaatgttctaagtaaaggaataaagaaatcattgtgtatttgtggtgaggtgaaaaggagcagaaaagtctagttaactaattttatatgattggtagacaaagatttaccaaaaaccttcttgtttgttaaaatatttttaaacttaaaagaccagtgtgatagtattaaaaacgttcttacttcatcttataaatttggactgattccttttccctcataagagaaaattttagcatggaggaattctgccagtcatttttctctaaaatatgataatcataatgtttatgattttaagtgctttatgccttacctgtggtgctgaatgtggcctagttggaaagatttgtaaagaaaccttcatttcctcttagagtccacctttttccttaaaatataaaagatttgtccttagagaaacaaatgaccagtattattaaaagcaagatttctgttaacttgagtcaagcagagagaaatccagatttagtcattcattaacatatgttttgtggctaacaccacaggtggtgaaaatgcccatatgtttgtgtccttgattctgctttttataactgtaattcttccttcatttttctcttactcccaagtgtgtaggaactcagattttctttagtatttcaaaatttcagtagtagtattgtagtgtagcttaaagtatctagttttcagcagctgagtaattgtggagcagttttataacttgaaatcctctgcacaggattcttgaccttctgttcatcagcagaatagttcagtgatactctcttgggtttgttgttagatatatatatcctctcttctttaacctataatatcatatatgttgagacactttcgaagtgattcctggaaaagggggtgagcacctaaaaactattaaagtttttttacttttttatatcaaaactcagtcattaaaagtaaaatgaactttataggaaaataaaaatagtttgtcttaaactatacatgagcaacatgttttagtaggctttcttttgcattaaaatctgtgatttctgatgcatttacagtgatagtgatgaatgtagtagaaaaagtgattgttaaaactatcacaattaaaaattttaattataattctcagattggtttaatataccaagtcctaatttggaacttaaactaagttaataatgtttggtgttcccttgttttctgtaatatctatgtacttgaaactagtcatttaaatgtaggactatggaaaaagtattagtcttttctttaaaagttcaaagttaacattaactagaattaactcatctttggaaatttgggttgttaattgcttagagttacacatgtattttaaaaaattcatgtcactgtaaattttcttgtgctttcctgctgtttagatgcccagcctacagagtctgagaaggaaatttataatcaggtgaatgtagtattaaaagatgcagaaggcatcttggaggacttgcagtcatacagaggagctggccacgaaatacgagaggtaaagcgcatttatgtattttctagttaactgaaacttactgtcccacctctttgtaatctcttgttttctagacttcagaattctatatttcatattaagtattatatttgaaggatgctcacttggcattgtttcagaagtgattgcagtgaaatgagcataaaaggaaaaactgtgttcca

SEQ ID NO: 41109 - DNA, 2300 bp, Homo sapien
gttcaaaacattctaattcactctccaaaacccaattcaaacatcaccatcagaaagtcttccatgatgggccaggtgtggtggcccacacctgtaatcccagcactttgggaggctgaggcaggtggatcacctgaggtcaggagttttagaccagcctggccaacatggtgaaaccccatctctactaaaaataaaaaaattagctgggtgtggtgctgcatgcctgtaatcccagctactcgggaggctgaggtaggagaatcacttgaacccagaagtggagaatgcagtgagccaagatcatgccattgcactccagcttgggtgacggagtgagactccatctcaagaaaaaaaaaaaaaggtcttccatgatgattctcaatctactccctgccatttaaagttagtatcttcatgagctacacgttgaaaataaataatttaagtaaaactgagttttctggcaggtgggcacctgtaattccagctacttttgggtactgaggtgaaagggtcacttcagcctgggaggtcaaagctgcagtgagctgagatcatgccgctgcactccagcctgggcgacagagactgaccctgtctcaaaaacaaaacaaaacaaaattatgagctttcgtgtctatcctctcctactagattgagagcttccagcatgtatgggttgtatcttagttattttgcaaccccagcacctactggctggtatacaggaggcaaggcataaatgtatgttgaactgaagtgaaaaacagttacaggggtcatgagaggagtaaattaaaggaataatgatttactttaaagacaatcttaattttgtaaactacaagattccattaaattacatttcaaatgcactagagtatgtcatttgtatataatatgatacaaatagcgaggtaatctgcatgaattatttctgtagtcacccaactgcagagacatattgggtcacccaactgcagagacatattgggtcacccaactgcagagacatattgggatagacttaatcaatcagattaataaaacagtaaaactaaattactctggtgacatgaatattaaagtgcatctagaaataaacaatgtagtactaattactctagcaaaaataatgtggctttaagttattgagaattagcagataactatgttggcaattttgagtctggtataaagcagtataaaacggtttaagagaacacccatctgataggccaaggtcaccatagtagcttataaggtaagcttttacaaacgcatatttccaaaaagaagaaaaatatacagagattaaattaagataatgccaatgttagaatcaaaagacaatgtatctaaaaatctaaataagaaataacaatgggtaaactctagtttggtatacagtatgctgtcactaaatttcatttatagtataccagtaagtataaaaccagaagatctacattggctgatataggcaacaatatctgcctttacagttaacattttatatgtatttctgcattattggttattattgttgcttgcaatttttaccttttcctgtcactattattaaattataataatgtaccaggtgcagtagctcacacctgtaatcccagcactttggaaggccaaggtgggtggatcacttgagctcaggagtttgagaccagcctgggcaacagagtgaaaccccatctctaccaaaaatatgaaaaattagctgggcttggtggcatgtgcctgtagtcccagctactctggaggctgaggtgggaggatcccttgagccaggtaggcagaggttgcagtgagctaagattgcgccactgcactctagtctgggtgacagggtaagacctcatatcaaaaaaaaaaaaaaggtgtgtgtgtgtgtgtgtgtgtgtgtgtgtgtgtataaaatgatccaaacactcccacagattggaaagccaagaccaagtaatcttttaaatactacatttaaattcatgcttcccacttgaccataacataatactaggtttacaaaaagatcaagtgccaagtcttgaacaagatcttgactatcaaagtcaagattctgtaaatgtaaggaatttgagacaaagaggaaaagggagacagaatagcagaaaaagacacaagaccaagtttgaaacagatgcaaataaactaaaatacagctctaatgtaagttgcctcatctgaaagaatatcttcaagtcagcaatctgctcgacatcctcaagctgattaaaagtcatgctaaacatgcactt

SEQ ID NO: 41110 - DNA, 2300 bp, Homo sapien
cttccatgatgggccaggtgtggtggcccacacctgtaatcccagcactttgggaggctgaggcaggtggatcacctgaggtcaggagttttagaccagcctggccaacatggtgaaaccccatctctactaaaaataaaaaaattagctgggtgtggtgctgcatgcctgtaatcccagctactcgggaggctgaggtaggagaatcacttgaacccagaagtggagaatgcagtgagccaagatcatgccattgcactccagcttgggtgacggagtgagactccatctcaagaaaaaaaaaaaaaggtcttccatgatgattctcaatctactccctgccatttaaagttagtatcttcatgagctacacgttgaaaataaataatttaagtaaaactgagttttctggcaggtgggcacctgtaattccagctacttttgggtactgaggtgaaagggtcacttcagcctgggaggtcaaagctgcagtgagctgagatcatgccgctgcactccagcctgggcgacagagactgaccctgtctcaaaaacaaaacaaaacaaaattatgagctttcgtgtctatcctctcctactagattgagagcttccagcatgtatgggttgtatcttagttattttgcaaccccagcacctactggctggtatacaggaggcaaggcataaatgtatgttgaactgaagtgaaaaacagttacaggggtcatgagaggagtaaattaaaggaataatgatttactttaaagacaatcttaattttgtaaactacaagattccattaaattacatttcaaatgcactagagtatgtcatttgtatataatatgatacaaatagcgaggtaatctgcatgaattatttctgtagtcacccaactgcagagacatattgggtcacccaactgcagagacatattgggtcacccaactgcagagacatattgggatagacttaatcaatcagattaataaaacagtaaaactaaattactctggtgacatgaatattaaagtgcatctagaaataaacaatgtagtactaattactctagcaaaaataatgtggctttaagttattgagaattagcagataactatgttggcaattttgagtctggtataaagcagtataaaacggtttaagagaacacccatctgataggccaaggtcaccatagtagcttataaggtaagcttttacaaacgcatatttccaaaaagaagaaaaatatacagagattaaattaagataatgccaatgttagaatcaaaagacaatgtatctaaaaatctaaataagaaataacaatgggtaaactctagtttggtatacagtatgctgtcactaaatttcatttatagtataccagtaagtataaaaccagaagatctacattggctgatataggcaacaatatctgcctttacagttaacattttatatgtatttctgcattattggttattattgttgcttgcaatttttaccttttcctgtcactattattaaattataataatgtaccaggtgcagtagctcacacctgtaatcccagcactttggaaggccaaggtgggtggatcacttgagctcaggagtttgagaccagcctgggcaacagagtgaaaccccatctctaccaaaaatatgaaaaattagctgggcttggtggcatgtgcctgtagtcccagctactctggaggctgaggtgggaggatcccttgagccaggtaggcagaggttgcagtgagctaagattgcgccactgcactctagtctgggtgacagggtaagacctcatatcaaaaaaaaaaaaaaggtgtgtgtgtgtgtgtgtgtgtgtgtgtgtgtgtataaaatgatccaaacactcccacagattggaaagccaagaccaagtaatcttttaaatactacatttaaattcatgcttcccacttgaccataacataatactaggtttacaaaaagatcaagtgccaagtcttgaacaagatcttgactatcaaagtcaagattctgtaaatgtaaggaatttgagacaaagaggaaaagggagacagaatagcagaaaaagacacaagaccaagtttgaaacagatgcaaataaactaaaatacagctctaatgtaagttgcctcatctgaaagaatatcttcaagtcagcaatctgctcgacatcctcaagctgattaaaagtcatgctaaacatgcacttaacatagcactggtaaattgttgagaagggtcaagaaaactaatattcatctaatatt

SEQ ID NO: 41111 - DNA, 2300 bp, Homo sapien
tgtagttggagatattggagctgaactagatattcatgtgttgaagataatatgaaagatttctgcttctggtgggagatagggttagaggtgtgtggttactcagagctcatatctaagggactttgcacatgtatgaactcctcctcctgttcacattgaggacagtgatccatctggacccaggttatctgaggttggacgtcagtatgtcagacaagtggaccaagcttcttggattaggaggacttttctatcagcatcaacatttgtaaaacatcatctccagctgggggcggtggctcacgcctgtaatcctagcactttgggaggctcaggcaggtggattgcctgagctcaggagttcgggagcagcctgggcaacatggtgaaaccccgtctctactaaaatacaaaaaattagccaggcatggtggtgtgcacctgtaatcccagctacttgggaggctgagacaggagaatcgcttgaacctgggaggtggaagttgcagtgagccgatatcgcgccactgtactccagcctgggtgacagcgagactccatcaccaaaaaaaaaaaaaaaaaaatctccttcagtttcattgaaattgaccagaattataatagctacaatatagaatccctgaatcctcctgaagtatgataattaaggtaaaagtctgaggcctaggaatgttgcccttagtgtgtgccttgaaaaagccacttcatctctccatgactcaacacgtttctaagtaatatgcccaccatgttacataccatttggtttctacataactcaagaggaagacaaaaaggctaaggtaagggctgcccttctgtgttttgtggcaaggagtgatttcttggccccatagagtaaggcgcagatagttaccggaaccttagctctttgactagagcttcgttcataatcaggatttcatggataggctccctggttgcatgaaactcctgaaattttatgcaaatgtgtgtgcatgtctgtattttcccggggggaaaagtccatactgttacagtattttcagttgggcctgtgactgcaaaatgttcataatcatttacctccatcttagtgatctgctcagctgtcaaactgaaaacaaccctgggagagataacattgtcatcttttcccctttaatgttaataaaaaaaaattcagctttataacaggattaggagaagctagctagatgggatgttctgtttttgtctgtaaagggaaagggatcatttatgttcaaagagtgaaaggggaattagggaagtaattaagaggctgtgccctctgtcacatccaagtttctgcccactagatatttttgcccagagtcgaccccagaacaggggtctgatatatctgagagtgttgtaagtggagtctaatttttgttctcagaatgatcatttttcaccacccaagggcgtctccgcgataccatcgcaggcggtaacagtacagtctcctggcgctgggcgcctgccaggaacacgtgccgcgccgggaatcgcgggcgaggctcagtacctgacccaaaggggagaggcgcgcccgcagcctagcggttccaggcgtggggggaatatggcaacttcgcagggctcagcatcgagtcccgaggtccagttcctgccatttccaagcccgctgacaagaggcaggtcaccgccacctctgaacctccgtttcccatctgtacatctggaaggctggaagaccccaacccactcagaagctatctcggcgcgatatttgcgaaggtgctgcccctttaaggaggccggggtgcaagggggtggccacgcctccttcctctgcacgccgcgcccgccgaccacctgtctctggcttcgccccgccccttcgggaggggcggggatgaggggcggagaagataggctaaggatttaccttgcggggcgggcgtgcggcgcatgcgcacggccggacaggtccgcggcgccctcacttcctggcattccctcctccccctccccgtcgttaccctgtacatccgggtcacttgccctccccgctcggagctgccgcctggcttgtcgcggctctgccacaggggcaggtgttgaggggctcccggtccggctgccgccgctcccccgctccggacccggggctccccctagcgccgctgaggagccgcctctgcggctccaggagggcgcaggagcgggactgagagcgcctggaggctcgagcggagggtgagtgattggtttttgccattttcccctcttccttcacactccta

SEQ ID NO: 41112 - DNA, 2300 bp, Homo sapien
gaggctgagagtggctaagtgcttgggctctggagtcagacaatctaggtacatacccagctccaccgctgtctaatctgtgtgatcttgggcaaatctcatctctcttccagctgcagtatcttaatgcatgacactgggccatgataaacctgcttcatgggcctgcacacacttggcacctgcttagtactttataaatgttcagaattgttaatgctcattttataagcggctcagctctgcctgcttccaaacccttttcctgcttctcctcaaggtcatagttcaggacccagtgtttccccacctacttctcagcccccacagcaaggtggacattagttcccttcctttaggaatgaaggcactggcgctcgggtaagcttagagagcagtccagggagtactgctgaaatggcaccatctcagggtccccagctccgagaactgggcctggccaagagaaggcgcaaggcacctttgttaaagaattggcgggctgggtgtggtggtttatgcctgtaatccccacactttgggaggcggaggcagggaggatcccttgagcccaggagaaacaggccagccagggcaacacagggagacccacctctacaaaaatctataaaaattagctgagcatggtggtgcatacccgtggtcccagcaactcgggaggctgaggtgggaggatcgcttgagcccaggaatttgaggctgcagtgagctatcgcatcactgcgctacctagcctgggaaacagagcaaaatcctgtcttagacaaaaaaaaaaaaaagaaagaaaaaagaaaagaaatggaacaactggctcctaatcaggtaactcagcactgagtatgatgtgagcacactccaacccccctatagctggaggtggaggtggaaagacaatggaagcctttgatgtaacccttttgataccctgctagaggacagcagaaagatacttgagagaatgttgtctatcttcccgagaaatttctggttgaatgtcaagataatgataggatgggcttctgggccaggggagcaaggcagagggaaggagagtatcagtttcctaggcatgtcctgttacagggagaaaaacacagtattttccattctagatcaggggaaagatgaggtctcccataatacctgaaactggaattatggcgaggagctttttatgtgggaatttctgtactaaatttaaagtccttggagaaccgcttagggtagcaccgacagcccgcaccgtcccctcaccccgctttatttttcctctggcacagcacttagcaccataggacccatcagatatttacggcctgtccccgctgcccctcccgggcagggattttgttttggttcgcagctgcagctccagggcctagaacagcccgggcacttagtaggcccagtaagtatctgcgggagggctgaatgggtgcgtggacagcattcctctcactgaccccgctgcgaggtgagccaggcaggggctgtcaccattcctgaagtccaggtgagggggaagcgacccagggatgggaacctggccggcctgaaggtctggagaccggggttcgagcccaagccctgcctgacaggcagtgaccttgggggtcactcttgcgcctctcggagccgggtttcctcctcgcacaatgagggcgatgacccccaatcgcagcgcgccccgcggtgacttgcccaaggtcaccaccgtcccgggcccgtggcgccccggctcgggaggacacgggccaggcgggcgcggggttctggggtgggggccggcgcggggcggtcccggggcgcggcgcgcgctgacgccggggccccgcgatgcggcggggactgggcgcggggggaggcgcgtcgcgaggcgagcgtcctccttttgtgcgagcgccggcggctcggcttctcgaaggtaaacagcgcttcctcttcctcctcgccgcgcctcttccttttatagttatttctcgcctggcactcgcccgggctgctgctgctgctgctgctgccgccgcggcgggggcagctcgcaaacctgtggcggtgacgtgagccccgccaacccggaaacggcggcggcggcggcaccggaggctccgaggctcctgcgctcccgcgccgcgctcccctcgcccgcccgggccgccaggtacgtgccggggctctgaaggcgccgccgcccggccggcccgcgcgcgcgcccctggatccgatttgcccccggagagggcgcggggtgcggggcgcgcgcgtgatgggtgcgggga

SEQ ID NO: 41113 - DNA, 2300 bp, Homo sapien
ccaccgcattccagcctgggtgacaaagtgagaccctgcctcaaaaaaaaaaaaaaaaaaaaaggtaaattgtaacagttatgataatagtaacaacaatggtgattgctttctcctgggtcctatccatattaggttctatatattcgctatttcatttaaccctcaccataacctaacgaagtcattattatccattccatttcacagatgaacaaactgaggctgagagtggctaagtgcttgggctctggagtcagacaatctaggtacatacccagctccaccgctgtctaatctgtgtgatcttgggcaaatctcatctctcttccagctgcagtatcttaatgcatgacactgggccatgataaacctgcttcatgggcctgcacacacttggcacctgcttagtactttataaatgttcagaattgttaatgctcattttataagcggctcagctctgcctgcttccaaacccttttcctgcttctcctcaaggtcatagttcaggacccagtgtttccccacctacttctcagcccccacagcaaggtggacattagttcccttcctttaggaatgaaggcactggcgctcgggtaagcttagagagcagtccagggagtactgctgaaatggcaccatctcagggtccccagctccgagaactgggcctggccaagagaaggcgcaaggcacctttgttaaagaattggcgggctgggtgtggtggtttatgcctgtaatccccacactttgggaggcggaggcagggaggatcccttgagcccaggagaaacaggccagccagggcaacacagggagacccacctctacaaaaatctataaaaattagctgagcatggtggtgcatacccgtggtcccagcaactcgggaggctgaggtgggaggatcgcttgagcccaggaatttgaggctgcagtgagctatcgcatcactgcgctacctagcctgggaaacagagcaaaatcctgtcttagacaaaaaaaaaaaaaagaaagaaaaaagaaaagaaatggaacaactggctcctaatcaggtaactcagcactgagtatgatgtgagcacactccaacccccctatagctggaggtggaggtggaaagacaatggaagcctttgatgtaacccttttgataccctgctagaggacagcagaaagatacttgagagaatgttgtctatcttcccgagaaatttctggttgaatgtcaagataatgataggatgggcttctgggccaggggagcaaggcagagggaaggagagtatcagtttcctaggcatgtcctgttacagggagaaaaacacagtattttccattctagatcaggggaaagatgaggtctcccataatacctgaaactggaattatggcgaggagctttttatgtgggaatttctgtactaaatttaaagtccttggagaaccgcttagggtagcaccgacagcccgcaccgtcccctcaccccgctttatttttcctctggcacagcacttagcaccataggacccatcagatatttacggcctgtccccgctgcccctcccgggcagggattttgttttggttcgcagctgcagctccagggcctagaacagcccgggcacttagtaggcccagtaagtatctgcgggagggctgaatgggtgcgtggacagcattcctctcactgaccccgctgcgaggtgagccaggcaggggctgtcaccattcctgaagtccaggtgagggggaagcgacccagggatgggaacctggccggcctgaaggtctggagaccggggttcgagcccaagccctgcctgacaggcagtgaccttgggggtcactcttgcgcctctcggagccgggtttcctcctcgcacaatgagggcgatgacccccaatcgcagcgcgccccgcggtgacttgcccaaggtcaccaccgtcccgggcccgtggcgccccggctcgggaggacacgggccaggcgggcgcggggttctggggtgggggccggcgcggggcggtcccggggcgcggcgcgcgctgacgccggggccccgcgatgcggcggggactgggcgcggggggaggcgcgtcgcgaggcgagcgtcctccttttgtgcgagcgccggcggctcggcttctcgaaggtaaacagcgcttcctcttcctcctcgccgcgcctcttccttttatagttatttctcgcctggcactcgcccgggctgctgctgctgctgctgctgccgccgcggcgggggcagctcgcaaacctgtggcggtg

SEQ ID NO: 41114 - DNA, 2300 bp, Homo sapien
gtcttcacgttgaaacataattaaaaactgagataaattccatgatctaatctgaagatgcagagtttctctgagaatataatatttaaggaagtacaggagttacctaggcactgaagatgagagaggaagccttccagacagagagaacaacatgggcaaaggacctgtggtggaacaactgcagcatgttccaggatctaagaaaatgtccaatgggccgggcacagaggctcacacctgtaatcccagcactttgggaggccaaggtgggcagatcacctgaggtcaggagttcgagaccagcctgctcgacatggcgaaaccctgtctctactaaaaatgcaaaaaagtagctgggcgtggtggcggacacctgtaatcccagctacttgggaggctgagggaggagaatcaattgaacccaggaggtggaggttgcaatgagccaagatcgcgccactgcactccagtctgggcaacgagtgaaactgtctcacaaaaaaaaaaaaaaaaagaaaaagaaaaagaaaatgtcttatggctacagcattgtgcctggtagacaggataaggtcagagaggtgaacaagagtcagaacatgttcagtgatttggatttttattctaaagcactgagaagctgttgagggatgttaagctagtggtggagagttgagggatgacacaatcaaatttgtgttttcaaaattgtattcttcatatcactcaattgttaagtgtcagtcttatttggatctgggttttttaaaaaaaaacacttgttaaagacaccatttttgacatttatgagactattaggaatttgaacactgtgtgaatatttgatgatatcaaggaattattgctatctttttaaggtatggtagtggttttacagtgttatttttttccaaagaccttatcttagaaatccatgcggtaatatttatgactgaaatgataagatgactggaaatttcctcaaaataataatgcacgggcaggaaggttgagggtttggatgtggtgggtatgattatgggttaatgtgattagactggctggtgggttcagggggtatatgatacacttctctgtttttatgtctgtacacaattccctgtaataaaagattaaaaaaaaaaaaaccccacaaaagattattctgctttcagcatggaagactagatttcagagggagaaatggtgatgaggggagatcagttaggaggcagctgcagtggcccaggtaagaatgatggaggcttggtccagagctggaccagtggaggtggggagagataagtggagagatctttaggaagtaaagtagacatgaattggggatggattggatatgggggtgagggagatggtggaactgagatgtctctcggtttttcgccctggatggagatgccacattgagctaggaatcactggataaaagccaaggaggtcccttggctcaatttatttttatatccccacctctgtttccctctattctgcaaatattgaagctgttcccttatgtaacatcttttatcccagacttcctgtgctctgtgcactcagcaattaattaagctttggtatgcatgaattaattaaaatcctctcccaggttcagaggggctgtcctgaaatatgtatattcttctatatctgccttcttcctgcaactggtttcctttgccgggtgaacacttttgctttctcgtgggcacccagctgcaggtgtctgtctgtctgtctgtcgcatccatcagcacactttaattttatgtttaggagcctaggtctagagaagttaatgacttgtaaattgctctccaacgtagagctagaaatagaatgccagaaggattcctgagcacttacttgcacagagattcaatgatggaggtatcagccccaccataggaagctgaaatagtagtttccttcatatttctggacagccactctgtggtgcaagaacattcctgacaaaggtgcagcctccatatgaaatccgatcttggtctgagacaatgtcttctgcccagtttcaccggatgactcttgtcccctttttgtcctgccccctatccaggtcgttttctgatgtgacggctgagacatgagatcttcagcctccaggctctccagtttttcgtcgagagattcactatggaatcggtgagtgatctctagcccatcctgtccagaaaactcggcgtgggagatacagcgggattcttcttgggagttgaaatgcaaaattttatcaaacacaagcactggaatctaac

SEQ ID NO: 41115 - DNA, 2300 bp, Homo sapien
gctattatagagaacaacaaattgaggagtttgcataagcagggccacatgaattagtcagcgaagtatacatgcgttattcttcaaaactcatttttcccaaagaatcttaatggacagaacgtgtgtgtgttgcgggggagtgggggtgttctccttctggaacaagttgaaagttggttggggtaagttaagttcagtagtgatattttaaacttccagcttgaagaaagtaatagtgttaagtgtttgcagatggtaatcacatgggacctgaaacagagtctacagagggtaatcatacaccagaaacaacgctgcttctgtggtatggatggctggtaagagtttggatcctggacttaggtgtgggtcctaacttggctttttactggctacttgctgactgtaagcaagtttcaaacctctttgagccttagttttgttacctgtcaaatggagagaataagacttttgcctcataggttttgtcaagagaactatctaaagtgagacatggagaacagtgagagtggtgcctggcacatggaactagggggagaggaaatgttagctatcctgatgacagtggtgatgaagatgactgttacaggttgaattgtgtcccttcaaaagatatcttgaagtactaacccccaaaacctcagattgtgtttttatttacaaataagctctccacagaggaaacaaaaattaaaatgaagtcattagggcgagcctggatccaaaatgactggtgtccttataaaggaaattaggacctagaggcagatatgcacagagggaagacgatgtcaaggcacacagggagaagacacccctgtgactgcagtgatgcagctacaattcagggaacataaaggatttctggcaaccaccacaagccaggaagaggcaaggaaggattctctctgagaagaaccggagagggtgtggccctgctgatatattgattttggaattctagcctcctgaattgtgagagaataaatttctgttcttttaagccatccaattttggtactttttaatgacagccctagaaaattaatgcaatgataatgatggtggtggtggtggtgatggtgatgatgatatgatgatggtggtaatggggatgataatggtgctgctgatggtggtgatgttggtagtgatgatgatgatggtggtagtgatgatgatggtggtagttctgatggtgatgatgatggtggggggatggtgatgatggtggtgatgatgacagtggtggtggtggtggtgatgatgatggtgatagtggtgatgatggagttgatgatgatgatggtggtgatgatggtggtagttatatgatggtgatgatagtggtgctgctgccactgctgatggtggtgatggtgatggtgatgaagatggtggtggtggtggtgatgatgatggtgataatgatggtggtggtggtgatgatgatgatggtgatggtggtggtgatttggcatttggcctaaagactcacccagaaggtggccacatgtgtctgactgtagatagtcctgtggctttaatttagcgagcactggcatgaatattccttccaattttatattttagacatgcctccagtggcattttttgggaacttcgttggtattatactaggagcaggtgattcaaagtaaatattcccagtctagagagtgagatggacactgaagagggacagttcctcaagaggtgaagtgacgtttgattcactgcatgactgtgtgggaaaagggaatccccaaagttctctcagatggtggcccatgagtcaccatgtagacaatggtggggcgggtgctttgtggccaagtgtagagacttggagaaggattggagaagaggttgatgtggtaggatgtggaagggatgggagccaggggcttaagatacaggggcacagtgagcagagactagattgaaattgagaagaaggtaggtcttaatcctgccaccaggaagatgagatttgtgagttgtgctttagaaacatccctctgttggggctcagctgtacctccttcacctccaggttgtgttggcctccctgtgcattgcattgagaggatattcaaactgaaggggagaagcacggattctgaaggatgaaaaaggaacaatgtgagttattccatgtcttagagatagtgtggtatgacagagagagtgtaaactctggtatcacatagtcctgtgttggagtccttcatggaatctggctctgtcccttgcttggtgaccttcggcacctt

SEQ ID NO: 41116 - DNA, 2300 bp, Homo sapien
taccaaaagtacccataacagactattaaacagagaaggaagtcattagttctcaatggggatatcaggaaagttctcatgcagagacaacattgctcaaactttgaaggatgaggtaagcaagtatattcagggaggaatacaggggaagaggaggaagttgtgtgcaaaaagacactgaattgttaaaacgctgtcctcagatcacagtagagaccctgccttaataaatatgcagaggataaatgaaagcattatgaaagatctatcatagcttcaaaagaatgtgtggacttctcttgattttttccctttcactctctttctttctttctttcttcttctttctttctttgacggagtttcactcttgtcgcccacgctggagtgcaatggcgtgatctcggttcactgcaacctctgcctcccgagttgaggtgattctcttacctcagcctcccgagtagctgggattacaggcatgcgccaccacacctagctagtttttgtatttttaggagatagggggtttcaccatgttggccaggatggtctcattctcttgacctcgtgatccgccggcctcggcctcccgaagtgctgggattacaggcgtgagccaccgcccccagccgacttctcttgttttaagtggctcttaatcatttggtggtttgcatattccaaaaagcttctaaatatttgtgttgaaccaatgctttcattcaaaaacagaatgcttcttgggctgaatggcactatgtcatcccaacaagaagaacatcggaatctaattgtgtcatccatgttcttattttaaaacaatctacggtaacacccttccagccatgaagcgttcagtcagttgaacagatgtgatgtgttctccctgatgcattagcttcaacctctgagttcatgaaattgagtttctttctgtagcatgctgtgttcattcatcagcctgagtcattttatctgattgggtccaatctccccctccttggcccgcctccttttgctgctgaataaatcatcctgggagctgtccaggttggagaaagattttcataggaaagttccaactgcatccagcccctcatttattcaggctgagtccttagggccccaaggagaaagaagtgagaaaataaagtgatgccttccattgccaagtttgctaatatggtcattagcacagatgccttcgggcaatgcccgcagagagaggacacagctacccacacattctggcatagggtctataggacagccttcccagctgtgctccgtctgggttcccatctcaagttaagagactcattacccacccgagttccagtagggtgaggctgatgagtccaagaaattcaggaaggaagaagcaagaagcatttctttgacaggaatgtaattgcaggggttatttcattaagggctagataactgtaacacagagttgtttgaggtacttttacccttaacttccaggcccatgggataggccaactattctgggagatctttaatgttaacagattaattcatctacaagcagagttaaaaatagaatcagccgtctatctatttaaagttgagcgtttcattttggctttcttgggggatggtagaatacaacttaaaaggattgaaattaaagaagtcttttccagggagtgaacgaaattctagaaatctactggttagggattggggggaatattagaggattcttttctcttccttctggaattctgtgtgcaaggcaggtggcccgttttgggtttaacccgaagccgaaatgcgtggggagaaaaacaggaattaaaaagcaaagaattaaaccccgcgtttctgggacacggccgacagaaataaccctggagacagtgtatgtggttgggggtgggggtatcgaaattatttttccttaggacaggcaggagggaagggagcttctcttcttgctcaggagggactgagggggcggcaaggcaaggcggtcatttgggctttcatgggacgccacggggagccgcgaacgcgcccagggcctgacgtcattggccatcagctgactgtgctctgggcccgggctccactggctgcagccgcagtcttggtggaggaggtggtgaccaccaccgctcctccacctgcatccggctgcgggactgcggcggccgcgtttgccctgcagaccctgcaccccgggacgcggctcatctgtcattagcaccggcactaagctcccaccgctcagcgacttggtccgccgcaagctccgccgcaggctttgt

SEQ ID NO: 41117 - DNA, 2300 bp, Homo sapien
ctctccagcaccaccactttccttgttccaaccttggagttacataactaacagatgcctctctattgctcccaagtcagcagccaacaaatccagggattcttttccaaagtaagattcagttctttctttttccacagccaccaccaagactgagcacctaacactctctcctgtattggggccttccgatttggctgcctacctccacagtttctctgccacaccattccccctgcaaggccctgcttctgataatttaatgttactgttatgctttttgtaaaaatcacagaacagtttcttaaaagacaaattccaaggttgaatgtaaagttgtttatcagttttatttacctgtttttgttttcatactcttgaataaaatcctttatttatatattgaattaatatactctggcccccacctgtgtgccagccaaggatacataaacatgaacagaatatggcttttgccattttctgaaaagcaaataggcccatggtaaaacacaagcactcatgacagtttatttaggatgcagtgagaaaagtgctgtagcagagaggaatcaagataatgccaaagtcttagggagaaaactggaagcatgaaagattttataggtgataaaatatgcaacagggcattaaaacatgaataagcactaggtagtttggtctttactgttagcaagggacagtctctctttttttttttttttttttgagatggagtcttgctctgtagcccaggctagagtccagtggcccgatctcggctcactgcaaactccgtctcctgggttcaagcgattctccttcctcagcttcccaagtagctgagtgagaatataggcatgtgccaccacccccgcctaatttttgcattttcagtacagacagggtttcgccatgttggccaggctgatctcgaactcctgacctcaggtgatctgcccaccgcccacctcggtctcccaaagtgttaggattacaggcgtgagccaccgttcccagctggacagtctcttttataggtacagtacacactctcctctccccagctgccatgactcactctaaattacccttcatcctctccccagcctcttttaggactcccctaggctttgctaattcaaattctgctttcttccaagtccacctcaagccaagactaatttctcctcagcgcttcctagctctgatcttcatgttcttcatcttctcctcccagtactgcacaatatcatttcttaatcagaaggttagccctactttttaggacaaaggttctcagtattatcattgtatttaaatcatctgtatatgtgttcgtagatttggctcagcacctaggaatctgcttttcaacaagtccccaggggatccaagcacaaaaggatcctggaccactttgacccactttgaggaaggctgtgttaaacctctgcggttggcttttatatctccatatgggctgtccgcagcccacggcgcctagcatagtgtaggtgcgttgctcagctctctggctcccggtgtctgctcagcttggtgactattagatacctcaattattaatgacacccagagtcaagaagagtagctcagccaagtgcacagagctgccctctccagaggagactaactcctgagggataaggtcgctctgaaagtcacaagagcaaaaggaaattacattttctgccctctcaaaaaatgagcagccatcaccccaaatgaccttagtgcatctcaaataaaccatgctttcagagtatgcaaaacgcactgcaagttaaaccgattgcaaaagaaaaagcccacaggtactccgtgcgctcaaagccatcatcctcacaaacgtaaagtgatgcactccaaatagagatcaaggaaaacgaatgccacgcaggtcaccaggcttggaaaatagaaggcacccgaagttgttctacgtggctgtccccagccacccattccacccgctcgacaagggatcctgggccgagcccggccatccgcgggggcggggccgggacggcggcggcgcgctgacgtaacgggcgtgggtcgtccgtcgcgccgcccggcgaggagtgggctggcggcggtagctgtcgcccgcttggttgcgtgaccgcggggtccgcgtccgctccctccacccttcgcccttcgcccttcgcctcgttccggcctccgcggcccagcaacggccgtcatggtgccgtcggcgctccctgcgcggccccgctgagcctcggtgcggcggcgagcgcggtcgagatcgc

SEQ ID NO: 41118 - DNA, 2300 bp, Homo sapien
ttttgggaaagaggaagttgggaagaggtcaaaaatatattagttttgggacccaagtgagtttgttggaagggatcagaagctaggataaggaggaactaaaggaatgctttaaggaaagggggtgtaagtaggcttgctttcttatttaacctgtatgaaaaacctacttttattaagctagcaatataagtactttaatagtatcttatttaagctagttggctttgcttgcagaacttgatatggatattatcaagttcttgatagctttatatttgatgtcaatgacaagttaggtaagttacagtacttctgtgccctctgctaattaattagaagtaaagtgaactaggcacttgctgaacagtaggtaaaaggatctagagtcagaaagatcgactagaaaatagtctgatacaacatgaaggactatgttcaggtacctgcagctgaactcgaaaagccttatgaatttacttcaacaagggagtcacctacatttctatacttgagtaggtccaatgattttattttacttgttctgatatttataagtagaatattcatatttatttaaaagtctatatagtaatttcttttgtgattattattgccagttatttcaaccttacattgtctttgatataattttataaaaacctgaaattgtaaatgaaaaattttaacctatatgccttctttatagtgggtagttttttatttttagtaagtggtcaaaaaggtatttttgttttgtgttgggccttcctgagaaactcactgtgatcatttatttccctatatggcaatgcatccctcatctgttaggcacacacatttctgcaattatgttcattggtcatgatttatagaaagctaaaatatttaaagtaatttagaaatttgctggtacttgagtttagtgtggcagttactctttgaagtcatcaggtctgggttggaattgcagttcctcagatcctccccagctgggtgttactggacaaaattggcctctctaagctggtttcctcatttatccaatggagatgatcataaccctcagagagttacgataggagtgagtgaataatgttgtaacatccttagtacagtgctgtacacgtcatcttcagaaaatggtaattgtccctcctgctattgatatagttatggttgtgaaccatatgtaaaatttattgtgatttttaaattatgggcttacaacaaagatttttatgctattgggaatcctatcttaagggtccttgatcatcatctgcttaccctgattgtaatactcctcttactgcattactaataatagctaccattgtattgagtgcttgcttaataagagctttatatacaattttatttaattcttattattatgaagaaggcattattacatctatttttactgatggggaaacttgtgtgtagtaagacaaagtaacgcacccagcccagctggacggagggagactgattcacttcagatctgtctgttccaaagcccatgttctttaacccatggctgtccactagacacttcaccatttgcttatctgtctctcctggtaaacctaagcttcccaaaagtgggaactggacattgtttgcattccaaggttacatttatatttcaagctcttttaaactaaaagcagtgtatagtgtataacatcagaaatgttaatgtaagtgaaacttaatagcttattaagaatctttcttattgaaaataacaaaatttcccattcttacagaaaacttgaaacattaggacttgttttttagacgtgtggctagtctgtgccatgctaacaatttgaatttactatatttggctttgcattagtgttcactaagtactcacttaatcttcttttcaggttataagcttctttcatcattgcaatacaggacctggctcagtgcttgtgtgcttaatacatatttgattttaatttattttagtgtcagtattaatgttgatctaaagtatttttagattatttcagttgtttgggattcatcagtgagcaaaacaatgatccctgccttcatctgagtttgtcctggtgagggggcacagatgaggaccagtaaacacaatagaaagtttatttaatgtggtaggtgataagtgctatgggaaaaagaaggtagagcagggtaagggtggtcagagaggcgtagatgaagaattgaagaaggtgacagagttattatagctgttagtagatacttgggcatgccccaggcagagggaacagtgagagttaagatcc

SEQ ID NO: 41119 - DNA, 2300 bp, Homo sapien
ctacattttaagcaaaattacctttgtcctctgtcttttctcctcagaatgggcaacagctgtatcggcacatatatttgggttgtaaagaggaagacaacgttcagaaaaactatgaactactttatacttctcttgctcttataactattgaactggctaatgaagaagtagttattgatctcattcgactggccattgctttacaggtatgctttcataaccgttcactgcagaaaacattttttataaagcagacaacatctttgaaatgttgccgttatccaaggacatgaattttaaaagggaggtatctagttgtaaatctaaaatactcaagactatgactacattcttcatttattccttttacatatgttgcatgagcatcaactggtgtgctaaatatccttcaaggccatagggatatagtgtgatgaagcagacaaacatagtccctgtatccacacttcctacactgggggggatagtcattaaataagaatgacatacatgcagttgtttaattagagttgcgtaagtgttatgtaatagaaggacagtatgcaatggccatatatgcatgtccgtgtgtgtgtgtatatatatatgagaacaggaaaggctttcctagggaagagagtttaagttggaaaaattaactctcttgtaaaagaacatttgttttcctttcagaattgttttagaaaataacttctgataaagtggcatttttgttagctttccaaactacctgcagttttccagtgtaatcagagaaaatgctggtgaagtataagaacttgatctctctgatgtgtttgtttcttattaaaggacagtgcaattatcaatgaggataatttgccaatgttccatcgttgtggaatcatggcactggttgcagcatacctcaactttgtaagtcagatgatagctgtccctgcattttgccagcatgttagcaaggtaatgtatttagaaaagtccttaaacttgaattttgtacaaaattgctaattttattccagtgatgattatttttaactttggtgattacgtatcaaattaaggtaattctataaaaatctacagccagtaaactgaaactacagctaaaactgtagctactgtttttatattttcttagatgcatgttgttttattataatagtttaatgtagtggttgaatggaatatgtggttttcttctagaataccttatgtgatttattctatgacttttttcctttgaacccttatgactcttagtatgtaaattttcttaaattatactcttttgttgtttattctaaactacttgaggcagatctcaaaagttgaataattactgtgcatctcagagaattgtcttgtgtctttcaaatatatttagttgtctttagcagtaactcttacatggttatttgcatgacttaataaacatttcaatgcccccaagttacctagcagaaaaagtccacttttaaagacatctgtaagagagaactttatttttcttaaattggaagcacatcatttagtccttgctaaaatgtagacttgtagtgtactctaagaaacaaaactcatccattcattaatcagacatttgagtgaatatttgatgcccaccactagagaagtaaatactacaaaagcagagtacctctttgctcacagttcattggaggagccagtccacacaagtgcctggagaccttgtacacaggctgcaaaaggtaatgcagcaggtggaggatggtgatttgtaaagcgatttccaaaatagtgcatttgagaaaatagatattcttgctttattataataggcttaatcaaatgtaatgtgtcatcattttttgctttatatattattttattgtcacagttttatctgttaaattttaaaaataatagatgtgaaaacaaaacaaactttacatttgggctgtaaacttagcttaaattcaaaaacaaagtgatgttatttcttataaatgtttaaagttgtttttttttaagctgttttctgaatttttatagcaaggtactgaggggtagggtttttgatttttgttctgtttttgaatattttttaggttattgaaattcgaactatggaagccccttattttctaccagagcatatcttcagagataagtgcatgtatgttaattctttacattttaaggatggggtactgacttgataaacccatcagtaataattataaaggagtaaatattgttacaataattcctggtgctttatactaatcatcattttgtgtctgtca

SEQ ID NO: 41120 - DNA, 2300 bp, Homo sapien
gagatactttaactaaattatctgcttccctgactattcctggactacagctatatctcattgccacccttcttcccaatccaaagcctcctttgcgtcctcctcttgtatcccccccaccttaacccacaagtataagatacctctactccctccttggcgaccaatcatgcaccccttaccatctcattaaaacctaatcacccttaccccactcaatgccaatatcccatcccacagcacgctttaaaaagattaaagcctgttatcactcacctgctacagcatggccttttaaaccctataaactctccttacaattccctcattttacctgtcctaaaaccagacaagccttacaagttagttcaggatctgcaccttatcaacgaaattgttttgcctgtccaccctgtggtgcccaacccgtaccctcttttgtcctcaataccttcctccacaactcactattccgtgcttgatcttaaagatgcttttttcactattcccctgcacccctcgtcccagcctctctttgctttcacttagactgactctgacacccattaggctcagcaaattaccaaggctgtactgctgcaaagcttcacagacagcccccattacttcaatcaagcccaaatttcttcctcatctgttacctatctcggcataattctcataaaaacacacgtgctctccctgccaatcatgtccgactgatctctcaaaccccagcatcttctacaaaacaacaactcctttctttcctaggcatggttagtgtggtcagaattcttacacaagagccaggaccacaccctgtagcctttctgtccaaacaacttgaccttactgttttagcctagccctcatgtctgcgtgcagcggctgctgctgctttaatgcttttagaggccctcaaaatcacaaactatgctcaactcactctctacagttctcataacttccaaaatctattttcttcctcatagctgatgcatatactttctgcttcctggctccttcagctatactcactctttgttgagtctcccacaattaccattgttcctggcctggacttcagtccggcctcccacattattcctgataccacacctggcccccattactgtatctctctgatccacctgacattcaccccatttccccaaatttccttctttcctgttcctcaccctgatcacgcttgatttattgatggcagttccaccaggcctaatcgccacacaccagcaaaggcaggttatactatagtacaagccactagcccacctcttagaacctctcatttcctttccatcgtggaaatctatcctcaaggaaataacttctcagtgtcccatctgctattctactactcctcagggattattcaggccccctcccttccgtacacatgaagctcgaggatttgcgccacccaggactggcaaattagctttactcaacatgccctgagtcagataactaaaatacctcttagtctaggtagacactttcactggataggtagaagcctttcctacagggtctgagaaggccaccgcagtcatttcttctgttctgtcagacataattcctcagttaagccttcccacctcaatacagtctgataacagatgagcctttattagtcaaatcagccaagcagtttttcaggctcttagtattcagtgaaagctttatatcccttacggtcctccgtcttcaagaaaagtagaatggactaaaggtcttttaaaaacacacctcaccaagctcagccaccaacttaaaaaggactggacaatacttttaccactttcccttctcagaattcaggcctgtcctcggaatgctacagggtacagcccatttaggctcctgtatagatgcttctcattccagacaccagaccaacttagactgtgccccaaaaaacttgtcatccctactatcttctgtctagtcatacacctattcaccgttctcaactactcatacatgccctgctcttgtttacactgccggtttacactgtttttttgcaagccatcacagctgatatctactggtgctatccccaaactgccactcttaactcttgaagtaaataaataatctttgctggcaggactatgctgaatctccttaggcactctctaattagatgtcctaggtcctcccaattcttagtccttttatacctgtttttctccttctcttattccatttagtttttcaattcatacaaaactgtatccaggccatcacctatcattctatacaacaaa

SEQ ID NO: 41121 - DNA, 2300 bp, Homo sapien
aaagaatttaaacaaatatttaaggcaaaaccttttaaaagctctccaaaagacctcacttggcctgatgttacttagtatcatgcctcagtttccttatctgtaaaaagtggtggtaatcccaagtgtagcatttctgatgagttatgaattggcagggagaaaacacacacacacacacacacacacacacacacacacacatacacaaagttaaaatagtttccaatttatgtagccaaggacaatggaatttatcagaagtgaagtgcccctctgggcaggagctgagttcagtgcctttaaaatgaatttccaactctcatttcttcccatgatactgaagtacaaaatatccatctaaaatagaaattaaagtcaagaaggcacacagaaattttctagtccaaggacttccttttataaatgaagaatcttaggctcaggtaaagtgacatacccagagtcactcagttgtcccatagagaaccaggactcaaaagtcaggtctgcccactctccctgaccttgtttcccctcaccacaccattcttccatttatataatgcatcctagagattgtgtcaagatatatgactttgtgtcgcgtggaaagcacccagtttatccagcaggagggggatttccacttttattgcaaaacatgcttgcttgatgcaatgcatttcagatctagaaaaaaataatgcaagcaagctacatttacagatgtgtaaacaggcaaaatttccagaaccgtccaattttacttttccaaatttatggaaccaacccagattttttaaatgaaaatactaaaaccatatgtaaccgtaagacaagctaaaatgtaagcagacagcctgggaagcactgccctactgtacaggtgtgatattaagcacaagccatcctctggcctcttatgagatgttgttattctctgaaaaactttgatggaaaaggtttctgttaggcttagactgaattagctaaatgaccatgccacagtattattgtatcactcttctcacacacctaggcactggttgtggatagttgccatggtgacaatcaagataatccagatgacctaaacaaatgtctgtatgcagctgacactgctattctccctcacagtcttgtcaagagccacagtagctatggcagacatttggttgatggtttcatcatttcctaatacgagagtctggcactatgttggagagaggaatcacttcctcagagataggttcctttcaactcacatgtcaacagttactgtacaaaaagctcagaatacagtaatgattagagcttgacccctgactttaggaacttagaaccaaagcccaaagtcccaggccaagggcagacattgtgagcagcagaagggtgttttttatggagagccccataaatggatgggtgtagaccttgaagtctgagatgggaaatataccagaatgctcaatgcatcagacatgaagccccacgggcttccatttgacatgctggcaatctgaaggacaaagggcatgggttatttgggccttttccccactccttcaatatggctgaaagtgccagtggggattacaacctaagaaaccctatgccccttcctgagggcttgattattgaatcctgatcttcctggaatctttcacttgagatgatcacctgcctaacatccaacatgttactatgctcttctttatgtacatgagttactggaaaccaacaataaaggagagtgagtcatactctccacatatgcgccaattaattttttaacttacttattagtattcttgaagaacttactatcttaagtattttaccaatagatgatgcattttccagcaactcaatggagttctaccttaaagtatttaccattgatccaaaattggaggaactaccttagattcttttaataacctagaaaggattggagcttgtattatttcctaaaccataggcaggcagtctagcttccctgctggatcataagaccaggacagcagagattgggtttgtattgatcagtagtagggaagtattgattgtctaacatctagtaagttgtctttatcagtatagacatagacaaaatacatgttttatgaatgaataaataataagaaccttaagagctgtttttttcccatttaagaaaacaaaaaggaaaagagaaaaatgatcttctggaataactctgctttgatattctccttttgttccccaaaaaatatattccagaaaggcaaaccaaacctgctcaagttgcctatgca

SEQ ID NO: 41122 - DNA, 2300 bp, Homo sapien
gttacttactccaactcactgctgagcatttatctattcacggatgtacaggggtcctactgggcactgccacgtttccatatgctatttcctataattcctcacaaaacccatcaaccagtgaacagccttttcccctggggttcttgtcatgaactcttcccgtttaatattaagttcccatgctagagtctgtttctggacaaagaattctgttgcactgagagtttatttttgtaccgatcccacactgttttaatgatttcagtcttacagtttaacttcctctggaaactcctcccttcttgatttggagacctcttttgaggttctcccctttgatagtcattctatagggtggtggttctctgacccttcccctgccccagcccatacattcctactcccttcccttccttcttcccttccctgtctcctatgctctccttggccaacttctccaggcaaatccagagctggtgttcttgcaggtctgattcctcttttcttatacactagggatagatcctcggccttgttcacagggtctcccctcaccccatgtctctcaccccagctgacagacatgaggtgagagagtgggaaggaaaggaggccacagatgccatggggcagcaggaatggaggcttccccgatggcggtgggcatggaagaagtgcaggatgctcctgtcctttgtcagtgtcttacaagatctagcctttgcctgtggcctactctcattaagctcaagccacccttcccctccgcacccgctgttctgctgtttggagggctctctggacatttacatagttgctcccagcttgtcattagggtctcacctcgaagcatcacctccacaataaggccttccacgaccagccggtttagagtgactcccccagtcactatagcgcagcactctaatttgttaccacatactatttaccaatatcggaaattctactgttaaaatttgtcttttcattgtcttccaccggctaggacggaggtcttaggagtgcagagacctcatatcttcaggacagagatcactaccctttgccagggaagctcacgaggggttacagattggttgattgaattgaaatttggaccagagagggaatgactggcttgggtgcaagtcgggagcaaagcaggaatcaaagattctgactgcatttcttcagtcctttgcccacccagacaggtgaaggtgctattcaaagattgggggaggagagggccgcggcatccaccatgaaccacgaactagagggaagagggaagagggaagagggaagagggagtcacgagcttcgctaccacagagcaggtgcgttcgcggtgcgcccggccttgaccaacccgacaacttggcttttacctctgaagccgaggagcaggggtagggggtgagggaaattcacaaagctgcaaccacagagccaatgtttggtgggcgacaaccccccagtccctcctcccttcctcttcttcccccaactgcccgccgtcacgccccatccaggggaagccccaacgcccacgggagctccaggagccgggctctgcagccgcctggcgcactgcctggttgcaacgggggcggcggtagcccaggcgatcctgggtccccagacaatcagcggtgggggtcggcgggaagaggcggggcgccgccgcccgggcctcccgccgcgacggggcgggacaatggggccccaccccggggaaggagggagggagggacgcggcgtgctctcggcccgcggcgcgctcgctgctgctgctgctgacaggctgaggctggaacgggcggggaggggcgcgggtgggagcgcggaggagggaggaggcggcggcggcggcgcgtgtggctggcgggcgggagggcggctggcaccgggcttgtaaataaactgcgatgctgtcttgggctcgccggcctgggtgccgccgccgccgccgccgccccggagcgccggttccaggctcccgccgccgcgcgccctagcgcctccgcgccagcctcgcgcgccctcccagcttctccgcagcccccggcccgcgaccctcggggtcctgcggctgacccgcgcgggatgtgaccccctgaccccctgcctggcctcccctgccccccagggggcccgcctttgcctgcttttgggggggggtggggaggggcgcgcggatcatggcattggagttcccgggcttgcagccgccgccgccgcctcgttcacgcaccccgagcgccccttcttcccagagcagcagcggagaaggc

SEQ ID NO: 41123 - DNA, 2300 bp, Homo sapien
ctgggctcaagcagtactcccacctcagcctcccaagtagctgggactatatatattaattttacctcagtttctttttttaagtcaacagtgagtaggtctgagagtgaggatagaagcttagagccaacatgtcaaatacctgggttgcaattgctcttgagaactttctgcggttctggagtggctccctttgtctcctgatccagaggctgagatcctttattatttttttttaatttttattaagagacatcgtttctttgtgtcacctaggctagagagcaatggcacaatcctagttcactgcaagctgagatcctttatagtaggcctgacctcatgcttttgtcagcttagaaactaatctttctgcccagtagtagcttccttctagaagctagatcctttttagccttgatgaaccccttgttgttaaaatgcacaattcaagcacaggcgaatttgctaaacttgcctgctgctaatagcatttcatctcctttgtgagtaatcagacatcagtgctcagtgtcacgtgtcagtgtcagcgtgtcagtggcacgaccacagatgtttacccatattgtcatcatcatgtggaaatagagaagtttcagctttcaaaggtgaagtcatctgtctgatgccacacagtaataaatctgtgtatttaatctatgtttccaatgccagagctaatactgttcacctcacactaacctgctttcagaaaaataatagtggatgtcaggtaagtttatagtttgagtgccttttgggaggcctccttggaaatccaaatattcagggaaatagtgcctgaaatcccactcttccagttcagttcctttggcctggcatttaaggcccccattacccccgatctaatctctcattcttactgttcgaagatcccttctatctagctctctttattgccaaactgatgtttctgcttccccccatcacctcactctgttagactttcctgcctctctgtccaagttcatgaccttgtctctacctggcaaactctaataattgccagctgtaaatgcttaacagctattcgctagaaaaattaatttctttgcactcagcattgctctaggaatcttcttttaaaatgcaaacataatacacacatcaagataagaagcacgcactccatactgtttaaaacgactgggatgggagaaggttttaccttttacatattgcccccctcctttttctgcaaatggagtaaagaataataattactttcataataatggtaccttttaaagattcttgggaagctaacgcattaaagtgctaacactaagatctgagggtgaatgagcttgctgatgtgcttcctagtttagaatgggagaaggcgcgttgcacacttttggagaagggtctggggaaacgtgaggggagtgtggggctgtaggagatatacttcctacattttacaattaagagagtggagaatagggaaattgatggagggggtaatgggtggcgtttctggaaagcttgttagccggaaacgagtgttggagagtgactttaaaaagctggaatatgacaacgacaacgaatctttatagtgagcctgttgttttcatagtgtctttcattcactcaaattatctaattaaagcttcacagtgatcctcttaggttatttctcatcttacagatgtgcaaactgaggagaaggaagtgtaaggtcacgccgctggtagagttgggggccaaatccagatctgttggctctggaagctgtaaatcaaacacaaaaaggaaaaagtcaaaggcggtctggaaggcaagcctggaaggcacagaaaagagaagcgtcctcatactttgttcactctaaaccattgattcagggagagggaagcagtctgtggcaagtcggaagtgcgacgaggacgaagactgggtttgggttggggaacccctgtctgctgagccccttcactgcggtctcctctgcttgctccgcggagctcaggaaacgcggcttgttttggtcccgcgcggccgccgtagagtccccgttgccatggctcctgaattccgacggggacgcgctgaggagcaggggtgaagggtgaaaagcgtcattcgaggtccgggtccggcttgcggggtcagcgaactggagaggcgccatgggctggagtaagcccccctccaccttccgtcctcgatcgttccccttgtggaagtagtcccgggtctcgtgggatcctcgccgcccgctcccgccctgcgctgtcggttcccccgcgcct

SEQ ID NO: 41124 - DNA, 2300 bp, Homo sapien
cctaccttccagtacattccccaggccaggctattgcaaggtggttttcttacattggttaggcaccctccttcaggaaagtcttactccattttctttcttctcatttcaccttacataactgccaatatttgctataaaaaaataaaataaatttattgattgctttctgtgtgctaaggactatctcaactgttttggatatatactaccatttgattccaaactcctgctctggaatcttatgacgtagattttattactgccattcccatttcacaaaggtgaaacatgagttcagagaggttgagtaattttcccaagctcacagggctattaggtggaaataggattccagctcagatggtctgactttagcgaatcagttttgaaacaccacttttaactctagcccttgttatatagatattcttgatgttaaagatgtctcatccatactttttgttctcaaatttgatgagtgcccatcccataatacatacttaataaggagttgtttagtgaattaatgaatatgataataaatgaataaaaattactaattcctttttattcaattttaattgatctcatcttagagcctacaagaatctttaaaatttggttcattttcacaagaatgtgttccattgtcatgaactctaccatttttctcaacttgttgttcctgaaacctatgacagagagagttcaaataaagcagattttctcaacagtagcactattcacattttgtaccagataattatttgttgtgggcaactgccctgtgcattgtaggatgtttaatggcatctctagcctcttctcaccatctgccaggagcactccttccctggtgtaacattaacaaaatgtctccaaaacctgccagatgttccctgcagccaaaatcaacctggttgagaaccatcaggataaagaacacacaaggcttgttgtaattcatcttaaccaccaagggaaagcacaattcaaaatgcatcttctgatagcagctatagctaaagagcagaattttgtgatgggaaaactgttccatgcccaccttgcctgtgatgggaaagctgtcccactcaaccttgcattacctttggttcaggccctcagtattttttgccagtacagtgtgctcagcacagggcttgacacatcacaggcagatacgcaacagtgaatcccctgtgcacttcgattaacccctctgacctcaatcttgtacctctgagccaccctctgctaccaacaattttggaaatgcaaaccgaattatgtcatcactaatctgttccctgtagccatgctttagaggtctcccattgttccaacactaaattccaactcccttgtagcatataagaagttcatcattacttaccttccttttacctgtccagcttcatttcttggcatgacctaatcagacttactggttcctcaataaacaggtcagatcatctgatgcagcttagaactcacttctcccagaaaaactcccttgattatcaattagcactgccactcctggtgccctcacagcagcctctaggtaatcctttcagagcacttatcccctatatagcatagcgatcaaaagcaaagaccgtggaggcagactctctgggattgcatcccaactatgttacttactagctgcatgacctcagccaagtgacttaacctatctgtgcctaagtttcctgatcagaaaaatgggataataatagtatctatttcatacagttgttctgaagataatgtgagttaatctatgtaaagcactaagaaagatgcaaggcatagaataaactctaggaaagcattacctatatgtgcattattatttctttctttctcctataatacattgtgaacttttcacacacaaagttttgtcttttacctcagtactcttgacattgagccaaggacctggcacacagtagaattttgagaaacttttgtagaattaatgcagtgagcagacttgggttgtagaaatgtactctgcgcttcaaatcacagttttgaactaaaggtaactattattcgttgttcaccatgctttcatttctctctaggatatttagaaagaaaaagagaatctgccattccttttcttctctcttcaacctcagtacctccaaatcttggctgcatggaagtatctttggtgacatcaactcttctccaagtgaagacaactggttgaaggggaccaggaggttggacacagaccattgcaatggaaatggtgagtttgagtcctcctttccata

SEQ ID NO: 41125 - DNA, 2300 bp, Homo sapien
ctctaaactcagtttgctcttctgtaaaatgagaataataatacagcatctcccatggaattgatgtaacaattaatgtgttgatatgtggaaagaccttagaacagtgcctggtacatagtaagcactccttaaagttagcaattattatgatcattaataataaggttctaatatgtgccagatctttaaaaaaaaaaaaagtagaccaaagtctttctgatgtgagctcttcggaaaagtggatttgtgggcacaggaagagcagagggtctcgaataagtcagaaagattttcctccctcatctagaagagataagccaaggctggaagagggaggatgagggataagaaaaacaggaaaaggagaagaagagaactgtgaattccagtaaagagaataccagacagctgtgaagcagaatagctgtctgttaaatttaggcagatgtgaccaggagtagccttgagtaaatgtgactatattctacaggagtcactaaagcagcagagagtcagcaatgacagatggctcaggaagtgacctgtgttaggactatgcatctgctatgtgttgctgtgtaacaaattacctcaaaacgtggtggcttgaaataccatttgtcacttcccagtttgcgtgggccagggagctgggcagggctagcctgggttgtctgcttctgggtctttcccagttccaatcgagcattagatggggctgcagtcagctcaaggctcaactggagaaggatccacttccaagctcacacacttggtttttggctggattcctggctgttggatggagcatcagacccttactggcttttgagaccactcttgattccttgacacatgggcttctccaccatggcagcttgcttcatcaaagcaggcaagcaagaaagtaatagagtccaacaagatggaagcctcatcatggtagtggaaactcagcacctttgccttactttatttacaaggagcatgtcagcagcctcagtctacactcaagggatggagaatagacatgaagttccagagacagagaactttgaaattagatgggccctcctcctgacagttcctgctgcctagaacatgttctacagaagatcctgccatgtggcagaacctcagggggaaagggaaccccaggaaaggatgagattaacttttccgccagccggaccaactggtgcctcagaagagaacttgatttaagaaaacaaataaagaatacaccttgcacatctgtgctgaggactcgattatttctcatttcttttatttcatttaattcttcaagccatcatatgacatatatatttttatgtttataattgagaaaactgcaactcagaggggtaagtcacaaatctgaggtcacacagctaggatggtagacaggttgaatttctgtcttgtgaccccagaatccgcactctttccactatgcagtggtacctcaatgttgctggaatatatatttgaatgtacatttcttttatcacttacagtagtacagatgtgtatgaacccataaacaccatcaagtctttgagctctactataatgtaaatgtaaaatgccatctatagagttttttgtgaagtccaaccttcattagataaacctattgcctctatagaaattttcataagatcaagctcttgctatttaatagtattctgaatttaatagcatcagtgcattatcctcaataaatttaagtgatttggacaaagatcactactctgcactacttataactgaatgtggccatatgatgagcaagaaatgtcagttcgctgagtctttctcacgttctcgcagccaaaggtgacaagttagctcagaaaaccacccctccagtgaccagggtgtaaccagctggcctgacacatgggctgcacattccctgctgctggcccaggaaactctctgaaatcttcagcacactcctcagtgtgaatgccactgatgtgagcccaacaggaagtgtgacctcattctgcttctttgcctctggttacgcaggctgttttcaaaagaaaacaagagaagttgtaagactgactttcccaagaactatacactcatttataccaggaaacagacaagagaacaagaggctgccgaagacaaaacttctctgcaagcacctgtgcacagcaatgtgcgtgggcatctgtgagaagaaggtagggtgggattccctttattaagagacttctgcacctgttgacattcagacatttttcagccgaggaactgctcagtcctcaatttttcca

SEQ ID NO: 41126 - DNA, 2300 bp, Homo sapien
tttccaaagtgccctctaggggacggtattaactccacagaggattactaagcctatacaattcactgaagctagggatcatttacataagaccttattttatttttttctttcaagtgtcattattggaagacccattgtcaagttccaattaaaatggaacaatcatctttccagggtggattctcaacaaatagttgggagaatggacagaatctgttgttctttatgtatgtattttatttaaattgcaaataacctcaagtttttagtggtgtataataatagatatttattttttctcagtcactagcttgtgattcagcaggggttctgccagagttcagaaagatttaactccaggctgaccatcagaaacttgaatactggtactgccacagatgtgggagaaaagtttccttattttgaacatcattagcaacttctgatacaaagtccttggtaaaagagttttacttgaggctagaactttagctgcaagggagactggaaacatgagtttctgatattttcatcttatttagtgggaggttgattctgcatccaagattcataaggtggatgtatcatttagtttgggtaggattatgccatgtaacaaacaatccagcacccaaatctccatagttaaaataataaatatttatttttttccttatacaacacagtagttgtagattatcagtgaggccttggttcatcataatctgtctagaacctggatggtagagcagctatcatctcaagcagtgctttacactgtgccagagacagaaactttggtgagctggcattaaaaattaccaactggccatgacaaatctcacttctaattacattttatcagccaaagcaaatcaaatagccatacataattctaaggagggtggaaagtataatcctgtcatgtcctaaggaagatgctacaagtatttggtgttctgaactaatgcaaccatgatgagaaatttctcaaacatggaaagagagttgagatgctgggcaaccaaaaaacaagataacaaatatccactagagactgtcttatttatatcttttctataacaaatatccactagagactgtcttatttatatcttttctatgtatcaccatgctcagtctagctcagtagctattagtgacttagtagatgctgaatgaatgtttgttgaataaaaaaagaatgattgtttaatttaccaaatcttactataactgaagcttaaagagagttactttgctattttaactccacactatgaagcaagataaatataagtgacatttgtatgcaacgttgcacttgaaaaccagagtggtacagtggaaaccaagagaaaaaagatgtttcatttcaatattattttcaatgtgttcacttattggtttctccccacagcaaggatactgtctcctgtgcttagtaaagtttgggagggtaggtattcgataaaagcagttctgctatcattagctgtgtagtcttggggaagtgatatcaatgtagccataggttaaggttattcagctgtgcctgagcacgcgcgtacacacatcttagtaatattcgtctttgtattgtaaagatctccaagactggaaagcaatacaattgtaatacagttgtacagttgtgattgtcatgtgacatatttacagcctagtgtctatcacaaagcatccattcaagggaggtttattgattttgtagtagtaaccatgctctattcttgatgtggagtgggatggatatctaagaaagcatgtaatgcatttgaaaaagtttgccaagggtcctgggtaaaggggttttggtgacgtggttcccaacgaatcaagaataataaacaatgcccttcgtcctcaaatctcaaaggtcaaatacttcacaactaccaataggcaccaagagctcgcgttctttcctccagtaaccagagccccgcccgctagcggtccgtcaacgaccgcaaagccccgcctcctacggcggcccgccaatcggctgcgcggcccgggcccaaccctcgtgagtcacgtgacaaggccaggcccgcttccggcacgtcgcgggcggctgacgtcgccggggcccggcgtcgcgtcagggctggccggcggcggaggcggcggcggcggcggcgatggcagcggaccctgagcgagcttgagggctcggacccagctccctcccgcgaaaccttgggcggatccggcgctgcggccccagctcgctccgctcctgctccctccccggccgctgcctgggcggaggc

SEQ ID NO: 41127 - DNA, 2300 bp, Homo sapien
tctctttccggcccgctcccctcccgcctccctccccgtaactcgccggccctattgtctgggcgccgcagctccctcttcccctcccttccttacccccctgcggagggccggatggctgtcaaacctggaggcttctccagctccctgccagccctgtcagcctttcctgcctgtctcgtgccaccccctctctgtctggcctcacctcctcaccttttttggcctggcggtcattctctgaccattgctttacattgtcggtctctatgtcttcttgctcatttcttcttccctctaacttgtcatctccgaaaacttccactgtcctatttcttgccattctttgctcctttccttactgtttttactcctctccgtgctttctgccttgtttttgcttcaagttttactcccagtagactgtcttactttatgaaagttccttaattcaaatccctcttcatccttccctcttcgaacctaagacaaaggaaaatcttgttttttttctggtacttcatccctaagtgtcactgggggattatactcattcaatccatcacttaattatgggctctaagtttgattctagatgttagtgtaccttgtgaactatcccttactgaattcttcctgtgacagacagcagaaaaggttgattcgatttctacacaaacatttaagtaactgccttacgtgttgcgcactgacaagacctctattaaaaatattcatacatttgttcttttgcaccagctacaccctgggcaagctccctgttaactttttaatgctctaatatttgcttataccatagcaggaggatacccactctccccctccaaccatgggtatttgagttcgcatattttcatggccagtattgatgctattttttcccttacctatcagactctttcaaagagaaaagagggagcagttggaattttatgtttgttgttctattttgtctattatgaattgtgacaaaaccattataaaagatgacaagtgtgtgtgtttctttttttctttttaaactgtagggaacatagtcattagtgatctcaaataccgaaagacattttacggatctctcctcgcccctgataacaatcaatttacattcttaattatgagttatgttttgattaggttatctcaaaatgtattcatattcctcacatacccattagtgaaaaagaggccacctcaagtgtgctcggtggccactgtggcccaaaatatagtactttgcatgtgaatgacctagggatacataggtactcctttgcagtttttgttctagcattacaaccacttttattatcaatgtggacactgtctaaattgaaatatagtagaaatactcagttaacaaaagcatgttattattgcttgttgaatgtaaagtataagaaagcagtctcttttgtaatactgtatgttaaattaaaattattgaattatgtgctaccaaggtgggagatcatgggtaatgaaaaatcctaatcccaagaggaattagtggtatcttcactggcagaggagtgtgcctactgtttcctccatctttgtgtgctgtagggccttatctagtgttttgtattatgaggcactcaacaaatatttgttgaaattaaaaattgattttgttctcaagaatttcagtagtcctattccagaacactcagctgtcttaatttttcaaaggcaggaaagcattttcagctctccccgtggagaattttcttgggtatctggaagctcaaatgtaaagcatttttagctattaacaatttttaacagtccatttactcattctttttagatagttttctttgttctttttcttaaatcattatcaagattgcctgcagattgcacagaactttatatagagatgttggtaatactccttcaaatttcttaacaatttggcaagtatttcatattctcatgtattgttttagaaattctgtttaattttaatttgacctgttcccttatactctacttcctatgcattttctgcattggaatctaacttttttctttctcttgaggtagtgaaaagagaatactgaagaataggatctcaagatgagtaaaaagcccccaaatcgccctggaatcacttttgagattggtgctcgtttggaggcactggactacttacaaaaatggtatggaaaatatagaactttcacctaaatatcacaatatctgtagccttacatatgttaattaaaacagtaaattccactgatggtagcagaaacatcagtgtattcaca

SEQ ID NO: 41128 - DNA, 2300 bp, Homo sapien
gtttctgatttcaaacacagtgccctttttaatgcaatattctattatgttatctacaaagagctcgaaaacatcattattagttatagttcatggaaagatcacacttcagttatttttaacaatgaagcttttctatagaaggaataaattcagtgtttgatagcagagtagagtgactatagttattaaaaatgtgttatatttgagtgatggacaccctaaatacactgaattgatcactactaattatatacatgtaacaaaatttcacatgtatcccataaatttgtataaataaacgtaaaagcaaacacaaaatagaactcaacataaaaataaaagagcaaaacagtgggagaattctttaatcacagagctacagtgattcccatgcaagtcatatgattgaaaagcattttaaaaacatatttaaatttaaaaggtgcagtatgattctctttttagtttttttctttattggaggtagaaaacaacttgggatggaaattacttctgacattttctagcaactctgacaacttaaaattttccccgcaatgtggaacccaggattaaatgctctactcttaataggtctgcaaatgtatgatctctgtggcatataacactttccttttggttgtctgattgtacttactcttgtttctcttcccactttgttgattgttctctctcaatcctttttttttttttcattgatggtgctttcttttcttactgcttaaatgttagtctgaaagctcaacttagccatactgcttttagctgcccatactgctccttgaacctttcatcgctctttcacttttctgtacacttttactcctggcctttgtttaatgtttttccttttgcttggagtagccttttctctttttccactacccctttccctagcaaattcctgcttatgtttagggttcagctcatctatcattttccctgaagctttgcattagtctttctcttcagtcaaaatcaatcttttcttttctgttctatagtattttgtttatttctccagtacatctcctgtcgcagcttatagctaattgtatttacctgtgaattccttatggacgggaccagtcttttatcagttgcggtcgcttgaatgcttagcctagtacctggcatataggacagggtattcaatagaaaattgttgattgaatgtgttaagtgcaatcacatgatgttttcagttagttgcaattatgagagaaagagttagaaatacagatttttctttttaatggcttattgttttcaccatatatttttaaggcagtgttaatctacattgttcattgcttaattttattaacgtattttgcttatatttgttaatgtaaaccgtgaattaaattcatttgatgttgtgaaatttttagttgcttggactagggatttaaagtattttgagtaaatctgaactggtagtctatttgacagagcttagtggtctcagcagattcactttgtagagatatttatatttgttttaaaaacatttttattgtgaaaattaaaatgttaggaacactttatacttccttacacctttttttataataagcatttttagttaaaaatacaatagtaaaatgtatttagcaacaaactaaattaacacaggaaaaataaatatttgtacctcagaagaatggtaccaaacagagacctaggatgttgtatagggagttaatgtggagttttgacagttaatgctttaccttggtcaatggagctcttttcttcttcatcagtattattaagctgttgtgataaattgctatctgaacttcagtagctttagaaaataataaaaatcatacctttcttgatttctatgagattgactataatttgaatggtacatttgtcctaataaggaatagcaatttggtaggtgggaatacactatttttaatctttgtagaattgcaagatagcatttttcccttcttttatagtcctttgtattatgagaaagagatggaatgcaacatttgagccctaaaatactaaggtagaatgtcatgtagtattccatatctgccataggtttcctctgctattttagattttattcctgtgaaaatatatccatggaatacctgttattgaatatgcttcctattttatgagaggttatgcaatctaactcatttgattattaaatttgataacctaccatgttcagctatcatgtaaatattgttatctctatatttatgtttatgtagttacctgtgaaagtagctttgaaaatg

SEQ ID NO: 41129 - DNA, 2300 bp, Homo sapien
gtttgcagaacagttttattttggctattatcattacctaacagtgcattcatgatggagttcaaaggtacaagtttgttttaggcacaagagcttaaatgttagttttaaaaatgtgtacagattgttgaaaaccagtatgctttaatatggagtttaatatttcatttggataatccagatagcattcatgtcataactgtcacagaagtagaaatggtacctggaactactactcagatgaatttcagtatcttttggattgccgaaggctgtggtgctagagtagacctttactgatggcctagtacagttaactttttctttatggttagacccatatttatgctatttctggaaatagtgtagtgtcaaattattaccctaccacaaaggagaaaatgaaaaaaattacgtatttaccagtctttggactagacatcttccacattttgactcacataatccttataactgcatgaggtatacagacttattcctgtttgacagataaggaaacagaagcacagaggcattaaatgatgtcctcaaggccacagagctagtaagtggtggaaccagatgttgaacctgagtagtttgaataacaaaaatcacatttaatttattgttttggttgttttttaaggtaagaaatctcaccgctttgttaccagttcaggcagtaaaacatgtagaccgttaggagaaaaagagtcttacatagagttttatgagcaattgtaatgtaaaatattgtcccatacttttaagtttttctgattaaacttacatatttttcccctaacccacaggaatatcgaaaacagaaaaaaaagtgaaattggaagacaaaagctcaacagcatttggtatgaacagaaagtaatctttaagcaaaagactataaagcttgacagagagggaggacatagtctgccccttactctttaccagttaatgctaccttaggtgtaagtgatcatctgttttagttcctactagtgttagtcagctccagatacatgatttattaaacacatatcttgttttatatgtaacttttttgtcaagagagtctcttgctttctccaaaggaacttttgtgtttatgatcatccctagtcaaaattatggctattcaaaaatagacctcgatttaatattgttgagactttagagaatggatgctagattaaaatagtaattttttcacactttcttcttcattatagtttataaaaatgttattgagttttctgctatactattttctgtgctgtaatgactaaaagtcacaaaataatggatgatagtcttaaatatactgtagattagttaactggagcttgaatcactgaaagttggtcaaatatgttggataaattataggctaaaccattgtgagttggagcaatagctagtaggatatgtgtgatgatttaatttgaaatgtaggatactgctctaatatttatttttttaagtacatatgattggggaaaagaatgctttacaattttggaaaaattagtttaatgaaatatatttttttttcctcgtgttcttagccttcattgttaaacacacaaagaatgtaaataaagactggaggagttgtttatgaattgatttaattatttttaaagcttatccaaagcaaaaagtccatcaggttttttttttttaaatctcctaatttattctctcattaaattacatatggaaatgctgagtctcttcattcaggtcctttgtaaattatggagtttaacttcttaccacatcaggaaattgagaatattactcattgaaggttttaactactgtctgtgttaactttaaggtatcaggagttgggatttctcagcactgctaatgaagatcccctcttatagtccaataagcttatcaggacttccagagtcatgacatgaacagtttaattgaacccatccactctgggcaggtgactggaatagctgattaaaacataaatgctgcttttaggttaaccacaaaggaacaactcaggatcagtcgtgattgctaaagtattcacttttatcttttaggtaagagaaaagaaaaagataaggaaagaagagagaagagagacaaagatcactacagaccaaaacagaagaagaagaaaaaaaagaaaaagaaatctaagcaacatggtaagtacactgagatgattattccctctttttttaaaatttgaagtttcctttgattccccttttcttttacaaaatggagtcatgacacgatccccgtgtcccgtgttgagaact

SEQ ID NO: 41130 - DNA, 2300 bp, Homo sapien
ttctcatcttgtttcactctcacgtcatctcttctgcctccatcctttcacttttaaggacccttgccattacattgggcccacccatatgatccaggatactctccctgttgtgaggtcagccgattagcaaccttaattccacttttccacatagcttagcttatttaaaagttctagggtttaggacatagacatttttggcagactattctgtctcccacagctgccaccttcaaatggatacttagcacagaccaatgcgtctcttataagctcacttttccactctctgtctttcctttttcccactcgtttccatctctcatttccacctctcatgtattccctaacctgcgtcacttgacatccttttcctcacagagttgagaagacagacatcatcaggtgggaacttgctcatactctatctaccacatctgcatgcttacatgaaaatattcatcatcttagcctctattaaaatggagggaatgtctgcttttcttaatctagcatttctcaccactgccatccccctttcccacatcttaaggttcatgtaggtaatgtgtaagatttcccatcttacagagccctcttctaaacttctgtttcttctctggtttctccaccttgcatttactcttcagccccatctcatacccacttttgttgccttgttgctcacgcataaacctggaaatcaatcttgataatgccgtcttagctctcggcctccagtctataacagcactccatcttccttaaaatcttccccttatttgccatcacccaagttctgagccaccaacatttctttcctggactactgctgtagcctctgaactgtccccccacttctatgtgtgccttcctgcattccatcctccattccacagctagagtgatcctctggaaatgaaactgtcacatcttgctcctcctccacataagcattgaatgactttttattgcattagggtaaaactttttaaaaaaagctaatctggctcctgtcactctagctttgtttctcccttattcactgtgttccagccagtcttacagcttgccaaatgtggcatgcactcttcagcttcagagccttcccacatgcctggaatcacacccccacctccttttttccttcccttactataccctcaactctccagtaagctgcatatggcctctccccttgcacacatctgtgggactcattacaaaactgagaaaaacagaatttttacagagttcttccaggactagttaattaccttcagagatttattacttgaaaaatttattgatcagattatcactgtataattggtgtgccagacatcaggagaacctctttacgaattgtggggaagaaaaaaggtgaatttccatcttgcatatcttttttttttcctcttcaacttttattaggttggtacaaaagtacctcaattacttttgcaccaaccgaataagttctggggtacatgtacaggatgtgcaggtttgttacacaggtaaatgtgtgccatggtggtttgctgcacagatcaacccatcacctaggtgttaagcccagcacgcattagctgttcttgctgatgctctcccccacttcccacaggccccagtgtgtgttgttcttccccatgtgtccatgtgttgtcatcttgcatattttactgcagacatagttgtgattataatggagagaaaatgtgaaataatcctttttcacctctatagtacttcacaaaagtttacaggtaccagttagaacctggtgccccctactatgtatatattgtctggggtatatttgtttcccaagtgttcttgctaaacccagttcatcagatccatatgtagcttttcatggatgagaagcgaaagtggtagcatgattatttggtgtatcctgaaacatgactttcgttatttttatagtgaccttaattatctgacactttattaatatttctttctgtatcttatgttgcagactattcagactatgaagacagttccctcgaatttttggaaaggtgctcttctccactaactcgatcttctgggagttctctggcttcacgaagcatgtttacggagaaaactacaacctatcagtacccaagggcaattctatccgttgatcttagtggtgaaagtatgtgtaaccatgtgatggttaaaacaagacttacaattcctaaatgtgtaactgagaataaaacgtactctgttaagagcatgcgatttaaaaacttgttagctaaactaatatgaaagtcttg

SEQ ID NO: 41131 - DNA, 2300 bp, Homo sapien
aatttataacttcaccacagaagtagtactttaagagatcattggtatagacactgctaccaacttttttttcccctaatttccgcattttaataaactattttaagagttttatgatatgattgcctaaatatcagtgagaattaaattagagaaattatgacttaagtacttgatcaaagcatattctaataggtgcaacaaaagaaagttcgtgaagtagttgaccatttcaaagataaaattcatcttaagtcatggcttgattttgttgtgtcaaataagtatgaaactgatagtggcagtaagaagccaagccagccaattcaaagaaagggcatgtatccttattcctagcttattcctagtgaggatcgggtgactgtaatactcctctgttttctgcagtgtgaagagtgcttgtgttggcaacacagcgtgtgcatggggctgctggaggagagcattccagagcagtacatctgctatatctgccgggacccaccaggtaaggctttctgtgccgtgctgattgccaggatgcctctatgtctcctccaggattccagagtgtatcagctgtgttcaccaccactacagcaagttctcacatgatgtcattgataggttcttggaaactgtgactccaaatgaaacagcatgctatatgccataggaacttaacttgtatgtatcaattagcttatagtacaattcatttcattattcagtgtgccagtttccaagaacctattgattacccttagtgaggactcactgtacttcttggtcaattagactcaacttccgtattaaaattttaaaatattttttcactgttacatttttattttccacattgattacttagacaaatacattagcatatatttatcaacaaaattactatcctactggaagggaagaggtgtgactttttcctggagaagaattaattagcctctgttcctctgtatccatttctagctaggcttatttgtggcaatcggagtagatctgcattatgaacttgcatgctactgacctggcagttctgcatattcgactcattgtagagcaggtggggtcttagaacactacctgtgatgcctttattttactgatgaggcagactgagatgaaatctatgccttttgactctcaatccaccatgctgtctacttggtgccttcttctatgctagaggatcttcagatagcatattctgcatattgaatttaacttcagcctccaggcaggaaataactaggttttctcaaataataggcatgtggtgaattggtcccatgactattggaaaaaaagaaaaaagtcacaataagtcacaaaaaagtcacagtaagaagcaagagaattaattattcacagccatatgaatgtagacatttgttcattcaccaacatttatagtgttcattattcattgtatttattcaataacaaatgtagacatttgttatttattcagaagcatttactggatggcttctatttgccactgtggtgagatgattgatttaaaccatgccttcaactggctagtagtatagtatgggacacaggcaataaacacctggttgtaataggatctaatttatattaacatgaaggatatggaatttcataggattctgtgaaatcacagacatgggggaagggttcctattcactcagctagaactctatggttcatccagttcaaaacaaaggttagtgagagaaataacccctgtctagtttttatccagccctttgagcctttttagaggacagatgatgactacaaaacattgaaagcagtacactcaaggttccctttgcaagtgtcatctgccactgaccatgtccttaatggtgtttcttctcctgggtgggcaggaacgctgaaggtgtggaggagctcttcctgcaccagttcctcagaacgctgtcttactctttttgaatctgctcctagtgctagagcttgccttgcttaatgagcaacgttagtaggttagcagttgatgaaaaatccgagtaagtgcagtcctctgtgatttaatatcaacttcatctgcaggtcagaggtggagtgcaaaatatcgttatgataaggagtggttgaataatgggagaatgtgcgggttatcatttttcaaagaaaattattctcatctcaatgccaaaaagatagtttctacacatcacctgcttgctgatgtctatggtgttacagaagtgctacacgggctacagctgaagattggaatactaaagtaagtgaagggcagcaaagg

SEQ ID NO: 41132 - DNA, 2300 bp, Homo sapien
tatcatttttcaaagaaaattattctcatctcaatgccaaaaagatagtttctacacatcacctgcttgctgatgtctatggtgttacagaagtgctacacgggctacagctgaagattggaatactaaagtaagtgaagggcagcaaagggagggtcacacttcagtggacgttttaattcaaaccaacactgttggccttttgatggtccagagtaacagtttggaggagagaacaggtatttgaataaagtttcatttttaaaaataaggaaagattaacaaccttttggatgcgttggtgcttcctgtctattctagaatgtgtaagtgtggttaaaggtagatacggcatctagtatttcaacacattttagctcctgtcccactgttttgtatgcttaccgtatgtgcaaaattaagtgcagttgctgtggtgaaccctatacgttgtgtcctccttcaggaatgctatcaaatgaaatagattctaagcagggtgagtatttttttttataaagattgatttaaaggtgatgaagggagcctacaaaccgaattcacttctctgctgtgcaccaaatatgttagtcatcccatacaattttctcttaaacaagtctttaaagaacgtatcagaatattcttgaagtccttatttccagtccttcctaatgcctgactggaattcttctttaaaagaacaaacaaacaaaaacccacattttaggtaaaaacaggatgattcactggttcttcacaagattttcttcatttggatgcacttgcctcggccagacacttgtcccatcctctccttcccttcccatccttgtgtctttcacatcctatccattgcaatttgtggacattgttcagtctgttcctctctcacttctcactggtactgtctcagccaggttgttacatttcacatgaacgattgccatgcttgtccattctctgtgggtccagccttgtactctatcagttcattctttgtactgctgccagtgtaagcttagtaaaagataaatatcagcttgtctttctccaacttaatgtactagagcatcttcctgttgcccaatggactgagtccttccatgacacatactctgtctaccattttttgttgccacataatccctgtgctttttcccccaaacatcccagctatcccaaaccataatccctaaatgaagcaagcttttccatcgctctaggcctttactcacacccaggataagcttctaccactagtgcccctagcagatgcctttcataattacctgcccaactagagttgaccatgttcttcttggcaaactccacgcatacttgtgtcagccactttggtatgcttaatttttttatgcttgtctccccttactaagtcatgggatcctttaaaatagggcttgtgtcctattcatcattttgtctctaattgatagtgtagggtaagtactcagtaactatttgttgaataaaatttgcttcagttttttatcataagcctgaatatgaatttgttttttaaaaggccatgtaagtgctaagacttaagggagggaataatttattaggtctttttttaaaaccttatttccttcttggtatcagtatgagtttctctgcattcataattttgccaaggattttaattggccctttctgtttcatatacttataggccctctttatgttaatattttaaatcataatatctgttagtatgtacgatttattgaaagtcctacacgtcatgtgctttcatgtgatatttcatttaatccttatcataagctacctcatttcattgttgggtagtgaaagagattttgtaacttgttcaggcttctctatggcacagcagaattcaaccccttggactattggactgcagtgccagcttttcttctactatgccttttactgattgagtgttttagtattttctgaatattaaactactagggattcaaatgataaaatttataatttcagaaacaatacttgagtattattggaagagaactaatttgactcagtatgtatctaatttggaaattattaatatgcaaacattattgagccttttgaaaggtttatatctcccgaatgccctttcacttcagctctgatgattggattcctgttttacttactgcagaattaactgtacaatatcatgcttacatgttcagtgaggatgaagtaaatgggcattatcaaagattgttgatggggttgtaattagtataatcccttttgaggtcacttgggtagtacctatc

SEQ ID NO: 41133 - DNA, 2300 bp, Homo sapien
ctggaggctggtaagacttgaggggagaagcctaggatggggctcggatttactatcacagagacagccaatggggtgatgtcaggagaaaggttgaggagttcaggttgggatatgttgaatttgaaatacctgtagggtgtccaggcagagtggatctgagctcaaaaaagtctggctggagactgagctagagagagatgtgggagttccaggcatgtgtggtccccaagaaggacgggcagagcacgggttctcccctgtttttaatcccataccctgacacttcaaatgactgttgtgttttactttctctagtttatatcaggaacccaacaatgatgacagtagctgttatggactgaattgtgttctccccccaaatccatatgctgaagtcctaaaaccaggacctcagaatgtgaccgcatttgaaggtagggtctttaaagaggtaattaagtgcacaatgaggtcacaaggatgggctctaatccaatatgactggtgtacttaaaagaaataaatattaagacacaaacacacacagggaagaccaagtgaggatacagggaggagatggccatctgcaagcccaggagaggagtctccaaagaaaccaacagtgctgacactttgatcttggatttccagccttcagaactatgagaaaataaatttctgttacttaagccacccagtctgtgatagtttgtgatgacacccatagcagactagtacagtagctaacactggatacttattatgtgtcaaatactgttttaagcactttgcatattttaacacatttaatattcatagcaaccctatttgtggaaggtagtacagtctacggcacggcagctatatcggcccctttattttccccagggtttggagtctcttccactttccagcttgtcctcctgcccttcactctacccgggaccatatcctccagattctcacaggtccctccatctctcctcaggtgccaggctcagcaacctgccctcattacctgccagttcctgaccctatctgtcactagctccttacctggctggattggtcttctgaatacttgccattccctggcatgatgcttttgcaaaataagaaaatcaataataataataataactgctagtgtctaataagcatgtgctcttcaatgtctattctcttacaactaccttaacaaatagggacatattattattctccttttaactttgctttccagagaaggaggctggggctcagggagatgaggtgagtttttccaggtctcacaggaacaggactgaaggaaggaagccatgtttgccaggagaaaccaaatggacatacaggctttctgtggaatacacagttcctgctatcttttggttgacaaagtctgaggtcctaggaaagagaggaaagtaatagaaatatgaatatgagtgtgtgtgtattttgcttccctcaccaaagttttcacagtctatattaatgagggcacgattttgcctgttttgttctctgccatatcctcattgtctagattaggtgcctgctactgtggagctctaagaggttgttagagaaagaatagaagaaagaaaagaaggaaggaaggaaagaaggaagaaagaaaagaaagagggaaggaaggaaagaaagaaggaagaatgaaaggaaagaaggatagaagggagaaaggaaggaaagaagaaagaaaggaagaaaggaaagaaggaaggaggaaggagaaggagaaagggtagggtggggaaggaaagaacaaaggattgcttttccctcactgtgggcttgagcctgttccctccaaagatacagagctttggtctttacccataaaaaaggattttgaagtcaccccaccccgttctgttcccccacagtttagacaagatcctcatgctccactggccacacgagtgccctcaggaggagtagacacaggtggagggagctccttttgaccagcagagaaaacaggatggggcactgcctcactgaggacctgggggtgggaaggaaagtgccaacggcagctctataaaagctccctggccaggggacctagggcaagcagtggtttctcctccttcctcccaggaagggccaggaaaatggccctggtcctggagatcttcaccctgctggcctccatctgctgggtgtcggccaatatcttcggtaagttctgaggccatggagccaggcggtggggagggagctccagtgtcagccaggctctgccctgggccttcgaacaggtgcgatctaat

SEQ ID NO: 41134 - DNA, 2300 bp, Homo sapien
agcattttggggaagcacatttcttgggtaccttcgccaggctcaggaatggagacaaggccaatgtatccctgccctcctggactgcaggtgttgctgttagaacctgcccagctgctagaaagttcctaccagggtcagaggccctgggattttgggtgcgcatgtttttctggtttgtgaggagggtaggggcaagcatgaagaaagaagggcccgagcctcaaatttgcaagggcatcctcttttctagtcacaaagatcaacaggatccaaaaaggatgggatttgcgcttcactttaaacatgctgcccgttctagccaacccttctgtggtgcactatgagtttatagcttttgcgagcctggtcattgtcttcggaatattactatgcattagcttgagcagtaagtgacaagttgttcatgtaaatgtctaagatatacggacttttaaacaactctcattttggtgttccttgtttcttaatatagtaggagtctcacctcacaccaccccttcccttaaattatggagcagtgcagacctccctcaacccggggagggccttgctctgagagtgtacttctttccagaacctgtacacatagggcatggagacaggactcaaggccagggtgggagttggatgggctgacttttgtgcccttcataaggtttgatcctgagctgcagacacaggtaggtgggagattagtttccatttgggctggaggccgatggggggaccctgttccgtctcttctctttgaccccacaaagcaggcagagctctatttatgaatgtggccttcctctctgtgcttccaccatccagagggaacgtggcttccctaaaaccctattctctgataatctatgtccctttccaaaatatttgtatgaaggtccagacttggaaattttatcattaaggacaatcagtaaacagagtaataactaacatgtattctatgccacgccacgttcaaagtggttcccatgctttatctcagttaattttgtgaccataacccaacactgttcaattagtgttccccaaaacagtcagaaaaaggttaatgacttggccaggcatggaggcttatgcttgtaatcccaccacattgggaggccaaggcaggtagatcacctgagatcaggagtccaagatcagcctggcaacatggtgaaaccccatctctactaaaaatacaaaaattagctgggtgtggcatgtgtgcctgtaatcccagctacttggaaggctgaggcaggagaatcgcttgaacccgggaggcagggttgcagtgagccgagatcgtgccattgcactccaacctaggcgacagagtgagactgcgtctcaaaaaaacaaaaacagaaaaggttaatgacttgcccgaagtcatctagcttgtaagtacacagccagaatttaagcctgggtggttaacttgaaaaccgttatggagcaacccagagatttagcatcagtggttcaaatctcagttctacaattacttgccatgtgacctcatacaagtcacttaccccttctgagactcagtttccctcactgcacaatgggcttaagcatgatgcaaggactttacaatgatcaaaagtaacagttgatgtgaaagggcttcagcagcatgcagccagtccacagagttgttatgaagttttcctctttcatcctttgttaaagcatgctgacaaactcaaaaggatgacaaaaagtagcagcagaaagtaccttctcctcatgcctttggttgtacagacacacaactcctgtactccaaattcctggcacacagagttgatggtgagggcccctgagtggagatactttctgggccacctgaaatgctgcttggtttctcacacaaaccctgctgtggctgcttaccatcctcagcaagggtgcggaggaatggaaacttttgccaccaacagcatttgctagcaacttccctctctgtggtttttctgtcattcccttgataaaagaacttgagctgcgcaaaagtaaccaatcttcaccaatctcatcttcacatataaacagccgcctttcaagaagcaagctgccagaaaaatgatgcacgatgctctctaaactgggtcattctccacttggagggctcagggcacggttgactttccccgtctgtctcctataccacaggctctgggcatcaccagcggccccagggaaaaagaaagaaatgggaaacagcatgaaatccacccctgcgcctgccgagaggcccctgcccaacccggagg

SEQ ID NO: 41135 - DNA, 2300 bp, Homo sapien
cctgtcatggagcagagcttggtgaagtcagtggggtcagctggtgaatgagcaaagtgctctgtgaatcctgggtggccgtttgcatccagtggagagcatcattcagtggagacagggtgggtttgggaagcaatgtgaccatgtcctcacttcccctcttcccccagcctattccaatcagcctttccttcccgttactccactgaaatggccctcatcaaggtctcccatgacctacaagagcccaatctctgccctcatctctcttgactctgtgacatttgacttttgcttccttttggaaatgctttcttttcttggctattgtgataccgcattttcttggttttcttccaaagctgtatctacagccctgacctctctactgaattcccaactcatatagtcagctgccaacgcgagatatatcccaaatctgatcattttttactgtgaccatgtctgcaaccctaatttaagttactagctcaacccctggatttccacaatagagcccaatctgatctctacttcctgggtcacacatctccttagtcaattttccatatagctgccagaaatgttcctttttaaaacagtggatcaatataatcaccttctattattagcttgaaacattccagtaactgcccactgcaaggagaataaagtcacttttctgatggcctgaaagatctcataactggtcttcttcatccctctgacttcctctcctcccagtccctccactggccactggatctcctagcactgacctccctgtgacccccaaacagccaggaccactcctgccccagggcctttgcacccactctgtacctcaatccccatcgctggctccccattgctcaggcctcagtccagaagtcacctcctccgaaaagccttctctgactgcccctaaagtaattgccccattccatcgcctcctctgcaatggccccacttcagtgttcttcagggcatttctaagatctgaaattctttatttacttacatcatctgtgtcctttcatgagaacatgaactctccgagtcagaagctttatctgtttaggttacaactgtgccctctaaagcctagagagagtccagcgcacagaagcctctgaataatctatgttggagagatgctgcatgggttaatgcttgaatgactcctgacttcactgctccttatggtgttaagggacaaggacttacttctccatcaagcacagcttgctcagggccaagggctcactgcacttttaggaactcacaaaagtcttttctttctaatttcttttaaaatcagaagaaaaaatataataataatgaaaatgtaataatgaatccagcctggtttacattcatccttataacaatgcagtcatgaaatacaatattttaatattttgggggggacaagtcagtccttctgatcctcagctttctctgaaccataatcccagctcacagggcccctggggagaattagacaacgtgacgtgtaagcgtcagctgtgaggggtaatgtggggctatagctccagggtggagggtttacagtgtgcaagggcatcctagagccatgagacctacagggctctctgggtgttgggagatacctctttcgcttcttataacactgcaagagacagacagggtggctctcactgtgtccatttgaaggctaaagaaactgcagctcagaccagttcagcaactctcctacatcgtgtggctaaagctaagaattgtgacccatttttctgaatccaggtccccgcgatgccctgggttcagaccctaacaccctcccgtccctgagtgctggggatttaaggcagcagtgcctcctttcaggaaatcacacacacactggaaactcctgcatactcctcttactataatctgtcaccaaagactggatattcctgtgctggggctcgtgccagcgcctcgggctgccaggtgctgctttccaactcccacatgggctgccctccccctactgctacccacagggcccccactccacctgctcccagacgaggccaactcctggccaagcttaggggcacagcggaggcgctctgtttctgatttttctcgccttccttggagatgcctgtgcttggaagggaaggcagaacattgcatcttggaacaaatctgcttttgatcatgcaaatgaatgcctggataatgtaggcagactgtcaatttcaccagttagaaagaaagagaaaagggggagaaattccccatgacagcgactgatgaagaatttc

SEQ ID NO: 41136 - DNA, 2300 bp, Homo sapien
ggcagtccttacatgccccccacataccctgccctttaattttacatatatgattttagtaatcctcatgtatcaattagtatacaacttgactccaacaaaagaaaattcagactaactacagtttaaacaataaaatattaaattatttcatgtaatgagaagtctgaatggtggctccaacaacaacatgaagtcccaacgactcagaccttttttttgcttccactctgccatcctcaatttgttgactttttattctcagcctcatatacccaaaatggctgctgcagctccaaccatcacatttgcacacaaggaaagaaaagaatgagtagatggtcattctcttcctgaggaagggaatcttttctagaagaccctagcaggtttcccttatgtctcattggccggaattggatcagaggcacatccccaggtcagtaaatggagaaatcatgagcaccatctcttctggggtcatgtctatagggatcataaacctcttccatgaacacaagcctgctgctacctccaagcagccacacatgcttcagcatcccttgttaataagctacaggaaaagagaagagaaggagtaactgtcatttaaacctcagtgtcgagtattcctactgagacctggagatgctgagaacttgccaaggtgtgagaggagttgcaaggaggccattgtggttgggcatggtgcacgaaagggagagaggaagaagtgtacagggagctggctggcccaggggccacgccaggactggggactctgtgctgtgtgatgggcaggctttggacagttgtatccagaagatgatctatacatgacgctagttcaaggattgctctgagatgtgtggatggtagaaggtgggcagggaggctgggtatcagtcaggaggctgtggcagcggtccccatggggagcacagggctggactaggacagcccatagaagacatcccatctcctttcttgcccaaggaagagactcagtggcagcagtgcaataagggtacaggccaggaaacccaaccccccagggatagcaagcatccagagacacgtggggacagctccagcaccaaacggcttctgaccaatgagcagagacggcaaacagcaaatgcgttaccgtggctttcacgtgtcatgaaggtgatgctgtaacctgagcctcagagctcattttatttgtgaattcctatcatctctagatgggtggactgaaagccacctctttcgcttgcagctaggtagaggggagtgcaagagggcaaatgaaaaccagaagtagggttgggcgcaatgcctcacgcctgtaatcccagcactttgggaggctgatgtgggcggattacctgaggtcaggagtttgagaccagcctggccaacatggtgaaacctcgtctctactaaaaatacaaaaatcagctgggtgtggtggcacatgcctgtaatctcagctattcaggaggctgaggcaggagaattgcttgagcctgggagacagaggttgcagtgagcagagatcgcgccactgcactccagcctggccgacagagcgagactctgtctcaaaaaaaaaaaaaaaaaaaaaaaaaaagaaaagaaaagaaaaagaaaaagaaaaggaaaaagaaaaccagaagtaggagcagcctgaagaaatgacagggagttgatttcccactgggagccctctcaaagcccacacacccgcctgcctggggtaacagtatctcctcggacatcctgcaccctcccatgctcccccctccctacagtagtgaaagacctaggcaggatgaccccagctcctctgtgagaatttcacaccctagtgtgaagtcatagccttgtaactttccctttaagaactgtcagagctggggaggctggccaagctcaggctggaggtggggacagagggaagaaagaaaaaaaaaaaagagagagaggcaggaaaagttttttcagaggaaaatgcagggtttgtccttcaccctgacgtcagatcttgctttaataaaaccccccaagggctgcggaagaggcatatctggtgctcctgatgggccggccagtctgggcccagctcccccgagaggtggtcggatcctctgggctgctcggtcgatgcctgtgccactgacgtccaggcatgaggtggttcctgccctggacgctggcagcagtgacagcagcagccgccagcaccgtcctggccacggtgagtcctgcctggaggggctcagagggagacccagctcccttctctactgggt

SEQ ID NO: 41137 - DNA, 2300 bp, Homo sapien
aaagaattttcagagcttcagaggagtgcaacgagcacaggcttcgaggacaccagcacaggggggagcaattcctgtgtgacactgtcgtcctcatgccgttgcaggttgggtgtatgtttacacagggttttcccatccttgattaaattaggtccttgcaatagtcctcagaggtgggaagagcaagcattttatcccagtgtcacagaagaggaaactgaggccaaaagttgagagagattgcccatgattactggagctaaaattgggcccaagtgttctcattcccaagcgtgtattcttggttctctccaccatctcgaacacaggcgtccctgttccctgcagccctgacctgcttctcttgtctctttcttccactgtcacacaaattccagagggcaatttgagcatagccgctcttttaaatgtcatttggctctttgtggaatcctggcaggagttagtggagagcagggaggggggtcagcccagcctctaccagtgccctctcactgcctcaggagaataggacccagggcactggatagaacagttgggattaactgaagaacagatacgccttgcacgtatgcccttgatatttgagcattcacctccaagtttacattaaatgaactgagagaactggtagaactggatgtggtctcagcattccatacgcatttcacttaaagtagcccagttagttgttaattaattggtttgtttacccatccaacgaaccatccaaccatcatccattcattcttcttcatatcctttcttccttttatttgtccttcttttgttcatatttctctttttttcttccttttgtccatcaattctttttttaatccatctttccttccttccttccttctcttcctttctttcttttttccttccttctttccatccatccttttctttccacccatccatctatccatcatcccttctttcagccagcctgctattgaggctgacagtgatttgcctcaagaacaagtgttttaggtttggagagccctgggttaatgtacaggacccaccacttacttgttgtgggaccctgagtggatttacctgtccaaatctgttcagctatgaaatgtatctaaggtagcactgacctcgtgaggggttgtcaggagtaaatgaatgaacgcagcaaagccccttgcattgggagtggctcatgatgccgatgcagttatgttccacttgctgggttagacatgtccctttgtggatggtaatctcctcagaaacacacagaaatagctgtgatactctgccctgtattacaggtgaggaaactggctcagacaggtcatgtaacttgtccaagttccacagctgtggggtgaatttcccatcattgtcccatactcttacttttgtgttttgtcctgtcaacacgtgatggcttttgtcttgagccaaactctcaaatgaaggtgaccacaggcacagccccccatggcctcgggtgatctggctccccagcaactgactgcattttctctccttgtctctcgcagccggccaagctcgctgaggccttcaagtacttcgtgcagggcatgggatacagtgagtatggcattccccgtgtgcagtgggtcggggcatgtgtcggaattggaagtgctctgtcctgagccaggtttggatgagcaattctgtgtccccctggccagcttcagctttctgggaggaaacagttaggtgtgtggagggcatgtggcagcctggaggatctagcctctcatttatcagtgaggctcatttttcctcctttgttgaatagaagttgtttcacaccagggattttggggggtttagatgaggactgtccctttaagcaccaagacaatgaccaacagtgaaacaataacatttttaaaaattttgatcacaagttttaagagaccactagctacagtgatgatgaagatggtgtcgatgatgatgaaagattactaacacattattttatctcactgaaccatcacagtactcctttgacatattcttagcccatcttatcagtgatgaagctgatgcttcggggttgtaagcagggagcagagggcggatctgtggaaattctttgaagactgtgaagctctgtggaagtggctaacaaagttgcttacattcaaggtggagcatgccatagtcaagtcatgagctttgggaagtggaggatacattggaagcatcattcaggaactcactcgttcttattttgcagttatagtttgttagacacatacagccttttt

SEQ ID NO: 41138 - DNA, 2300 bp, Homo sapien
cagtgggggttcgtgtttgttatttcttagaaactctcagacgttttctgcaacattgagttaggcttgaaaaaggcaaggcacacgatcagaaactatagaattaatgatttaatctatctgtttatgaacatatattgggtgctgactggtgatctgaggctgcaaagatgagggatccttctctgggactgcaggaatcaataggctgctggtctgggggctttggggatagagggaccagggatggcttggcaagggccctccataggctggggccaggacattcctccaagaggggctctctgcttgtcacaataagaagagacgtgtcccacagccggggaaggtcaggactttgtccagcaagttcatctgagcacatggtgagccagctcactcgcagctggatttgagtgtctgtagcaacctccgccagtcctttgccagttatgactgattgcacaatgcaaaccactggctgtttgtggcggcctcgtccggagatgcagcccaagagtgggaacctttcagaggggcctctcagccggggtgcacccctgcaggggcagatgaccaggcgggacctgggtggagatgaggcggctccctcgcactgggggaaggacaaagaggtggcatctgtaggtcaccgtgccctcaacttcccccatagaagtagaatgcctttgaaaggcatgtagggggtgtccgatacttattgagtgggaggctgttttcctgtattgggctctttacatagattttctttcaagattccctcaaaaggaaattgcaagattagaagctgctgggcgtcaagcttgcataatgccgtactttgagggcggttgtcacaagtatcacaaaatgggtggcttaaagcaacagatatttattcccttttagttctggaagctaaaagtccgaaatcaaggtgtgggcagggccgtgctccctctgaaggtgctaggggagaatgctgcctgcctcttccagcttctggtggctgctggccacacttggttcaccttagctagtagacacatcactccagtctctgcctccatcctcactcagcactctcccgattgtatctctgcgtctatgtccaaatttccttcttcttttaataacatcagccgttagctttagggcccgctctaatccaatatgacctcatcttaacttgattttacctgcaaagaccctatttccaagtatagccacagtgataggtactggggttaggacttcagtatgtctattttggggacacaattcaaccacaacctacagcaaagggtaggtggcctgactgaggtggggtggccgatttgatggtagatccagaaacagaactcacttaggcctgattctggagacttccacagcgtcagtctaatgtgctgagtgccccgcctggaggaaaaattcgggcatcctgctccctgcgtgctggttgagctgagggctgccccaggtcagtgtcgctttgtggctagtgttgggggtccacacttgaggcgccctgggctgtaggatgcccacagcctcaccactcccatgaactcctccagccccgtttcaccccaggccaccctccccgcagcctccccctgctcccttgccgtcagcgctgcccatttccaggctggctgcacagtctcacagcctgcaatggcctcttgcggttcggtgatttcacagggactttgaacgtccaccatttaggaagggtactggtcagctgaatccggcctgaagacccaaattcaaccacttccttttgagggaaactttcaagggaatatatgaagagggtcttgtttatcaaaccctttcgggtcagagagatcctggcctggaaccttgcgagtccctcaagctcttcctggcccagtttctgcctgtaaaatgggacagctgtaccttccatggttcttggggaatggagtgaaattatctgtagggcctagcatagtgcctggcacgtagcaagctgcaagtgatggttgccacggagacaccagcagccttgcctggtggggctggattgttccctacccacggtccaccctgttcctcctttgtaaggcaggacaaggcagggcagggcagcgggcggatgggcatcctttcggaaaaaattcatagagcgcagagggccttggctgtggtgtttggcactaacgagcttccctctctcctagatggcggactgtggcggcctcccgcagatctcccaggtgagtgccatgttggcttttgcattatacagctgtcgcttccccctgggt

SEQ ID NO: 41139 - DNA, 2300 bp, Homo sapien
ataaggaggacctgaacatggcctttgcctaaggcgtggccctctcaaccagcactaggtgcttatctggagctcagctaggggaggagacagctcagggccattggtgtcagccagagactctgtaatcttccagggagctcgctcaacctgctgagctcgctctgccacgctcgcagaacaggagatagaaatgagcctcatagtgtttatctctgctcaaatgttaataaagtgacttcttgaaattaacatttgtaacagagcttagtatctgcctccttttacaatcctgccctcatctcagtggtaacatcctcactgtggatgtgactgaagaaaccgaaacctggcagtgcggttcacttagtaaacactttctgagaactggagcgagtcaggcattcggctgggcgctggagacacagaggaaaccagcacagcccgcagactccacactgttaacttgcccgtgtagatagcaccgtaattaactgacccctctccaaatcccactgtgaaggtcctggaattactgtcatttcctgttgaggaagcaaaggcgcaaagagatcctgtgttctccccaaggccacacagctagaaagtggcagagcatgatttggatcctgcttgtctaactccaggctgtgagctgggaaagagcttctcatgttgggagctgcaagatagcagagagggtgggtggctgcgtgcaggaaaggtggtcggcactgggctggacccacactgggcctcacacgagtgcagtgggaaaccaccacagggtttgagacagggaatggaaagatgaggcctgagttttaaagagatcatttgggtgctttatagaggactcagagttggtgaggctgggacttaaactaagaggctgcgagagcatttgggaggtggcccctctgtcaggtgggggctctgactagggggacagggaaggcggggaccctctatggtggagaatctgacttctactcctggaaaaaaaagccccacaaatatttgtgacaaaatgagggggctctgcttgaaatgcatgtgttgtgctgtccctctaaccaggtctgtggacaccaagagggtgtggagtcctgaaagccacagggcctctctcaagttggggatgtgggtagcttaccagaatggccactggcaggacctcctgggcttggctggatgggagtgggagatttctccaggggaggggtcctcatgctaatgatgcatttgtttcctgcagccggcgcgacctggagattgagcgaccaatgccgggaacccacacagtcaccctgcagtgagtggcttttctctcccccagcacttgcagtcggggctgcccactataaaggtggccttgctggcagggccttctttctgagtgtggcaggacattgtgtcagtgagacctggatatattccacccagagactgagcattacccagcctgacttggacttctccctgtgccggtggcatccgtttctagggtgtccccatgacctaggcctttgatcttggagaaggatggttgattgtacttgggacagcatttattaagcacctactacatcaataactgtgtgaggctttgctccatgaagcctagggatggatagcacaggacccagccttaaagtgctccatacacctaggaggaaaagacagtcatggacagaactaactgggtttccaccagtaatgatggtgtctttttgtggctgagtgcaccgcgttgtgtgacacttgggaacctggcacgtcattgcctttgtccttcatgctgttcttgtttcggtcttgattgccagctaagtcctgcttaaccatccttgaggagaagatgctttaaaacaaaagcactgagtcacagaaattccctggctgaaattcatactaagttgtgaatgactagtaaccaatgttatcctaagatcaaaggagaatgaagtaaaagagcaaagggtgttggggaaaccaaaatgacattgtttgtagaatgcaggccccagcctggcaggcctgggagtgggacaatctttaaaggaaccttgtgctaattctctgctctatccctgaccccaggtgccctgctctgttggtggttggggacagctcgcctgcagtggatgccgtggtatgtagaaatcacagctgatttctgtgtttaattcaacaggcaaagtctggttgactttgttgaagtggccctgcctgcccctcctctcctctgccccatcagggcaggtgatgttttttgaaatgccatattggcctttggg

SEQ ID NO: 41140 - DNA, 2300 bp, Homo sapien
ctgtctctgtttcactggaggagggatgtcagacatagcgttgagcatctgatctgattataccccaagttatttggagactggttggtccggccatggtgtctgagggtacccccagatcgctatagttggttttgatctgaaatcccagcgtgattcctgactattttttccagagtttgctcttagtagccagttgacctccttgctgcctaaatgatcctggactgtttgatgcagctcaagcttgacaccggctttctttgacccccaactccaacttctcatctggttgccactggtcatatcagacccttgtgtgaaacctacagtgtctgccctcgtacaaatgagaaacagagcaaacaagttgtttgtcgcaaataacattcaaaaagcacccagagacggggaggctgaggccgacttccccaaggctctggttggccgtggtgggagttgcaattgcccttcttttcagtaacttcctgtggcatgagttgattttgcttttcaagcatgaaaaacttcttttcagctcttcccattggaaaacaattactaacatttgcctccaatttttactgttagtagaggtgagaacacaacctccattaagtcctacaacctagtgaagtaggcaacattctctctcttcccttttttttttttttttttttaagagatctgaggctcagagaggttgaaagatttgcctacgaaagggacagtgatgaagctaagctctagatccaggatgtctgacttcaaattgaaactcccaaagtaatgagtttggaagggtggggtgtggcctttccaggatgggggtcttttctgctcccagcggatagtgaaacccctgtctgcacctggttgggcgtgttgctttcccaaaggttttttttttaggtccgtcgctgtcttgtggattaggcattattatctttactttgtctccaaataacctggagaatggagagagtagtgaccagctcagggccacagtgcgatgaggaccatcttctcacctctctaaatgcaggaagaaatgcagagtaacgtggaagtggtccacacctaccgccagcacattgtgaatgacatgaaccccggcaacctgcacctgttcatcaatgcctacaacaggtattgggatgtagttcagccacatcattgctatttatgaggtgtcttctgtagatccgaaatgtgggacagatgagagggagagtataaaatgagcggaagaggcaggctctgagtttgagcaaatagattaataggacaggtgtccccaggaaggacacctggcctgtaagctggttcctggcattcagctcgccttgcagggatctgaacaaacactccagaccactgggggtgcagacgtgagagggacgcagtcgcacactcagagggttgagagtaaatatgtgtgcccgctgctgaccttcacgaaaggccaaatgtaagaagagctaagtgagagagcagcaaagcactcctggaggccggggataatccaggcaggcttctgggagtttgtcattccaaggataaggaggacctgaacatggcctttgcctaaggcgtggccctctcaaccagcactaggtgcttatctggagctcagctaggggaggagacagctcagggccattggtgtcagccagagactctgtaatcttccagggagctcgctcaacctgctgagctcgctctgccacgctcgcagaacaggagatagaaatgagcctcatagtgtttatctctgctcaaatgttaataaagtgacttcttgaaattaacatttgtaacagagcttagtatctgcctccttttacaatcctgccctcatctcagtggtaacatcctcactgtggatgtgactgaagaaaccgaaacctggcagtgcggttcacttagtaaacactttctgagaactggagcgagtcaggcattcggctgggcgctggagacacagaggaaaccagcacagcccgcagactccacactgttaacttgcccgtgtagatagcaccgtaattaactgacccctctccaaatcccactgtgaaggtcctggaattactgtcatttcctgttgaggaagcaaaggcgcaaagagatcctgtgttctccccaaggccacacagctagaaagtggcagagcatgatttggatcctgcttgtctaactccaggctgtgagctgggaaagagcttctcatgttgggagctgcaagatagcagagagggtgggtggctgcgtgcaggaaaggtggtcggcactgggct

SEQ ID NO: 41141 - DNA, 2300 bp, Homo sapien
ataacattttaagatgaaggaagacattggaaaagcatcaaaaacccaaaagggaaaaagaaatgacccgtattctccacagttgtgtgtgtgtgtgtgtgtggtgcatgggtactcgtatatatatatactcacagccttttctcttcctccactcaaggatgatactggacacattcctttgtcatgggctttgtccgcttagccatctagtgaggacgctcctcactcactgagtactctgctatgacactgctttgtaacagctgtacaggtttttgtagtcagggcactcctgggtcataactgattctaaactagaatcagacacgggaagttttcatgacagttgtcattgttatttctctgggctcaggtcaagagccactgttcctttgtatcctcaccgagcaattgtgtaagaatgcaacaatactcattttgtacatccattggtattttgactacctattatttgctgggctttgctggaggttgggaatactgacatgattctacaacatccatcttacaaaaaaaagaaaggaatgctgacatgaatacaaaatggtctggccatataggctctcagcaaattaaaaatggtctcaactgtaccccaggtgtacatatctatatctgtatgtatctgcatcacataatgacattttggtcaatgacagactgcacatttgacagtggttccataagattataatggttcatttttactgtaccatttttatgtttagatttgcttagatacatcaatacttagcattgtgttgcaattccctgcagtattgggtagcgtcatatgctgtacaggtttgtacagcaaacctaggagcaaagggctgttctatacagccttggtgagttgtagactatactgtctaggtgtgtgtaagtatactctgagatcttcacacaatgacaaaatctcctaatgatgaattttctcagaaagtatccctgttattcagcgatgcataactctgtctctctctctgtgtgtgtgtgtgtgtgtgtgtgtgtgtgtgtgtatgcatgtgtttatcctggaagtaagtaatacagttgttactgccacaactagagagcatttgtgctgtgcgccttgtttgattgatgaggtcgatggtgtgttacacccatttgatagctggagaagctgagcctccgtgggttgaagtgacttgcccaaggcaggcctgcaaagcagcgggcttcctacttctcctgcacttcctctttctccttcccactctctctaggacccgataccgtgtctgctgtgctggaacctcagttttgcatggggtggggccggggagcagcagcctgctctgctgcccacactgcctttttctgggtacttctctcaagctttggtttgccttggaaagttcctagtgtttcagattgctgggatgtctgtctcactttgtgtcttgaattgcagctaaacaaccctgagatggtggagggccttgtccttatcaacgtgaacccttgtgcggaaggctggatggactgggccgcctccaaggtgaggtgggggcctgtcaggccggcgggatccctgcaagaagagggacaggtgcacacagcctctgcctgggggatccctggagctacgagctctctctttacccactcctccactaccctctactgcccactccagttccctctgctttacttagaacagtacacatgacctcagccgtttgccattcagaagacttaaataccaccaagctgtctaagccagggaaagcactgggacacaggtccctgaggcagcttggagaagcattgcttggattaatgagtattagctgggtacataacttgtgccaggctttggtcaagatgctgagcatcttgaagaacaagacttcttgagatgaacaagacaaaagcctctaggaatgaatcttaggaatccattcacatattattaaagaaaaataaatatgtatttagtacggactgtgccacagaattttacgataataattagctaacgtagattgagagtttaccatgtgctagtttcattctacgttgctgtgtgtgcatgatctcagttaatcttcatagtaactctaggaggtgagaatttttatcaccgtttcagaggtaaggactcggtgtggctaaggggattgtccagggtcacataaagctaggcagtagaacggggactggatgcagcttgctttgactttgtggttcgtggacctgaccacccgtgcccctggggctcctgtccagggtgggagacaggcagg

SEQ ID NO: 41142 - DNA, 2300 bp, Homo sapien
gaatggtgcctgggcatagtaggtccttaatatagttagggaatgaatgagttcatctcaaccacgctgtatggatggagaaactgcgtcttggggctgtaccatgctatgcacctgtagaaaatgtttttgccttttcagtcctttcccagtggcggagtacaggacccagctcataagagcagctcaattctgtcatttgtggaatgacagaataaataagtttcagggcctagggaggcaaggctcctgccttagcctcccaagtagctggaactacagctgcatgccactaagcccacctgattttttattttcttgtagagatgatgtctcattatgttgctcagacttttctggaactcctgggctcaagcaatcctcccacctctgcctctgaagtagctgggactacaggtacttgccaccaggcctggctagctttcatcttttttgtagagatgggacatcactatgttgtgaaggctggtctcaaactcctggactcaagagaggcttctgcattggcctcccaaagtgctgggattacaggtgtaagccactctacctggacacaacattttatttgaaataagaaaaattttccctcactgggaatgctgcagttgaactagttcaaatccataaagaatggaagactgcccagtggtcattcattcacttattaattctagatgttaaattttctagggtgggggaatgtgctcctacattcaaggcattcttgaatgtagccaaactttgtagtttagccaaacttcatagctaatagccaaactttgtagtttagccaaactcttctagcagcaaaacccatgacactggaactctgttcttcacactggtcatttgtaatagaataacagagctttagcactagataggttctgaaagatcattgaatctaatcctctccctttgccagtgagaattctgaagcccagatttgttgatttgtgatcgatagtgtcaaagacaggcctgaaacacagatgtcctgggtcctagaggtgctgtttgcccctctccatatttcttttgttccagaaaacccttctccaaaactggccctaataatcagaggggaaagccatggcccctgccttggggacagcatgggttggcacagaaaagaggtttacaattcagcaggaagtgttgtgcgtgcgcgcgtgtgtgtctgtggaggcgcagggagggtcacctgagcttgccctgggtctggtcctgggctcagtggcaaattcaacgctgggcaggtggcctgaggacaatgacggtgccagctgtgagtcagacttcctttattcataaaatcatgttcctccatgcagtgcttctcaacctggctgcacgtcaggagccacctgggtagctttgtaaaaaccccaatgcccagttggtttgcaccccctgagattctgattaaactgttctggagtccatctctctctttttattatctatctatttatttattttttaatttggcggctcctctgggacttctcatatgcagtaggggttgagaattgctggtttctttggccagatgggaacatgcaggccaatagttacgcacaaacagagcagcagagcaggacggtgctaaggttggaaagggtgagtcatgaaagttcaggaaatcagaataggaaggggtgagaatcctctcatctgggcttgtggggcaggagagaagagcccagtgggcaaggtccagtgagtgtgcttagaactgggaagatgaggggaagggtaagcgctgggcggcggtgggcaagatggacgagattaaacgggagcgaggatttcagcgagagctttggcgacacggaaggctgagaatcggagggagcctgtcgggcgaaagcgaaggcggctgctgggcaggcagccgaatccggctggagagccgagctggtgagacctacaggaagtgaagggagtcgctcagggcgtggcgcaacgagactcttagaagaaactctgaggcagagatggggggcctccgcccatacggagacacaaggaagtccacatgcacacgcacgagcgcgcacatgaacacgcacaagcacacaaacgcctcctccgggcagggcacacgcgcccgctgcacaggccgaggccctggactcggaggggactgcagagccgacccacaacccgggccccgatgcccctcccggccgcgcccctacgactgcttgcgcaacaggcggcggctccagtgggcgcccgccgcgcgctgccggagcccagcccagcccggcgcg

SEQ ID NO: 41143 - DNA, 2300 bp, Homo sapien
atgtccatgttgcatttcctgagaaagccacatgtggcatggtgctgtccccgtcccctctttgtccccacccctccaatctatcttccacgctgcagcccagatagcacgtcctctccctggaagcccctccatgcaattccttctggtcatcttgtactcattttccaagacccaactcacatgccacctcctctgaagagcttcctctgacctctcagggcatagctcctccctcctctgtgctgcgggagccctgaatttagccccatttccaacaaggaccactcagtcagtgactccaagaagctataagctccaaggctgcttccccctgcagctgcccagctggcatctgatcaagctctgcctgaacttcagtacagccagcagggtgctgggctcagaataaatgcacagggtttgtcatgtatgtgaaaggcctggtctagtggccctgagggcgcctggaccagatgaatgttggccacagagaagaaagggatcagccctgccctctgcctcactgcaatcatgattcttggacccattttccagatgaggaaagtgaggctcaaagaagtgacttcacatgcccagggcaccacggagtggcagagctgggatttggggcagtttgcttggccccaaagccctgctctccttccactctcttccattccacgccctccttcctattccttccctctgtagctcctcaatcctgggagaataggttgcacttgctgcagaggtaagacccgggcccctgagaccacccagatgcagtaatctctcagggtgcttctggaattagacttgagttttacttaacttgcatttgcttcaccaagactctgagagttccaggaacgtagagaagggtttttaatgaagggttagtcagagtccttggaaatgctgtttatggtcctgtgggattccaggaacgcctacaggcttcctttctcagaggtgccaccagcagccctgctgtctggttctcatctttgctttgctcccacaggtggacttgtacggcttcggggcagacagcaaagggaactggcaccactactgggagaacaacccatccgcgggggcttttcgcaagacgggggtgcacgatgcagactttgagtctaacgtgacggccaccttggcctccatcaataaaatccggatcttcaaggggagatgacgcagtgaagggctgaggatggacgcactgtcacacctctgcatttccagccccagcatcttgctggagccgttccatcccggagcttggaggggcagcctcaggtgtgtgcctgggcaccgctcacagcctcttgcacccagccgttggcagcatctactcagcaaggtcactaagctctgccagcgtggcagagcatgtcttggaacctgtcttgagtggggacaacgtccccccactgctgccctagagctggggagacgctgggaaaggttcaacctccacacactaaaatcattttggctcctggggcaagcttggggaatgaatgtggaagatgcctatattctgagagacaggacagtttcccaggaagatgggcagagacttgagtggcgattacctccagcacagagacgtgccaggcggtgttggcgctcggggcgagatgctgcccttctttgcacgaagcctggcctcttgcttggcgtgataaccctgtcatcttcccaaagctcatttatgagccaccagaggctcctaccccaaagattttcacagaaacttgaggccaggtgccgtggctcacacctgtaatctgaacactttgggaggccgaggcgggaggatcacttgagcccaggagttcaagaccagcctgggcaacatagtgagactcctgtctctacaaaaataaaagatttaaaaaaattagccaggcacggtggcacacacttgtagccccagctactagggaggctgaggagggaggatctcttgtgcctaggagttcgaggctgcagtgggctgtgatcacaccactgcactccagcctgggcaacagagtgagaccctgtctctgaaaaaaaaaaaaaaagaaaagaaaaaaaaccccaaacttggcaccgtgtttctgactcctgcagatgcctcttcccaagcagttgttcctttgagtagtcagtctcatggttctaatcgtggcgagagcggatctgaccacttccatgtgcctttgtatttgggaaagaaaagcatgcattggctgaaatgaaacaaaagcccttacttgggaaaagggacccccaccagcggccct

SEQ ID NO: 41144 - DNA, 2300 bp, Homo sapien
cgccctggcgactattggaaaacccggctcccctctcaccccgttttcctcgttggcgagtcggcctcgcctcctcctcccgtctcttcctctcaccacacacacccagccgcagagcgggggtgggcgctcgctgtctccctggagaaccagctcgtcgcaaacttgcggggcttggggacccgcgagggggagaagtcgggagaggccaggggtgcccggaaacaatcacgagaaagccgggcgaatgcctgatgcagggacgcggcgagccagtcactgccctcagggtcacggctgactccctctgcgggactcgcccagcccgcgagacgcagtgacctgcccaacccccacccccttgcgcgcttctgggtgcgcacgtgtcccctcgcccaacacaccaccgagccccgcgcatggtacggccgccgaggaccctagcgtaggagggaggagcgagtcagggctccagctgacgagcagagccagacgatccccacacgcttcctgggagacccggctgcaaggccaggctaatgcgcgctccgacgtctctgtgccaagccggggcgcaagctcaacccccatctcaagttcagccgcgcttcctcccgcaaggtcacgcttaaacactcgcgcagagaaaggaggagcggaaagttgcgccaccgtcccgattccaaactaactgtaccctcaccagagcgcctcgccccagggtcaccgctgtccgtccccgtgcgctcccagaaggggtggccctgcccccacgcaggtcacacacacgagagacacaggcaagttgctaacttttgtcagattatttcttgggagctgcgacgcctcacggggttggggcggattcagagtttcgagttgccactaacacgactccggccgtgctctccttggcccacccgcgtcccccactgtccgccacgccgcgttcagctctcttgtcccgggtgtcaacttcacccccagatccggagcagcgcgctctgacggcgtccccggggccgatagccacctcccggatctgcgcctgcttgcagcggattgggggactcgatccggatactgtcccacggccgctcgtccagaacactggcggcctccgcggtgtcccagcctgtgaccccaaatccgctcgagagcgcctgagcccggccacccagcgaggtctcctcccacgggcggccccagcggaggagatcccagcccggcgccgggtgcaatgtcactggggctgctttcgggaaccgctgcccgggacttggcgtaggttccccacagagctccaggcagctcctccagtgtcggccgaagacccctaagcccgaacctccaccccgaccttcttcctctcccaaagccctgggtggtcgccgctgccaaggaaggggtctcccttcgaatgtcttccactagaatcccggggtcttcagtcccagctccactgtcacaccctcctagtcccctccccaccccttcagttcccgggtccagacaatcaaccttccactccgagaatccacaggaaactgcccgagccccaactcaggcggacgcagcccccgcgcaccccgagcagggttcgcctccgcgcgcgcactcaccacggctggagacacgctggagtttccgggatttgggcatgaaggggttcggaggagaatacaggggtgtgggtgtcccggacacttgcccccttcccagctcacatcgcctcttccttctctctccgctcttcttcctcctcctcctccctccggtctagggctctttgtctttgcaaagtgtcgaaactgtctggcatagtgggctccgccggcggaggctggagccgaggaagcgaggaggcgggatgagggtgggagagggctcgggaacaccttcccccgggtgtaacgggagtgaaaggcggggcgaccgaggaggggccgccttccctggccggccggggccgggtgccagggcgcgccagagcccagccaccgcctcccctgcgcgcggccctccccttcctccgcccagtgcccgcccctcccgactctgcgcctccgttcggccccgcccaccccaacttggctcggctttcccttggctccgggcttcctgcaagccgaatttagctctgccaagccacgtggaccgcagcgggctcggcagaggccgagcctgggagacgccggaggcggcggctgcggcgcggggacctgatcggcgccccgagaggagctccccgctctctggacgcggccctcaagctggcggggctaaggaagagcgcccgg

SEQ ID NO: 41145 - DNA, 2300 bp, Homo sapien
caaagtgcaacagctggatgacctggggctccttacttgccaaatctgatcctctttccacagaatctactaggatatagtagcatagtcttatatgagtatagcattttctatttttcgaatatgttcccatacattatttgatccatacaataaacaacacttttgttatttcatccaaaaactctttattggcccagacgatattcccagccaaagctaaaagtctggtgcatgttagaagctcttctttgctggaagacgctgctggtggaggggacagtagccgatgtaagcagaactctctgcccccctcctcccatgcacacaagcaatctggagatgcagtgaacaccttgacctgagtttcagaaagaggaaagcccacaggatgtgtccaggcagacaaaagggctcaccccttctctagaattctatcaaaaaccaagggcgtcaggcaagaggtctcagagcaggtcccgaagtacctaaaaggctattcatcttttccttccctttctagtagttatttttctcattctctctcctcccccttttaaaagctggtttttcttctacttttctcatctctgaatatttctccttttctctcccaagtccctgaagtcttccccaacaccctagcccccatcttctagcacaggtcatcttcctgctgtgggcagggacctgacactggagaaacccaccatctacacagctgacttactacatgtcaaagacagttctaaaggttctatgtgtacgaattcactaactcatcacaacagctttatcagacagacacttcttaggtcggttctcacagatgaggacaccgaggcacagagtcacctaggctgggaggttcagtcactagcccaagctcacacatccgttgagtggcagtgcaggatttgaaccaagaagtccggccatgcgggccctggcctgaatccctgtactacagcagccgtctgatgaaacaaaggctgggggactctccccttccactgcaaaaggttgatctctctccagctggagcaaggggcgctggaaggatgcaatgaccccaaaggcaaactgtgcctctttcctctaacattcctccgaaaagttgcgaaagaggtagtctcagtaaggggttaagaaccgtaaaaccagatttacatgacttgtgtactgcatttagcatcaaagcgctgcactctgcctttcagcaaaagaagtctccaccgcccccgcttccctgtaaaagagggagggctgaataactgcaagcctaatccgcaaaccccaagctccagccgcagcctccgcatctggaaggaaaaagcggcggcaggcgagccagggcaagggctgggccagggccggggccgggaccagggccggccgcagtgcccggctctgtggctctgaacgcggttctggccgcaagagtcgtccagcccacgctcctcccttccccctccctaaatcccacctcgagtcccgcgcccttagaggaagtgggtggctctgcccggtcgccagcaggggatcggccccttctccccaccgtgcccccgactcgagttcttctgggcactgccatcctctcggtgcgtgcccgtcttcctgctgaaacggaccccagtggctcccgggcctcccgggcgctcttccttagccccgccagcttgagggccgcgtccagagagcggggagctcctctcggggcgccgatcaggtccccgcgccgcagccgccgcctccggcgtctcccaggctcggcctctgccgagcccgctgcggtccacgtggcttggcagagctaaattcggcttgcaggaagcccggagccaagggaaagccgagccaagttggggtgggcggggccgaacggaggcgcagagtcgggaggggcgggcactgggcggaggaaggggagggccgcgcgcaggggaggcggtggctgggctctggcgcgccctggcacccggccccggccggccagggaaggcggcccctcctcggtcgccccgcctttcactcccgttacacccgggggaaggtgttcccgagccctctcccaccctcatcccgcctcctcgcttcctcggctccagcctccgccggcggagcccactatgccagacagtttcgacactttgcaaagacaaagagccctagaccggagggaggaggaggaggaagaagagcggagagagaaggaagaggcgatgtgagctgggaagggggcaagtgtccgggacacccacacccctgtattctcctccgaaccccttcatgcccaa

SEQ ID NO: 41146 - DNA, 2300 bp, Homo sapien
ggctatagttaccaaaacagcacggtactggtataaaaataggcatgtttttagactaatggaacagaatagagaatccagaaatcaagtcaaatacttacagccaactggtatttgacaaagcaaacaaaaacataaagtggggaaaggacaccctattcaacaaacggtgcttggataataggcaagccacaggtagaagaatgaagttggatcttcatctctcaccttacacaaaaatcaactcaagatagatgaaagacataaatctaagacctgaaaccataaaaattctagaagataacatcagaaaaactcttgtagacattggcttaggcaaagagttcatgacaaagaaccaaaaagcaaatgcaacaaaaacaaagataaacagatggaacctaattaaactaaaaagcttctgcacggcaaaagaaataatcagcagagtaaacagacaacccatagagtggtagaaaatctttgcaaactatgcattcgacaaagaactaatatccagaatctataagaaactcaaacaaatcagcaagaaaaaaacaaataatttcatcaaaaactgggctaaggacgtgaatagaaaattctcaaaagaagatatgcaaatggccaataaacatatgaaaaaaatgttcaacatcactaattatcagggaaatacaaatcaaaaccccaatgtgataacattttattcctgcaaaaatggccatattaaaaaatcaaaaaataatagatgttggcgtggatatggtgaaaaggaaacacttatactgctggtgggactgtaaactagtacaactactatggacaatagtgtggagattccctaaataactaaaagtagatccatcatttgatctaggaatcccactactggctatctacccagaggaaaagaattcactatatgaaaaagatgcttgcacatgcatgtttatagcaacacaattcacaattgcaaaaatatggagccagcccaaatgcccatcaatcaacatatggataaagaaaatgtgtggtatatacataccatggaatactactcagtcattaaaaggaacaaaataatggcattcacagcaacctggatggagttggagaccattattttaagtgaagtaactcaggaatggaaaatcaaatatcatattttctcacttataagtgggatataagctatgaggatgcaaaggtgtaagaatcatataatgacctctgaaatcttggggggaagattgggaggggaggtgaagaataagagactacacattgggtacaacgtacactgctcaggtgacggatgcaccaaaatctcagaaatcgccactaaagaacttacccgtgtaaccaaacaccccctgttctccgaaaattattgaaataataataacaacaaataaatttaacgtatgttctggaataatcagtgcatgcacattcaaaagataccaaaggttatacaaggagggaaaaaagcaaacatttttttccttctcctttctccagccatcccaatagtccctggaggtaactcttgtccctactttctcaaatagtctttcttcatgtgggctatgtgattaataacatacatgtattcttttgtttgatttttcccataattaaatggcagcacactcaatatgctgttctataagatgcttttttcacttcacaaaacatcttagatgttgtgttgtatctctatccatctatctatttagaaattgccttactctttttaatagttccagagggctctattgtagggatacactgtattctctattgatggacatttacattatttccccttttttttgctagttcagtgatgcagtgaatatccttgtacacatatgagctgctttgcatatgtgctaacatgtttgtaggataaatttcctaggagccaaactgccacatcaaagtcgatgcacattttaaatgttgatagctattgcccaattgctctttacagagcctgtcccagtttacacttccaccagcctcaccttatttaaatcctctgcagagcaattaccactttccaatattgtctgttcattgcttttctcccccagggtggaaaccatttcattgctgctgggctcctggggcctagatcattgtctggtaagctctcaataaataggcttggaataaatgaacagacaattgaaaatggacacagtaaaaagaacaagaagcttggcattcaaatgacatcaggttcaaatcctgggtctgtcataactctttggccttggggcaaattattt

SEQ ID NO: 41147 - DNA, 2300 bp, Homo sapien
gccttccaacagagatggcttctccacaccagtccaaagttgactaagtttagaaaagggaggatattgacatcttgaaaggaaacagaggcccaagaaagaatgaccaatcaaaagtaacataactgaaagctcttcagacacacttagctgtactatttctgctaagcacagcacatcattatgggcaaagcatgccagcccataatgatgggaactatgcctttgtcattaacagatgtatgtcaaggacctatcctaatattcagcacataatcaataattaataaatacatattaagtaaagaaatggactgactctcagttatttttgaagatttatttcaggttttgtctcctccagaaactcttctgcggatctcagaaacaccttccttctcacaaagcttactttgtatgacttgtgtttatgtgcattcctcctctaccagacattgacctctttgagggaaagaaatgtctcatttatgattgcagccatagcatttagcacatttcctgtcacataagagatgaccaataaatacaagaaaaggaaaactagattgtctatctcttcattagacatgctgctccctctggaaccatcaggatcttttgtatgtctataattttatttcctgggcaagaaaggacacaggcacttcatggcatacacaagcacttgagtgacagaagactgcttctgccttctcgggacaatctgatttatctaatcagtgcatgggtctctacaatgttcttgatcactttcagataatggttgaaaggaagaaagaaaaaagtgagatttaaaaagtgttgcatattcctcagagctgttagcagatgaaacaggcagaggtgataggtgtcagtcacctgtcttctcctcctgtatggttttatagaccatacagactttatagacttcaaaaatagagaaaaagagaagaaaactgagcccaataggtattactacttatttattattttaatatccaaagttcacgactcctttttaagctgcgtggagaacagaacataggctggctctcaaatgagggtaaacaaaactgaagctaatcacccctggaaaaggctgatgtgccctttattcctagaggcagacaaagaaatacgaacaattggtaacatacccttggctaggacaaccagagggaggccccaagtggtcagtttactgtgaggagcctggaagtataagcaaagccccaatatctgcctaagggcagagcaagagactaagaaaacaagtgaggctttggggattggaactgaggcctcttgaacaaggccacaaccctccaagaccttccagagaaaaatactctgcttgccagcaaagagaaaaatgagaaagatcgtttctttgtgggagtggagaaaggctcctaaaggcctgattcacttgtgttttgaatttaaattgatcctatcctcaccctacttttagagcctggaggagagaagctgagaaattaagtaaagtcatctggggctgataatacctttgggttcctggcagagacaaatgtcaacccctgtggaggtccgtgtttgcagtccagaccactgaggattcttggtgacaaaggatctcagaagctgagctcacaatcccaaactgcaaaacaggaagatatccatcaccatgactaagtcaggagcaacaacagagctacactccctaaaactacagatttgtcattgttgtatacgtaatataaattattttatttttgagacaaggtcttgctctgtggcccaagctggagttcagtggcacaatcacagctcactgcagccttgatctcccaggcttaagtgatcctcccacctcagcctcttgagtaggtgggactacaggtacacatcaacatatccagctaagtttttaattttttatttagttgtagagatagggtcttgctattttctccaagctgctctcaaactcctggcctcaagtgatccttccacctcaacctcccaaggtgctagaattacagacgtgcccagcccataatataaattgtgtgtttaaaatgttgaagaatggggaggagccaagatggccgaataggaacagctccggtctacagctcccagcgtgagcgacgcagaagacggtgatttctgcatttccatctgaggtaccgggttcatctcactagggagtgccagacagtgggcgcaggccagtgtgtgtgcgcaccgtgcgcgagccgaagcagggcgaggcattgcctcacctgggaagcgcaaggggtcaggga

SEQ ID NO: 41148 - DNA, 2300 bp, Homo sapien
agatgggtggattatggttgatggatggatggatggatggatggatggatggatggatggatggatggttggtagggttttatgaaggcaaggaaaccagcttaggggcttttgctgttgtctaagaaagaaatgaggaggacctaaaccagtgtggaggtattagaaatagaaatagacagacatgagaaatatttaggagatgaaatcaggtgctgaaaaaatgaggtgagtgtaagttagggccataaagattttgaggaaggctactgggtatctgatgtaggtgatcagatggatgataaactgggaaggctggaggtggaagccatttggtgaagaagatgtgtccagcttaggacatttgggacagctaagtggctggtctagcaggcagttggatactcaagtctcagattcagagaagagatcagagtagaagatgctgattttggcatcaaaggtttacaaaagtctgaaggggtcagttagggtcagttatatgcaaggatgcttgtagacttagagtaggagtgtgggctggaacactgtggaacatcagggcctaatgatagctgccctggtgagagggaatgcctcaggggtactcagaatgaatagagaggcccagagaggtggtattgttgcagagtcaaaggaacagaagatttccaaagtgtggactattaatggagtcacatgcagtacagtcatccagtaacatacagaccaaaatctgccattggcttggcatcatagtgggaacaggtttccaggtgagctggcagtgaatagaggggagggggaatatctaagagggaaaggtgcaagagtgctctgggaggagccagcacttctgggaactcagccacagtggctgtgggtgtaatgccctgaggaggtttacaccattagaagctacttgttgaattctttactgctatacgaagtaggccacatttacatttggttacacatgtttgtgttattgcttgttgaggttttatttatgctaatcagaggcaaaatgtagggtacctcatatatctattaatttgttttaacatatcccattattgaatgtttaaatattgctaaaaccttaatctttttttttttttttttgagttggagtcttgctctgtcgcccaggctggggtgcagtagcgctatctcggctcactgcaagctccacctcccgggttcacgccattctcctgcctcagcctcccgagtagctgggactacaggcacccgcgactgcgcctggctaattttttgtgtttttagtagagacagggtttcactgtgttggcctggatggtctcgatctcctgacctcgtgatctgcccatctcggcctcccaaagtgctgggattacaggcatgagccaccgcgcccggcctaaaaccttaatctttttaagaccagtggtttacttttccctagttttctttctagcattctccccaaaatgcctttggcactccaaacagagttaggagttctgcaacgcagatcctgcactttgctggccatcatcctgcagactcacctgactttcagggttatgtctgaggtccttgtgagatggtccagacccttgatattctgggccagcaacctctctggctcagctcttgaatttctgcagacctcacactccaggaaggaagatgcagctgctcctctccaggaaggaagatgcagctgctccgctttcctgagcaccctgtggtccattcccctgcagtctcatctgtgtgtgcccctctcccttgatgcccttctctctgggcagctggacacacccttactctttctttaggagcctgatcgaatgtcattgctcatggggcctccccaggtggagctggctgtgcctctccctccctggggagtgcctctccactcccacctgttgaagactgagcatgctgcattgtgcctgtgcacctcgtcgctgttcccttctgagattctgatcctcacatggcaaggaacacctttgtgtacctggctccatgcctggcacttcattcacagtgggagctgttggcctggcgacgctcatcttgtcctccgcttctttccagggaagcagtttaagtgcacggtgtgtgactacacagcggcccagaagccacagctgctgcggcacatggaacagcatgtctccttcaaggtaagagggctctggagaagaaggcagatgttcagacaaaaaaggcgttgcttttcaaagtgaagatggagagagcattctttcattgtttgttggttttaccttcgctttggg

SEQ ID NO: 41149 - DNA, 2300 bp, Homo sapien
agaaataggcagagctcagctcgtgacttaggtcctgctctgaagtcaccaatcaaacacattggttctcttttcttgggaagaagtaaggatgtgaagaaaggccaggggtcattccctagtggttggccctcacatggaaacttgcagaaaggaaaagagtcacccccaacagttggttgaatgaataggaagtctggcttaaccaagctattgaaaagatggttgcatccagtcttatgcagcagactgaattcattccattaagactagtcctgttaaaatatcacagaatccacctagatcagcttggaacacagctcattattattgtgcgagttgtggatggcacacctgtccttcctcttccttcttccttctcttgcctccctctttccttttcttgaagcccagtccagacagacatctcttcctcaagttttctcagctatcctaatccaggttagaggtctctttccttttttgtggtgtgcatattcctatcaatacataccacgctgtcatgcaaatatttgccaacctgtcctccctcccccaagactgtgagctcctgaaggaccatggcacacacgagccctctgatcctgtttgttgagtgagtgactgcacccatccagcgtctgtccagttttgttcacttttcagcctttagtgtttggttcatgaaaaggatgtagagttcatgaggaacattcaaggtctccagatgtaaccatgctgtcatctgtttctaggctaggtcccactcagctcaaaatcttcacttgtgaatactgcaacaaggtcttcaagttcaagcactcgctgcaggcccacctgaggatccacaccaatgaaaagccatacaagtgcccccagtgcagctatgccagtgccatcaaggccaacctcaatgtgcacctgcgcaagcacactggagagaagttcgcctgcgactattgctcgttcacctgcctgagcaagggccacctcaaggtgcacatcgagcgagtgcacaagaagatcaagcagcactgccgcttctgcaagaagaagtactctgacgtcaagaacctcatcaagcacatccgagacgcgcatgacccacaggacaagaaggtcaaagaggccttggacgagctctgcctgatgacgagggagggcaagcggcagctgctctatgactgccacatctgtgagcgcaagttcaagaacgagctggaccgtgaccgccatatgctggtccacggagacaagtggccttttgcctgtgagctctgtggccatggggccaccaagtaccaggcgctggaactgcatgtcaggaagcaccccttcgtgtacgtctgtgccgtctgccgcaagaagttcgtcagctccatcaggctgcgcacccacatcaaagaggtgcacggggctgcccaggaggccttggtcttcaccagttccatcaaccagagcttctgcctcctggaacctggtggggacatccagcaagaagctctgggggaccagctacagctggtggaagaggagtttgccctccagggcgtgaatgcactcaaggaagaggcctgtcctggggacactcagctggaggagggccggaaggagccggaggcccctggggaaatgcctgccccagctgtgcacctggcctccccgcaggccgaaagcacagccctgccaccctgtgagctggaaaccaccgtggtctcctcctcagacctgcattctcaagaggtggtttcagatgattttttgttgaaaaatgatacctcctccgcagaggctcatgctgctcctgagaagcccccagacatgcagcacagaagctcagtccagacgcaaggtgaagtgatcacactactgctgtccaaggcccagagtgctgggtcagatcaggaaagccatggcgcccagagccccctaggggaagggcagaacatggctgtgctttcagctggtgacccagatcccagcaggtgtctcaggtcaaacccagctgaggcctcagacctcctccctccagtagctggtggtggggacaccatcacacatcagcctgactcttgcaaagctgcccctgagcaccggtcaggcatcaccgctttcatgaaggtcctgaacagtttacagaagaagcaaatgaacaccagcttgtgtgagcggatccggaaggtttatggagacctggagtgtgaatactgtggtaaggaaaggcagcgccggtgcgtggccctgtccacaaccatcatgctgtggtcacctcgcatttgatttgagctcatgtctgtttg

SEQ ID NO: 41150 - DNA, 2300 bp, Homo sapien
acatgacacgaggtgggtgttttgtagcctctctgctaattctgcttctctgatatgaattgctgcttcagtagattgtgcaagtacacgttgttgtgaagaagaataaggagaaaagttttaaagactccaagggaaatggtttcttactctgtaccttgtatttctttcctcccatctcccttgcacacaggctggttctcctgtaaacacaggcttttttctccttgtttaaatctagggagggctcccagggccttctgtcccttgttttatctggtttgccttcctatcattaagtaccttcttcttctttgtgctcccctgcccaccatgccccagggagatagagtgaaggcaggaatctcgctggttgccttagtgcaggactctggtttggatctttcagccaaggctgacccactcaccagtggcgttgcagtttggttgaagctctgttccagcaagggccctcctttcccaggaaatctcttgcttcattctggtgccaggtttccctgaggtcttgggtaccccgtaccaaggcaggcttctttgttcagattccctgtggtcaggctgttgtgtccctgcagactctgccccagactgttctgcccatctctgctcccctttgcccctgtggcctccctctctgatttgtgagcacaagtgacttacttaacgggtcctcatggtaatagcagtagataaagtggctggtgtcctactgtgcagagcaacagctttagagagagcaggaagggacctgagagacattctacagatgcacgtgtacccaagatggtgccagaatctagtactccttcctctaccccaatgttcaggttcaaagagggttgctgaagtgccactcctctgccagacagatgactggcattggggatgtcagccaggctgctggcggctctctgcttggtctcgctcagggacatctcctaagtctcatcgttgaagaccacacccctccaccttcacacaactggatgagatgctctgctccctgccctgctcacccatctttttttttttttatttgagatggagtctcgctctgttgcccaggctggagtgcagtagtgtgatctcagcttactacaagctctgcctcccagttcacgccattctcctgcctcagcctcctgagtagctgggactacaggtgcccgccaccacgcctggttaatgttttttttttttgttttgttttttttttgtatttttagtagagacagagtttcaccatgttagccaggatagtctcgatctcctgacctcgtgatccgcccacctcggcctcccaaagtgctgggattacaggcgtgagccaccgcgcctggcccccgctcacccctcttaattcccaccttcattccggagatgaatgccttaaaaattaacactaattgagaagaaacacaagttgtaaaatgattttaaacttgctctaaagcagctgtgatcatgccattgaaaatcactaggtcgctaggaaactggaaaaatattgttattgtctttagtgctataatttgtggctttagattgtaattattttttctttttcttgccaggacaatttgactctaataattatgactccttgaaataatctgaatagttttgtaactcattaagggcatgacaagctcagcagcctttgagaacgctttgcaaaggagtccctaagcagtttctgagaactggatttcagtggaaatggtgcttaacaaggggcaggatttgtgaacggggggttgacagccgcaacttaaaatcctgtcagcattgctggagaaagatgtacagcgatgctgataaactgatggtcttgaatcagaacattagaaaattgattacccattagtacacagatgcaatgatattagcaccaacgataattgtttgcagctgttaatgtctggaatcactttagacttttcatttttaatgaaacgtgaaacctgaacatatcctcacacttggagggtgattgtgaaccctgcactgccgtctcacgtgattccattgtgccctcttgtttcctctgtagagtttttggtcatgaagaggaagagaggcaggcctaaggggtccacgaagaagtccagcacagaagaggagctggcagaaaacatcgtgagtccgactgaggacagcccgctggctccggaggaagggaacagcctgcctccaagcagcttggagtgtagcaagtgctgtcggaagttctccaacacgcgccagctgcggaagcacatctgcattatcgtgctgaa

SEQ ID NO: 41151 - DNA, 2300 bp, Homo sapien
acacagtggctttgacgattcacctgaccgtctgacgcttctaccagaatgtcccagggaagagggggcatgagcgatttgtgtggggcatggtgtttggaattcttggatgcaaggaacatagatttgatcagggcattctttattattggtcatattattttagttcagaattctttagcaagactactggagtgtctgaatagttggctgtccggcgctgtcaggttcccccgctgcctcttctgggcatgctctctatctcttctgccttcccttgcctccttctccttctgctattatttaggtcattctttttttttttttttgagatggagtctcgctccttcacccaggctggagtgaagtggcgtgatctcagctcactcagctccacctcctgggttcaagcaattcttctgcctcagcctccagagtagctgggactacaggcatctgccaccacgcacagctaattttttttgtatgtttaatagagacggggttttgccatgttggccaggctggtctcgaactcctgacctcaggtaatccacccacctcggcctcccaaagtgctgggattacaggcgtgagccaccgcacctggccccagttgggtcctccttctgcgtgttcctgaccggccctggtggctcccttatcccagggcttttggagtttgctgtgtgtgcagtctgagcaggtaggagggactatgtgacataggggtctgttgctcagcactgagcatgttaaatattgttgtactggctgggtgcggtggctcacgcctgtaatcccagcgctttgggaggccgaggcaggcggatcacttgagcccagggatttaagatcagcctggccaacatggtgaaaccccttctttttcttttttttttttagtttttagtttttagttttttgagatggagtctcgctctgtcgcccaggctggagtgcagtggcgcgatctcggctcactgcaagctccgccttccgggttcacgccattctcctgcctcagcctcctgagtagctgggactacaggcgcccgctaccacgcccggctaattttttgtatttttagtagagacggggtttcgccgtgttagccaggatggtctggatctcctgatttcgtgatccgcccacctcggcctcccaaagtgctgggattataggcgtgagccaccgcgccaggctggtgaaaccccttctctactaaaaatacaaaaaaaggtgggcgcggtggctcacacctgtaatcccagcactttgggaggctgaggcgggcggatcacaaggtcaggagttcaataccagcctggccaagatagtgaaaccctgtctctactaaaaatacaaaaattagctgggcatggtggcgggtgcccgtaatcccaggtactcaggaggctgaggcggataattgcttgaaccagggaggcggaggttgcagtaagccgagatcgtgccactgcactccagcctgggtgacagagcgagaccaacggagtgagactccatctcaaaaccaaaccaaaccaaaaacaaaccaaaacaattagccagatgtggcggtgggcacctgtaatcccagctactctggaggctaaggtgggaggatcgcttgaacctggtgggcggaggttgcagtgagccgaaatggcgccactgcactccagcctgggcgacacagcgagactcgtctccaaaaaaaaaaaaaaattgttggattagtttcctgactgatggcagctcagaacctttaatatgcctgagagagatacgtagagtccaagtttttctagacgctgggcgcttctcgcctgcagcctcctgggactggagcgggctcccagagacctaggagggacccctgctgggtgggggcggctaccagcctcaggccacaccccctcggagtgctggttggtctgtggatggtgtcatgtgctcattctgggccaatcagagcctctgtggcggcaggatgccctgtcccacctgggcagggctgtggctgtattggagagaagcgcgggtgggtggtgccagccagggataactaggatggtagggcttcctgggagagtgcaggagtctgagaagaaagggtgtagatggagaggcggtggcctcacctctgcatgctccgtgggaagcggcggaggcgcccagcatccctcctactctgcccttggtggaggtttacgaggtaattctcccgatgcgagtttccactctgaactttcctgttgattcctgggtggtttcagaggtgtctcggctgttc

SEQ ID NO: 41152 - DNA, 2300 bp, Homo sapien
acaacatttaaacgctgctgtgagaaaggcaaaccggcacaaaaccaatactgtcagcaacccagaacaactctaatttcctgacagaaatcgattcacagcaaaataatgattattgtaaatatttatagttctaaaaggaaacgctcatcaatgcagctttttgagcagttcatttccaaataaagattctgatgggccccacctagccatgtatcttgtggtggaggacgtggtggctgtgaagcgactctgtggctgtcttggaactggctctcttggaggctctcctggaggcctggggggcagtttgggtacattttagatgtggtggggagaggaacactgggcatggagaggcgagatccacacctggctcttcactattttgctgtgtaatctcagaaagccatttgaccactctgaacattccattttctcatctggaaaaggacaataatcatattgcccaacttaaccttccagattgcgaggatgaaatgaagaagggggaggctatatctgtgagcatatatttaacagactggacaactttagggtcttttcatggttccgtatttcccaagaacagggttaaggagcaggcgggcagtctcctgagaaatcagatgagtcatcctgaagctcaatgcccaagggagttttcctcctaaaaaataagtgaccccagaacgaagtgttcattcagtaatatgactatgcaacaggcgctgagaaaacaagatgaaaaggacctataagggctgctcaggaagctcagtctagtgaggatgaacgctgtgcaaacagagaagtgggggatggagctaggccagtgagaccagagctgtgggaacatgaagtgtgaacttcagggctgtccgagaatttcatgttgagcagcaaccaaagagggttattccaggaaaagaagaacaggcaaagactagcatttcaggggaaccatgaacacaaatcagtttcccaaacttcagtctcctgaagtctgcttttacactttttttttttgggggggggggggcatgtctttgcagcatgtacaccattttaagttgactgatttttgaaaatgtaaacgaacaatttaaaaactttatatgactactgtaagtgaaaaacgttatttgtcatgaacagaaaatgaccttagaacatggaccacatcaactcattactcatgaaataaataactgtcaggctcagtttgtttctgaggctaacggggtgaccattgacagaggtaagggagggagataatgacagataggaatggatgctacgtagaaaatatgaagtgtcttggagggttactttagatgggtttcggggggtgagggttaggggctggaagatatcatttgagccgaggactacagtgttggagctaaacaccttaacatcaaaaccaaaaacaaagtcattaaatttccaccagactcagctgcctgccgaaggctgtgccacaagcagagaaatgaatgagcgggtgttggaggcgcgcacatccagtgcagacttgttgtgggacaaaaagagacgagagaggaggaagtcgccttgtcacgtgtgatcgtaggccgctcagtgctctgtagcccctaaaacccagccgggtggcccaaaggaaagcaccccacgcttcgggaaacgccgcagctttgagcgggatgcaggttgggagcaccccgatggacacatcagtaaactgagagcaagaaaagttaattcgctgccccaagttaggtagtgagaggtagagctgggacacgaagcgcacccagaactctccttgcacgcccagctcggcggccccacatgccgcgggtctagggtcgcgctagcagaggcctggcacaaccgccagactcctgaccccgagatccgcgctccggacctcccgagggcccctccctgggcgtggctcaaaacgcggcgcagcggaatccgtgaagtgggataaaaagcacggcctccgactgcgagcatgcgcgttagctcggccctgccgggccgcgctcggcgccgggggagggtcacccgaagcggacgtccgctacgcaggcgtctgcgccccgtggggaggagggcgaagactccatccgccatgttggatgccgcagattcgccataacctcgccggctcttttcttaaaaaaataaaaataaaaagcgaagcgtcagcagggcgccccgccccctcggtcggcacgggagggggcccggaagagcccgaggcttttttttcctccgcggtggggcgttgccatggagacgcgggc

SEQ ID NO: 41153 - DNA, 2300 bp, Homo sapien
ggcagggatctacttgaatatgtttgcagagaaaagcagaagaaagcatggttgcagtaggagtagttaaaacagaaaaacagtatgcttatagaggaaaaattactctaaatttattaaaattcctttaaatttgttactcaatttaaatttttattgtatcttttcaattttgctatagcactaacatgacataaggctctgggtattgggacaaaagaatgcccttgtttggtagttggggtcgggtttgtagtattgcagtgtgctttaacaagcatgggctttgacatcagacatttgttgccatctggactccacaagtgaatttgctacgggatttggaggagggaaaggcactgtttccatacctcagtggttttctcatctgtaaaataagtatgtgattgcatggattgacttacatgatgaatataaagttgttcattagtacagtacctgtcatattaagtactcaataaatgctagttattattaatgctgtgttgtaggtgttcagtaaatagttgccataatgcttaaagcagacataacttgtttttatttttgcaataaagatgatgccaactttttggtttaatggaaatgctttgaatctttgatattgttgtaatatagtggcaaagaattttgaatcccagcttctggagctcatatcttgattctgcgagttacttcgctatgttactttgggggaagttattaatctctctgtgcctcagtttcctcagtcgactaaattgaaattataatagcacctacctgataggattgttgagactaaatgaggtaacaatttaaaaataagctaatacctgataattagttctatatatgtactgattggtctaaacgttatttccattttcatgtctttacttaaaatactgaaaattaattttttatagctttgtttttcagttccatgaaatcagcctgccttttctttttttggtgatacatccacattctgtataggtgaaaagcaaaacaaacaagtataaaacgaaaattatgtaagaagtacacacatcctagcagcttggcaagtgtctgtatgctcttgcctgtgcctaaatccagaattagaattcatgcttggtgctcctgtggaagatgtctaaatgttatgagaaatacatgattaaataaaaatgtgaaatgaaagcatggagacttgttgaaggtgagtgctgtttttctaattatatattttatttgtttaatgaataatttgttaattttctttgtcattacgagagagctgttttattctgtacttaggtgcatagcatactatgttttagtgagctccacatgttaatttgaaacttgccaaatttttacattattttataatttatagtactttgagaaacatattgcaatgcattacaaagcatataatgtaaaggtagttttatgaagtgtttttctcccaaattaagcatatttgggaattgcccatcaatttgtttttgaacctcagtgcataaaatatagaatttttctttcatatgctagatgtgaaaaatactcagcatatgcatgtggtttaggctacaaaatagcctgtaggttaaattcctaattctagtgtttaattcattgccttttttcttcttgtttaatggccatatgtttatatctttatattacatacattcctgattatgtaataaggtctttgatcatgtgggctatcagatttgcctcactttgtctcttagaagaagctatacatgaaactatgttgtacttaagtgaaaatttgagtatttttcttgtttgaattaatgcagtgaaacattctacttacagttagctgtctcccacccttacaggaaggtacatgccttcattttttaaaacactgtatatttattagaattgttacagaattttagtaaatatattctaatcacatattttctgattaatgtgtgcttatcagttttaaatgttatgaaatctggatatatgttaaaatgtctcagttttcccctcttgtttaccatattgccatttggtattaatagataacataatgtaaaattggatgtctttgataattttgggatatgttctgaaattaaacttgaacttttttctgtgaattttgaagatttggtatcttataattatttggtgagcatttggcatgaattatttagcttctcccctgtttatgatttatttctcttgtcatcgatttccaataggaaaatgttatggttctaaatgtctcctgtagacttcagtaattgaaaaatgtcagt

SEQ ID NO: 41154 - DNA, 2300 bp, Homo sapien
tcaggacccaccaaatgttgaatgtgaacagagctgtaaccctgtagcactcccctcctgctcaccaagcaatgggagagggagctgctgggtgccacatgccccagtttgttgggacaggactgaaagaactgttaacatgctgtaatacccccttaggggctttggggtagctggcatccgagtttttcggttgccaccatgttcccttcgtccatatgctggtgccaaaggtgggagcaggtcaagacatgcctggcccatccacaggctggagtgcaggccaaacacagctgctgggccaagtggtggagtacctcttgtggtgagcccagagccaagcatggcactgggcaggggcatcgctggctgcagaggtcaccaactggtgaagcgacacccaaaaaatcctgcatcaatagtacctccttgtaataattaaaataatcaagaatgtagcattattcctggcaaatagactttcagcaaatgctggctgcctccctcctccagtatctgccacctctacaggctggccccttttacaggttagaattttatttgtcaaagcaaagcacaaggtttactgccccaaagtatcttcccttatgatgcttctgaaggtgtggtaaggctgttgaagagttgtaaagaggggtttattgttttatatccaaagtgctttctaatgaatattttatgatttttctcactgtttgataattttgtaggattcaaacaagtgaggaaacttgatttgttttggagaaaaaaagagagagaatcactatgactaataacagagcctatctgttctgggtaccagagatccccggttggtgaccccatccctgactgcagcattaagtcctgagtcatctatcccaatcagctcgtagcagtcttcttaatgtctcctattgtttaagcatggtcatttgcctaaatcgatacaataagactaaattaaaggatatatacttcagtaatttacatgcttcaggtaaagatttctcacccttgctgacatgaacatggagcacaaagcttttaagaccacggattttttagctgctgtcttggcactatgaggggacccagccttaggatgaagccaggtgctgaggacagcagagcacaggaatggaaagaactcacgtctatgataacatctttgaactgataattatactgcacctggatgcctcttacctctggacttaatgttatgtgaggcaatcgatttccttattcttatgaaaaccagtttctgtgaaactgatcagtatcaagcatgaagcatgcttcatgaagcagcatcagacagtagaaaataccagggcagctgcaggtcacagccctgaaatctggccatggggttcatatcctgcttccacttgtgctagctgtgtggccttggggaacatactcaacctctggcggcttcagtttctgcatctgaaaaacaatgataataatagagttcctcacaggataaatgtgcgtaacacacataatgtagtgcctggcccatggtaagtctcaataaaatctgacttgtaattatggttccctctaggtgtgaagatcatctcaggatccacagattgatttgaaagtggattcccagtcctcttcctttctgtcattgactctgtgtctctttattactttgggtttttctcacttttcctttcctgatcttcctcctctcattcctttaactagccataattgggattgatttatagctttatttgttgtattttaaaatatgtaattttacattttctctttttaatttaagaagtcaaagaatggaacattttatatttccttcaataaaaaagaacctttttatttgatttttatatatatccccattaaatttcatctgcttggctttggtccagtgttccaccttgtcagaatcattttccatcttgacactgtcagttattggctttgccatccttcctggctttatttcatctgccttttaaaccttcaccaagttcttgacaaaacctgcaattaaggacggctctatcagttagcaggtgaggtgtatgtgctggaaaactctaaatcaatgctcctcaaactccggtgaccataagaatcacctggagagcttgttaaagcacagatttgtggtcccctcacctgagattctgattcagtgggtctggaggggggactttgcatttctaataagctcccaagtgatgctgcatagggctgccacaaatagtaggggctcagtcaagttagtataataggattttttttcctcttat

SEQ ID NO: 41155 - DNA, 2300 bp, Homo sapien
aacagctgggtgatcccattaacaaccaataatctgggaatgctgctgaattcgtttgaaactgaactagcagtaactccctatgggtccattaacctgcagccaaaattagattatgtagaaataacattaaataaagagccacagtgctcagttaattgagaggcaaacttgtaaattgtaagatcattctctttgaaaggcagactattccatcacctcaagacccttgggggcactcataagtgtccagtttggtgttcattttagagaaaacacattttctgtagaggcactttagaaatctatttgttgtagaaacagtctgaaatgaaaaaaaattacaagctttggagtgaaaccgaggtgagatagatttaaatcttagctctattacacactagctctgtgaccttagagaagtgacttaatttctctgagccccaacagtcttgcctcttaactgagggcaatggtggtaataatatgtatctccaagtcttgtgagggaggcaggcacatctaaacatcattgcaatacaaggaaggaacacattgagggatggtgttatggaagcaacaaggagaacctcacctgaccaagagagccaagaatggtgcctcgaagagatgccagctgggctgaattctagagcatgagcaggtgcaactggattaaggccgggccactagtacttgctttggagacaatctaggttttgatcactaagaacacaaggagatggaggtcaatttactaatcagaactcctcgagttttgattttaccccatgtgactgaagaaagagctttaataatgtgctcacagtgagggacaagcgtgaataactatggctggtttccagactgccttgacttagttttgcacacatttgagtccagaagagactcactaggtctcggcataatgaaaccagggcctcttggtcatcgaatgcccctcagagctctcagtctctctaagcaaactctgtacaaatttttaaataacacttcaaaaaaaagcagcagcagtctttggctgggtgcggtggctcactcctgtaatcccagcactttgggaggccgaggctggcggatcacctgaggtcaggagttcaataccagctggccaacatggtgaaacactgtctctactaaaaatacaaaacttagccaggtgtggtgttgggtgcctgtaatcccagctacttgggaggctgaggctggataattgcttgatcccaggaggtggaggctgcagtgagccaagatcatgccatcacactccagccggggcgacaagatcaaaactccatctcaaaaaaaaaaaaaaaaaaaaaagaagaagaagaagaggaaatgaaccaaactattggtctggaagaaggttgcccagctccatgagaaacaaaattgcagctctctgagctcaggcctctggaactgcgatcacttccatccccacttcaggacagcacctggctcaagacagctgcctgtccttactggtggtcacttcgacagccaagtgctcccagcctcttcagtcataggacttgatttggaaacccatcaccaccctccctgccccgctctggctgtcaggttgtcagggctcctctctcctctctggcatagcccagaactgagtacagcagaccaacaggggagactggcccagaagagcatgaggtatcccatgtttccaatgggatgctatgcccctcttcatggtgtctaactttgtagttcctccaggacttcacttacactctgagtacatagaggatcaaaaggggaagtggcatgttttagtggaaaagacaggttgtggctcagaaaattgatttaacctcgggtaaggcacttgacaattcttggcctcagcttcataattttacttacctgtaaaataagagttgttgtgggaattaaatgacagacggcatgaaaaagcttggcaccttacctaatacatcggatcggctcgagaaatggtagacttctttctgtcttctccttcctttcctgcctcccttcctcccactccttccttcctctcctcctccagccatgtctccctccctccctccctcccttccttctctccccccaagcctccatatttatttccttcctactaaaattttcttccacattccctctcatccagtcctcaatgaatcctgaggacagctatcagtggtcactctcttgggcttgaaatggaacagatcttcttgttccatctctttctgatagcgccagttcctgctgaggacagaacattgtcttct

SEQ ID NO: 41156 - DNA, 2300 bp, Homo sapien
cctggttttgggggtgtggactgggaagctcaggctctaagttaattaacaaagtggcatagtgaggcaggtagcagccaggatgcaggcatccagactcctgcccttctgggtgagggtggtttgggaagtgccctttttgtttctggggctgagaggccagtcatagacctgggattgagaagagcagccacaagcagcctacaagcctgacgctgggcccaggtcagaaacagaggtgcgacagtcacaggtccttcactcagttggccaggccggggcgaagcaccacgaccagcagtgaggagtccacagatgggtgtctgcccagcatccctggagttacagctgaagggaaggcgagggaggctcagaaggcccagaggacagccttgcagccggaaaaaacccaaagcaaagatcagctcagcatttccgataggcagagtgctgttttgggtatttcattatgagttaacatatttattctcatgaacttcttatgaaataagtttggttgtcatctccacttgacggatgaggaccctgaggtgaagaaacttgcccaaggtcacagctagtgagcagcagatccatgattccaaatccaggctgtttaaccccagaggctttgcttttaactgtgccatttttctgcttcttgcaagttgagactgaagagagccatgaagaagactcttactggggactctgaaatgacaccttagccgggggaggagtggagccttgagagtgagggcagttgagtactcgggtctgggacttagagcttccaagatttctaccacctcccactcccctcgggtttgtaaagctgcctccatttgcattgggagtgcgggggggctgcctgggggactgtggcgattgtcctcaggctattggctgagagtggtatgccactgacttattcctccaagagacatttccagtaccctccatccctgccccctgtactacacactggtgaccttccccctcaaaaacaaaactcaaactctgtccctgatgctcatggtctactgaaaacagaattacagctgtctgtgaatgacctctgaccaagctggggggacacagagaagggacttgtgacttgctttgccagggaggtcctgagaggctgtccagggaaggtgacattgaggccgggacttgagctggctgtttgaaggcaggaaaaatggcagggcaaggactggagtccttcgccttcctgggggacgtttattccacatgcctcgggaaatctgaaatggccttggagagcatttgctgggggttgggggtgggcggaaggggacagagagcattgccaccgacaggcggggcgtcccagggcctctccccaggagcggatgagctcagacgcggctcactcagctgtgtccaggcacagccggtttatgacctaagagaatgacaacccaggagcaagtcgggatgacaaagacgcccagaagggcacgcgcttttatgtaaccgacctctgagctggcggatctcaggaggttggcgctctgagctcaggcgcggagaaaggacggcgcccctgccttactctcttataagtacgaggggacagcaacgcgacataacttagagaagtccaggaagctttagagagcagggcggtcccgctgctattcctcagagcgcgactggggcgaactggggcgcccttcccagctccagctcggcccttgtcccctcttcccaggatcactcgctgggtgaccttgggcgagccacttgacttctctgagccccagtttcccagtccgtgcatctgaaaggctgtaatagcgtcgtggggctccccactcggccctcagggccaaaggtgggcgccggacacgcgggaggggcccttggacgcaccccctctcgcaaacgcccggttagtcccggcggactcgcagtggagagcggccccaggaggcggcgggcggcggggcggtgggcgccagtgcgcaggcgcggcgcggcagggcggggcggcgggcgcggggcggggcggggcggagccgggcggggcggggccggcggcaggcgctgggcgctcggcgcggtggctcagagtgcgcggggcggcgcgcggcgtgcaggtcgcagctgtggctcgggtgctggcaggtgctggcgggactggcggggatcgccgtggactgcctcaggggcgccgcagcccgctcggcccgagggcccgcctaaccgcgccgcccgcgcccgctcctcctcggcccgcgcccggagcgcgggggccgccggcgctgggt

SEQ ID NO: 41157 - DNA, 2300 bp, Homo sapien
tgtggacccttgcggtaagtgttacagctcttaaggtggcgcatctggagcttgttccttttgatgctcagatgtgttcagagtttcttccttctggtgggttcgtggtctcgctggctcaggagtgaagctgcagaccttcgcagtgagtgttatagctcttaaggtggcgcgtctggagttgttccttctgatgttcggatgtgttcggagtttcttccttctggtgggttcgtggtctccctggctcaggagtgaagctgtagaccttccccgtgagtgttacagctcttaaggcagcacatctggagttgttcgttcctcccagtgggctcgtggtcttgctggcttcaggagtgaagctgcagaccttcatggtgagtgttacagctcataactctagtttgagggcagtgtggacccaaagagtgagcagtagcaagatttattgcaaagagcgaaagaacaaagcaaccacactgtggaaggggaccccaccgggttgccactgctggctcaggcaacctgtttttattctcttatctggccccacccacatcctgctgattggtagaggcgagtggcctgttttgacagggtgctgattggtgcgtttacaatccctgagctagacacaaaggttctccatttccccaccagattagctagatacagagtgtccacacaaaggttctccaagaccccaccagagtagctagatacagagtgttgattggtgcattcacaaaccctgagctagacacagggtgctgattggtgcatttacaatccctgagctagacacaaaggttttccacttccccaccagattagctagatacagagtgtccacacaaaggttctccaaggccccaccagagtagctagatacagtgttgattggtgcattcacaaaccctgagctagacacagggtgctgattggtgtgtttacaaaccttgagctagatacagagtgccgattggtgtatttacaatccctgagctagacataaaggttctccacctccccaccaggctcaggagcccagctggcttcacccagtggatcccgcacccaccggggctgcagatggagctgcctgccagtcccgcgccgtgcgcctgcactcctcagcccttgggtggttgatgggacttggcgccatggagcagggggcggcgctcgtcaggcaggctccggcggcacaggagcccacggagcgggtgggaggctcaggcatggcgggctgcaggtcccgagccctgccccgcgggaaggcagctaaggccctacgagaaatcgagcgcagcgccggtgggctggcactgctgggggacccagtacaccctcggtagccgctggcccgggtgctaagcccctcattgcccggggccggcagggccggccggctgctccaagtgcggggcccgccaagcccacgcccacccggaactccagctggctcgtaagcgccgcgcgcagccccggttcccgctcgcgcctctccatccacacctccctgcaagctgagggagcgggctccggccttggccagcccagaaaggggcttctacagtgcagcggtgggctgaagggctcctcaagtgccgccaaagtggaagcccaggcagaggaggcgccgagagcgaccgacggctttgaggactgccagcacgctgtcacctctcagtgatacctaactataagaggaaatggttttcagtgaagagccagaattatctcacatattaagtgggctttaactactgccgatgtattatcccactttctcctccaacagccctgcaaaaaatgttatcatgcaaatggggactaagtttcagaactcagatgagccaaatggttacttgtcttgagagataaatatgcccttggaactgaagacggaaaaattttcagaatcctggaagccctggggaaggagtgtgaagaataaaaccaggcaggccttgcttgagagtacatttctttttttttttttgagatggagtctcgctttgtcgcccaggctggagtgcagtggcgcgatctcggctcactgcaagctcgagagtacatttcttgaaacagggctacaattctttctgcctggtatcattaaaaaggaggtgacaatttggcctaagaaaattcacggaatccattttgaaagaaaattatgagtggaaaacacctgagttgaaaagtggggaagtttctcaatctgcttactccaaggaaattcttaaaggaattataaacacttaacctaataagttaatttttaattgtaaaat

SEQ ID NO: 41158 - DNA, 2300 bp, Homo sapien
ctttggcctggagaagtttgttattaccgatcatctgaagcgtacttccgtcaactcctcaaagtcattctccatccaactttgttctgttgctggtgaagagctgtgttcctttggaggagaagaggcactctgatttttagaattttcagcttttctgctctggtttctccccatctttgtggttttatctacctttggtctttgatgatggtgacgtacagatgggttttggtgtggatgtcctttctgtttgttagttttccttctaacagtcaggaccctcagctgcaggtcttttggagtttgctggaggtccactccagatcctgtttgcctgggtatcaccagtggaggctgcagaacagcaaatattacagaacagcaaatgttgctgcctgatccttccactggaagcttcgtctcagaggggcacccagctgtgtgaggtgtcagtcagtgcctactgggaggtgtctcctagttaggctactcgggggtcagggacccacttgaggaggcagtctgtctgttctcagatttcaaactccgtgctgggagaaccactactctcttcaaagctgtcagacagggaagttttagtctgcagaagtttctgctgccttttgttcagctatgccctgccccgagaggtggagtctacagaggcaggcaggcctcctttagctgtggtgggctccacccagtttgagcttcctggccactttgtttacctactcaagcctcagcaatggtggacacccctcccccagcctcgctgctgccttgcagttcgatctcagactgctgtgctagcagtgagctaggcttcatgggtgtaggaccctccaagccaggtgcgggatataatctcctggtgtgccgtttgctaacacagttggaaaagtgcagtattagggtgggagtgtcctgattttccaggtaccatctatcatggcttcccttggctaggaaagggaatgccctgaccccttgcacttcctgggtgaggtgatgccccgccctgctttgtctcacactccgtgggctgcactcactgtccaacaagtcccaatgagatggacccggtacctcacttggaaatgcagaaatcacccgtcttctgcatcgctcacactgggagctgtagactggagctcttcctattctcccatcttcgaaccgagtccacatagctaaattctttattatacagttagacatttggataacttgtaaacacagattcttacactataatataattttctttcttttttttttgtagggcataacttgagtgtttatcctaattttgatgttccagtgacaagtcctacaataatgaatctgaaagacaaggaagataactgtatggtaaatagcaatttatcttttagggaagaccttgtcttgtctaccataaaaccatcccaaatggattctgatgaagaagttataaggtgtccagagccaggtgagaatgtggccacacaaaatcatatggacatgtgctctgaatctcaggtgtatatatcaattggtgaatttcaaaacaaagcaggtgtgcctgaagatgaatgttggactggccaaacatctgatgctgggacatatccagtggcagatgtggatacttctagaaggagtccaggtccagaggatggacaggccccagtgctgacctacattgacgtaaaatctagcaataagaacccctccagagctgaacccctggtggccttcaatgctcagcatgagagtaggagctctagagataagtatggattagacaggactgggctaagcaaagtggtagtaggtggaagccaccaaaatgccatctcttcagacaaaacaactctccatgaattaagtactctaggaaagggaatagatcaagaggggaagatggtgctgctaagcttgaaactcaccccctctgagccctgtgatccactaagttctaccctgagggagcccttagatattaggtcttccctaaaggactctcacacagaagagcaggaggaactctcagtgctatccggggtcatcaagagatcttcatccatcatatctgattcaggcattgagagtgagccaagctccgtcgcctggtcagaggcccgaagcagggctctggagttgcccagtgatcgggaagtcttgcacccgtttgttcgaagacatgccctccaccggaactccctagagggtggacacacagaaagtaacacaagtttgccaagcggcatccaggcttctctcacctccattagctctttaccttttgagga

SEQ ID NO: 41159 - DNA, 2300 bp, Homo sapien
cagagctcctaaaacgtttataatttcctaagtggtaagagcaataaagatgaaagtagcaacttttgtgattcataacaagcctctatcaacattgtctgaattgatatcaatggcgtgacttttggaaagcccctagacgaggggagtgggggctggttgccagggggatcaaccatgtgattagagggttggaactgccagacccccggcctcccaacctccaggatggggtgaggagaggggctggaaacttaatttattaccaatgtcaatgatttattcagtcatatctatgtagtgaaactgccataaaaacccacatggacagggttcagagggctcactggttggtgaacacgtggaagtgctgagagggtggctgcctggagagggcatggaagttccacaccgctttccatacctggcctgatgtatctcttcttttcagtgctttttgagttgcatcctttgttataaagtgatacatgtaagtagatgttttcctgagttttgccagctgttctaagaaatcattaaacttgatgaggaggttgtgggaacctgtgacatagagctggtcagtcagaggcacagatgacaactggacttcccattggcatctgaagttaagggtctgagcccttaacctgcagggtctgcactgaccccaggcggttagtgtcagaattgctcagtgtgcaaaaccaacacatctgccggcagagatgttttatctgtgagtgtattgaaaaatggtttgtttttcccctccttatgggaaatgtcttttcatgtcttcctcaacactcacccaagggcaaggcccttattatttgtagcattatatccctagggttgtcttatgtggctaacctagtgccatcccaattttatccgtagagttagagatcagggtcaccactttggtaggtagagccagtgtatttagaagcacccttcaacactatgttgaatgtctgataaggcaggatcactgctctctgtggtttcaagttctggtggagaagggagatgataaaacaaataatttggaagttatttattaattgctgcgacaaaagcaaccatagggtgctctctggaagttcaggggaatgagggactatggaatcaaggaaggctttaaagaggaggtaatatgcacccccatgttgataggccagttggatacttttgggtgaagctcatggggaaaaaggcattccaaggacagagaagaacctttgcaaagacaaggacctatagcaaaagacagggttttcaggggcgcttgttaacacatttagaatgactagggctcagagagcatgtgtgactagtggcaggaggtgggactgataaggtacacagaccctgagatgcagggagtgtcagggggatgggttgggatttcatcttgttttgggggaagaaattatgtgtagttttcttccagttaacatggggttccgctggaataacaaaaacctcacgacatggcttatccaaatagggttttatttctctcgtgcaacaacagatctggctcatgctgctacttgtgggaagtcgtcaagaacccaggcttcccaggatctcttctctgacatctttactgtatgtctgtctttttctggttcatgaccatgagatctctgctctataatcagacatgatgtccatatttctgatatataggaagcaggaagggtgaagggcaaaagcatatggcagcaaagtttatttctttgaatcaggacaaagtatctttctcctaattccattcactagactttcactaacatcttctcagactgaactggccctcatggccaccactgaccaaaagggcatctgaggaagtgcctgtctgggtataggtgtcagttaatatcaccattctgtttagtgagaaaaggaggatagattttggctaagaaactagtagtgcctgctagtgtgagtgacaggatcagcttacatttacaaaaaatgggattgtcagccatctaaggttaccatgaccttgtagccatgacgatcaagcagctcataatgaggcaacagataaacaaacagatgatgaaaacatagggtaagagggatctgtggtgatttgggagccaaaggaaggagctcttcacccagtgtagggtatggtttgtgaaggtatccctagagaaggtgactctgcggctgagcttgaaggaagagaattggtaggtgacaaagaagaggtaaggacatgcaagaaagctcagggaaaagagattacatgatcctggctggcaaatgtg

SEQ ID NO: 41160 - DNA, 2300 bp, Homo sapien
tttttcacttaataaatcatggagctgttttatccagacaatacatccaatacaagtaaatcctatgctcctggcatatctctactgctggggactagaaaatgcagaggaaaataatgagtgcttgcactgactttcaaaaataaggttgcataaaaatgcaatgtcaatagcaaaataaatgccatatggttatgaacacatttaagagacaaatattgtaaaagaaaagcacccattttctctattgagaaattcatatttatttgccattcaccaaacatttactgagggtatgcattgccctgggcttgctgggtgctgtggggaggacaagcagggtagatagctcagagcctccatctgcccaggcccactatgtcaacagcctccttaggacacctctttctgcagccttaatccccaccctagccagcaccacacacacttcaactaaggtgatcttcccttcattcccacccagcctttctcctgcttaaactgcttcactgccctcctccccaccaccttccccattcccttcccatcctaagggtcacattgtcaaattccaaccccttcacttggatcgcaaggcctttggtgtgcagtgcctgccctgtaaacctcaccactcgcctgcctcacctctccttgcctgctgctgctaggttcctgctgttctgtcctgcctccaggcctctgtaccctgctcctcttgtcctggaaagagcagtcttctctacccttcaccgccccactcatttgttcttatacctttttttcaggtatctttccccaattacttgcccctgcccccagcctgacagggttagagactcctcctgccaactgcaattgcctggttccattccctgcttcctcctggggtgtgagttagtgcagcccagtctaatgggggacatagtcatcctctaatgcctggttccattccctgcctcctcctgggtggagttagtgcagccgagtctagtggacgggtcactgggcttccgagtcccagtcttggctccttctctaaggctgttttgtcatctgtcacaggcatgccacgagaacttgccagcacagtggtggtgataattagagttcccaatgccccttaagaatgctcagtagacgggagctggcttaaccctccccaatcttcctctccctcctccgtggacagaatctcacacgtctgtgaacccccacgttcagcatgaagtgaggagcccatcggatgacgggccggctggctggttgaaggccactgctgacttcgcattggaggtatgggttgctcagcgcttttaccctttctcaggcatctacttgttgcctgggcttctcttccaagttcaacagtcccctcccagccagttctccgccgcgccccgcccccggatatctgcagggacccttttcctgcccgaggcctggggtcttggctcgagaggggagccccgccgcggggactgagcatgctcgcgccggtcagtctgggagggccgcacgcggggccgcagcctgcgccctgggcacccgggcggccgagcgggcggggtttggccgccgggcggcccgccccgggctcccatcagggcctcgcggcggagagggaccgaggtgggagcgcgtgagccgcgccgccagccagtcgcgcagcgtctacccacgcggtgcgcagcggctgcggagcggagccagcgggagcagcagggcgggctctcccggccgcgagggcgcgcggcgcggcgcggagggtctggccgcgtcccggcggaggaaggagaggagtgagggcgccagaggtgagcgcagcccgggaggcgccagcccagcggcgcgggcgcagccggtcggtccttgctttcttgcggcgctggcggctgcgttcccccgaccgcgctgacagcctcgcgtcctggcgcctgctcgctggggctgcccggaggccgcggccgggcagctgttgcacggagaggggggcagttgcggggttccataaccatagcaaccgcatcagcaccggcggcggcgggcgagggcagcatccgctcgctcctcctccaggcagcctcgccgcggggacccaacaccagctcgcaggtgctgcggactccccagtccgcccgccgccgccgccgccgcaactgttggcggccagagacggcgaaagaggagagagagggacccaggagcgcggcccccgggggagagagaggggagccctgcagtggagacaggtaggtgagagcgcttcggggtcggcagctgcaaaactctctcgtcgg

SEQ ID NO: 41161 - DNA, 2300 bp, Homo sapien
ccttgaggaatacccagaggggaccagaagcaacaggcggggagctgtgtggcagcccttcccattacgatcctgatcatgttttctcccttgcaaactgagagacctgggggatcttagggggcaggtggagcttagaaaacattaatgtctccccagataggaggggcacagttaaagttggcttgcagctctttagggcaggatgatggatgacgtgggctgagacctgggtagatctcatgatctaccctcagggaggcccctgggccaccttaaagggatttccttacagctagttctccctcattgagcccagatggggaaggccccagctggaaggctcctgatgctggaggaggggtgaggcggaggtgaagcagattgggtaacacatggggcaggtctccccacttctccatggagcacagatccatgggagaatgtggatcaaggcgcccagggggcctgtggtcgtggtaacaccagcgtcctccccagctctgttgctccccagtgcagcatgccaaagggtactggacatgaattcagtgccgcgctgggcactcaggtgatctgattgcgtgtgggaggaacactggctgaatggcaccatcaccggcaaacgtttctaaacacacagtcaactgcaacgtcaccaataaacattttccatgagtgacgggatcatctgaaagctcaaacacatgagcaatcccatccgatccaaagggctcatcagaaagtatgcagatcggtgtgaacattcagaggaggggagcgtgttagaggaagaaagacactgtgagcatttctcatctgtcaagatgcagctgtagccacagaaggtttgaagcacagcttctggccttggcatttgctcctggtcaagatcctgctttcattgactcaggcagccttaatcccctcaaaagcccttcctcctgccttcctaaagccttggcttccaggacacctgctctgtgcaggcggggctgtcttttcactagtcgccagtccaagctggaggcacagggagagatgagtcaaattgggtggcagcaggttctgtgggtggaagaatcaccagggttataaaaaacgttcacttttgaacagcactaatagctctgaaagcaatagcacagaagatattccgctgggggaaatgatttccctaatgtcagtcatggggaagagtgtgtgtgcctgacacattttttttttccttcaacttttaagttccagggtacgtgtgcaggatgtgcaagcttgttacataggtaaacatgtgccatggtggtttgctgcatagatcaacccatcacctgggtattaagcccagcatacattagctattcttcctgatgctctccctccccctgcacacctccctccacaccccaacaggccccagggtgtgttttccaccaccccccccccgcccccatgtgacccgatatcatttaaggcacagaggaaaaggagaagatgaagtgtctctggtgtagtggaaggagcctggaggtggagtccgttaaaccttgcaggtcccagtcaccagctctgtgaccttgagtgagtcactcagcctgcagagccttcgtctcctcacctgcaaacagctgcagtaacacctgtcctgccatatcctcatggtagaaggaaactcctggtgttggaaagtataacgtggagctcctcagtgctggcattcgaaataacaggcagtaatgccaaaccatgctgagagattgaggttttgcttttttgaaggacaagaggaagggaggatagcagtgggaaggaagatacaagatggcaaaaagattctggagaggagagaggaggagcagtgtggacattgttgtccccagggcctcctggaagctgagggtagaaatagaaccatcagagcaagatttggcagatgtcctcccacgcccccaccctccatgcatggccagtgtactgaaaatcagacattgcccagagggtgatatttgcttcagtagtaacaaagggaaatgtggtcagacagagaccacagtcgctctggagacagggccctgctaatcaaagagcagacgcccgagcctcctgcattctggctgcaaaaacagctcctggtttgaaacaacttaatgtaagcctttcctaaatatgcctttcctttttatttatgttttcccctcttggcccagggaccccctggaaaggacgggccaaatggaccaccaggtccgccaggaaccaaggttggtcactgatgcggttggcaccagtttgggaacccaaaa

SEQ ID NO: 41162 - DNA, 2300 bp, Homo sapien
agccctgattccagggcctcctcctctgcatggtggctttgcccattcttcagtcttccacctgctcagcacacctctccttagccctgaatatagggtttgcaccccttactttgttctctgactcatctttttttttcttcatagcacttattataacttattgtaatttaatgttgtggtctcatccctcttttctgtctgtgttcccactagtgttaccggaaaaggatcccaatccagactccaggagaagaattcaaggcaagttcataaagtgaaagcaaatttattagggaagtaaagaaacaaaaggatggctattgcaggcagggcagtggcacgggctgctcgaccagatatacttatagttctttcttgattacatgctaaacaaggggtggattattagtgagttttctgggaaaggggaggggatttcccagaactgagggaaacttttagaccacatagggtagcgtctggacgttgtcatgacatttgtaacctgtcattgcactggtgggagtgtctattagcatggtaatgcattataatcagcatataatcagcagtgagaatgaccagaggtcaccatcttggttttggtgggttttggccagcctctttattgcaacctgttttatcagtggggcctctgtggcctgtgtcttgtacctacctcctatgtcattctgtgacaagaacgccaaacctgctggaaatgcagcccagtaggtctcagcctcattttatccagcccctattcaagatggagttgctctggttcaatgcctctgacactagtgtgcccagaggcgcacgcgctgggctctcgcaggtgcaatcattctcttctctgcgtcccgccctcctggtaactgacaagcacccatctcagcccctcacctttctcgtgatacggccagccctctcttctacttgatgggcacctgacatggtgagggtggtggggttcagtcaacacatgtgaaatgaatttccacaagagtggctggaaaacaagaccggagagggaggaagcagctggatttttgagctccctgggtcacagaggagcccgatactgcctgtttatgaaatcgttgctacccagcaggcaaccaaataaagacaccccagagtttaggagacagattgggagctgggggtgggggaggtcacacagattaaaccatgttctcatctagttcaaaatactcctgcctggcccatttttaggaacagtgctcagaaagaaaaagtagaagggtgccccgggcctgcacctgttcatggtctgcctttgggggctggaaagcccattagccaggcgagtgtcctcatcaggccaacgtgggcccatatccctgctctgctgggggcgctggcagactataaaggctctctccgaggcttcactgtcctcatcccaaaaagaaggacgcgatgcccctgtcctcagagctgaagtcacagccagtgaacagggctgcctgtaggtggagcccctggcacagaggggtgcgcgttacctgctctcacctgctcagacaggagggggcctctcagatctggaaaaagagccaagcgcgccccctccccaggccccctggtggcgccaaacttcccaaagtttcgggcagctgcggcactagtcggtggtctatttcagacccgctggaaaagggagcagagtatcagtgaagtctataattggacagaaagttgtcagcccctcttttgggcttcccagggccacctcgttactgcctggaccctaacgctgtccagtcccccacagccctcccgaggtccctgcccacctttccccgcagcccctcgccactgtccggggcctcgtcggcctctctcgttttctctggggtccgcccctgcacctccggcccctccccgctcccagccccctgattttcctcctccttcgcggcttggcccccgcccgctcccgccccgagctcctaggcccgcccccgccccagctcctccccagccccgcgctcttagccggggaatcccagcgctgaggccagcttgcccctggggaggctccagacagctttgttcctgggcagtggcggggctggccgaggctgcggcgtttctccccaaggaagtgtcttctccgctttccctgttcttctgtttctcacacactttctatctcattctgtaactttcaagcctttccttctaactgtatgtatttagttacttgttttcaagctggttccctctctggccccctggcctggggaaagcctccacacttactgcgg

SEQ ID NO: 41163 - DNA, 2300 bp, Homo sapien
ccacaggttatgggcacgctgcacctggcaccgatgcgggcaaggccttctgcatgttctacgccgtgctgggcatcccgctgacactggtcatgttccagagcctgggcgagcgcatgaacaccttcgtgcgctacctgctgaagcgcattaagaagtgctgtggcatgcgcaacactgacgtgtctatggagaacatggtgactgtgggcttcttctcctgcatggggacgctgtgcatcggggcggccgccttctcccagtgtgaggagtggagcttcttccacgcctactactactgcttcatcacgttgactaccattgggttcggggactacgtggccctgcagaccaagggtgccctgcagaagaagccgctctacgtggcctttagctttatgtatatcctggtggggctgacggtcatcggggccttcctcaacctggtcgtcctcaggttcttgaccatgaacagtgaggatgagcggcgggatgctgaagagagggcatccctcgccggaaaccgcaacagcatggtcattcacatccctgaggagccgcggcccagccggcccaggtacaaggcggacgtcccggacctgcagtctgtgtgctcctgcacctgctaccgctcgcaggactatggcggccgctcggtggcaccgcagaactccttcagcgccaagcttgccccccactacttccactccatctcttacaagatcgaggagatctcaccaagcacattaaaaaacagcctcttcccatcgcctattagctccatctctcctgggttacacagctttaccgaccaccagaggctgatgaaacgccggaagtccgtttaggtgtggggagggaaatgggacagaaaagtcatttgtcatagttggtgttaatttccattggtccaactcgtcttttcttatttatttattattattattgtcatcattattactttctctccttcctcctttcttggtctcttggtctcattttcccccacctttccagccagacagagcaggccaaagggaaatacaggcccatcctcctctgaaactcacatctgagcatgaagcatggatctcctccttccttcccagcagactatgccttacatttctcaccccacccaccccatcatctctgcagtggttttcccgggacagatgtgagaccaagaccacggagacagagctgagaggatacccaccccaaagctgcacatcacgctcagccttcaatcgcctacccttagtggtgtctctgacctaactcctttctcttttcctaaggactgagtgactgtgtgtgtgttgtgtgtgtgcttctgtgtgcacgtgtgtcgtgacaaaacgggaagtattaggtattccgttttctttcccatcacacatcatagcctgcttttggctgcttccaaacaaaacgggaagacaaaacccacaaggtttttgatttatcgtattttgccaaatcaagcatgtttcattaagcagttcttatccctgatgtgtcatggccatattttctaaatgctaggttctaaattatattaatgttttttaggggcgggtgggcaagacgacccaaaccatcttagcttgccagttcagacattttttaaaaagcatgcactttgttaaactggtatgcgctatcaacaaaaaaactagaaatggaataatccaaagccaataacattaacttataaaagacatttttaattttgtcacctccagttccaacaatttaccatgcaactggaattgtcaggggaaacgggaaaattgttggaaccccagagtatctatttccctcttattgatgattttgtgcagcacctaccctgcataaataagaattatagtgttggaatgcttgggtgagaatgggtattagtatgtggctgtggttccttttcctcatgaaaattgacagggcattcctcattaaaaatacatatctatttcaagaaatatcgtctctaattgcatttgatttgtaaatagggtaaagttcacattggtctcaggaagagtttagaggcaaggagctatgtcttggcctactgggaacttgccaatctcaggggaaaattttgtctgagtagtgtagaaattcctccctactctcaataggggatgaccccaaagggaagacctgctatcctcttgggggaggtggtggggtagttcaggctgtagaatatggcacagtggaggctcttacagtaacaggcttaaaggacagtttgacctccagattcactgaggggactttaatttccctca

SEQ ID NO: 41164 - DNA, 2300 bp, Homo sapien
gacacatgggtttgaaaaaacttatggaacccaaggtaaagcagcaagctaagtgaccatgaacatgtgacagggtcccatcagggaaatctatcttgatgggcaggattttagatgttggaagaccaggtacatccttcaaaatttctgtccaaaaaaacactgtccatgatccaggtttttattctgggtagtgttagtcccacagtttgaacctactgagtctcttgttccttctgccatattgggaagatcccatcctggctctgacattgtcactgaccagcttgggtgaccctgcagctgacttcacctattcaacatcattgccttcatttcgaatgtgaggaaatacagtcttgacttggattccctgcagcaaccacgcaatgaagttgcatcaagaatttcaaaagtgcttacacacataaggtctttaagggttgtttcctcatttctatccaggctccattcacagagtggtgcaaatttattcattcctttattaaataaatattttactttctaggtatgggggaatacagcagcgaacaaaacatttttaaaagtatgcatttgtggcatttacatctcactctacaattgcctctcttgattcaaagtctctgcttttgagcctcattcttggcagttgaaaactctgggctgaaatcccaactctgaagaaatcaagctaccctgctaactcagttttcttgtcagtggggttggaatcattatggttgtttagaggctagaattaggtgatgtatgtaagaggattcagcactgtgcctggcccatggcaggtatcattctttgaaaatccactcttcatgtcaatccatagtggacatagagaggtttctcccttgggcttggtacttttggagttctcttagtagtgaatctgcttttttctttttaaagcctttatgtggctctaagatggcattcgaatgttcctccatcccctctcagtggcatagtgcaagtgacattggttcttctttttctcttcccttccatcccagcacatcccaactccctccctactgaaatgttcctacccccctgccatcccctaacctcatgtgacttctgagaaagtggctctcctttgttctcctccctccaatatatggccacgcccctctaccctgcagaggaaattcccccagtaccaggtccctctgcattgcactgcactgcaccaagtcgaccctcccttcccccaacctctagacccctcctcacttgctctctctgttcttctcatccccttcccacaggttatgggcacgctgcacctggcaccgatgcgggcaaggccttctgcatgttctacgccgtgctgggcatcccgctgacactggtcatgttccagagcctgggcgagcgcatgaacaccttcgtgcgctacctgctgaagcgcattaagaagtgctgtggcatgcgcaacactgacgtgtctatggagaacatggtgactgtgggcttcttctcctgcatggggacgctgtgcatcggggcggccgccttctcccagtgtgaggagtggagcttcttccacgcctactactactgcttcatcacgttgactaccattgggttcggggactacgtggccctgcagaccaagggtgccctgcagaagaagccgctctacgtggcctttagctttatgtatatcctggtggggctgacggtcatcggggccttcctcaacctggtcgtcctcaggttcttgaccatgaacagtgaggatgagcggcgggatgctgaagagagggcatccctcgccggaaaccgcaacagcatggtcattcacatccctgaggagccgcggcccagccggcccaggtacaaggcggacgtcccggacctgcagtctgtgtgctcctgcacctgctaccgctcgcaggactatggcggccgctcggtggcaccgcagaactccttcagcgccaagcttgccccccactacttccactccatctcttacaagatcgaggagatctcaccaagcacattaaaaaacagcctcttcccatcgcctattagctccatctctcctgggttacacagctttaccgaccaccagaggctgatgaaacgccggaagtccgtttaggtgtggggagggaaatgggacagaaaagtcatttgtcatagttggtgttaatttccattggtccaactcgtcttttcttatttatttattattattattgtcatcattattactttctctccttcctcctttcttggtctcttggtctcattttcccccacctttc

SEQ ID NO: 41165 - DNA, 2300 bp, Homo sapien
gctcatctggaagcagggaataggtgcgccccagcccgagcctcgtgttcctaccccaggtggtctcgagggggctatcgcgtggctcagggctgcatccacggcgcaccttgcgcccagctgtggggaaccaaagagtgattatatatatcaaagagtgattatatatatatatatatatatatatatgtgtgtgtgtgtgtgtgtgtgtgtgtgtgtgtgtgtgtgtgtgtattttttttttttccttcagtaaagcaacagagaggttactgggtcgggggattgcgatgtctttccccgctgtcctgactccaaaagtggcggcccatgctgtccttagcgctctccagggaaacgactcgggtctgcaggtgctggcccaagcgggctgtgccgctgggaggcgagggggccgaggcagccctcgggaccccaccactccacgaggccatgtccctggccaatgacacgctcccgcgccgggtggctaggtggggggtggggggtggggaagacttcgtgaaccgctgctgccgctctcctgtgtgcccatggccccctccccttctgctccccactctctgcccaatctgcctgaagctgtcagcctgccatctctggctgaatcccgttttcctcctccaaccccgagtccctcaaactctccacccgccagggctgcttgcgctcttggggagcggggctagaaggacccaagaagccgcgtttatcctcccatcccccgccaaaacccgccggcggctccgcccccgccccctccctggcggctcaggccgcccctcccgggctccctccgcgtgcgccctgcgccgcgctgggtctgcagcgggagctgccacagcagcctcgccagctggctggggaccaggcgggaggtggcgcgccctggaggctgcgggagggagggagggagggaggcccggcctcggcgtagcccggcccccgctccccgaggccctcccgccggagcggggctgccaagcgcacacacacacacacacacacacgcacatacacacgcgcacacacacattcgggctcccaacggcgcgcacgcacgtagcgcccggggcagaccagcgcggcggccgcctcccgggacgcccggacgccggagggccccgacccccgcgcggctcatgcgcccgcgtccgccccgctgctccgcgaggcccgcgggacccctcccgccgccgccgccgcgcccgccgcccccggaggagcgggctggccgaccgccaccgcgccgtcccccggccgcccccgaagccgctccatcgcggtccctgccgtcctggggccgcgccccgctcccgcgccttgggggttgagccgagcaaacttcgcgcaccggccgacgcccggcggggaccccgctgcgcacccgcgcgcccgggtgggcgctgggcgcgcggacctttggggagcgggctgcccctcccgctgcacctgctcggccccctccccgcttgcaggggactccagagacaccgccacttcgcaaacttttcctccccaccaccgagagggggcgaggaggggtaaaaggggaagcaggttccgctgggcgcgcggacctgcaggctccttgctgggcaccgccacccgcgagctggacccacaggggtaccgggccccgcggccgccctccggccgctttctggctccggttcccgtccctgcgtttcccgcgggagcggggggcggggtgcggagggcagcaaggcccgcgcggtacccagcggggccgccctgcatggccctgcgcagtggggcgggctgcttcggccgggtctggcgcagggtgtcggggttcccggacgcctggccccggcgctcgagcagcctcctgtgcctgtccgccttctcggctgagcccgggcccgcgccgcccctgccccgccagccgcctcgcggtggcggtggctgtggcggccccagcggagggggccccccccagcctccccgccccccgcctccccgctgctgctgctgctgctgccgccgccgcttacaacttggaggcggcggcggcggcggcggaggaggaggcggcggcggccgccgggcgctgcagtgggacgcgcgcggctgtgagcctgcgggacatgccccccgcgccggctccttgctggcggccatgaagaggcagaacgtgcggactctgtccctcatcgtctgcaccttcacctacctgctggtgggcgccgccgtgttcgacgccctcgagtcggaccacgagatgcgcgaggaggagaaactcaaagccgaggaga

SEQ ID NO: 41166 - DNA, 2300 bp, Homo sapien
aatacttcacgaaatcgggaattatttttagttctatttgtttaaaataaagaagccactctcttaaaaatgtattaattaattaattaacaagcttctacattttaggttttatatacttttctgtcactttccctgacaaagtcacacaggtaggaaccatgactgtcacattttaaacaacgatgtctctaaagtcttacaaagcacagcacagagtggatgatcaatacatgaatctactgaaagcttggggtcaccaggataacagataacgtctgatacatttgagttaagacaaggtgccttgaaataactttagtgcaatgccgttctcaaacacagcagtggtcccaggcttacaataaaaaaaaagggagggggccgagcgtggtggctcacgcctgtaatcccagcactttggaaggccgaggtgggcggatcatgagaaaaaaaaaaaagctgagctgtcctgtgcttcgggcagcctcagttcttggctttggttttctctccacacagagttaccgtgctgcctgctgcttcttcctgagctacaggcttccatggtcttccagaagaatactgtcctcttctgaaaccatgtttctgcatatgccctgctgcttcaggaaccatggtgccatgcacccgacacataggtgtgtggggagtggactcaggtcccttggctggtcacccagcaagcctgggcagcgctggccaggtgttcaaggaaggcccagcagagcaggctaagctgggatgggcctctggggtctgccctccccacctttccatcctcatctccagcccagcccctctctgcctcagacccttccatgtcctgtaaaatggagcaagcaccaccttgtaggtgcagtcctcaggagcagcacctgacacacagaaggccatcaatatacgtgtttggcactgtgcgtggattctgccgattctctacacttctctgttatgaacaggtaatttaaagaaaacattgagcatcgtgaatggcatatgctaggggctgaacaagcataacttcacttctcttatttctgggacctcccagatgcctaagaggtgacagccaagggggtgacactcaggaagagctgagacccttaagccttctacgcactatcttaatgcatgtttacccctccatcccaactcctgagatgggaaggcttatagtgtggggcagtggggctgcgccagccgggagttgatgtgtaacgtgaacaagatacagccaaggtgagcagtggcaaggccagcgcgctcacacaacacggttctcgccagtcaacttctcccgtggtgtcggtagggcaggtgggtggctcaggatcacagggaaaacaagggggtcgatgactagagccaagccttggaaagggacttctgttctgctttccaagcagcaatgctcgcatcagacaggagatagtcacacccctcttttttccatcctagacatcaaacagacaaaatggtaccagtgacagattaatattcaaaggccatcttgatccttctagacccgtcaaatacaataaggagcatcccccgtgtttagccccatggaggagggaacttattttgcaatgagatttcgttttcaaccaatcctagtaaccggccttccagagctggagctcccttagaaacccagcctcattccaccgctgtctcatagatgagaccctctgaggagacgctcaaaacagggaaggaggcgaaaacggggccacccaagggttatgaggatgaaatcacgacgacagcaacactgttgagtgctcagtgtacgctggacacctgcattagctcattgactctgcactcggtggtgccccctttcataggtatggaaaaaggcacatgcagggtgcccaccctgctggaatcagccctcaggtcatggagcctgttccctgtctgtccaggaagcaaccccgaggccctggctcttgtcctcccacctcccaaactgccccaaaggggtgaggaaaagagcttctagatgattctaaccccacctctataaccgcaagctgtgagatcctcgggaaacacttcgacctcatgaggctcagttttctaatctgaaaaatgagaatattaaccatagacaactgccactcactgaacaccagctgcagtagagccgagcatacacgtaatcctcaccgcaaccataggagctggatcctgacatccccatctcacagaggaggagactgaggttaatgacgtggcaaatatccacaatgacagtttctgcaagtctt

SEQ ID NO: 41167 - DNA, 2300 bp, Homo sapien
aaatctgccagtcacaaaaggacaagtactgtaggattccactcatgcaaggtgcctagagtgtcaaattcaggaagacaaaaagtagcatggtgggtgccagggccgagaggaagggagactggggagtccatgtttaatgggttcagagggtcagtttgggaagatggagtagttctggggacggaaatggatgatggagatggttgatagacagaatgagtgtgcttaacaccactgaactgtgtacttagaattgttaaaatggtaacttttatgttatgcatactttgccacattacaagaatataaaacaaaactagaagaaacgggactaaaactcatttcctccgattctaagccatgttgcctcagggtgtcagatgggtaggttgcaggggagaaaggaatttatttaatgagcgacttcttgttctgtcactatatttcctcatcaaatctgcacgaatctagtgagatacatattaattattgtccctatgtaacagttgagaagctttgatttcctttttttcctttttcttttctttttttttttttttgcattttgcttatgcttttggtgtcatatccatgaaacctttgcttaatccaaggtcatgaagatttgttcctatgttttcctctgggttttatctgcaaatctttgatgtaaaggtccacatagtattttaagctttgccagccgcatatggtctctgttgcgtattcttctctggttttgctttgttttgttttgttttacaagctgtaaacaaatgtaaaaactgttcttagctctcaggccacacaaaaacaggcggtggtcagatttggtccatgggctggatctgctgtgtcctctgcttccggagggtcctggggaaggcagggtccttcagtccggaggggaacctggttgaacttcttgttgctgtggttactctgggtgcccccaggctccacattcccctgatgttgccctgtactcagggttgcagagaagctgtaatgttccccttcggtccccagccatcctgagtgcagcgccacccccatgggtggggtctccccatacctctgttcttcgcctctcactgggtaccgctgggccccagcaggagcacatgagtactccccactgtgcagcaccctgcctctcctggaatgccttggttgccctgggaagtcttctcttggatgggttccaggaagcatcctgagtgtggagtttgtcggcttttactcactgtcagcccaagtgaccctaccttctggatagaagcacccccgcccccgcctgtcacctcatctgatgttgaaatgatgctcatagaaatgtgtttttctctctaaaatgccgtgtttaggccggcgcagtggctcacgcctgtcatcccacacgcctgtcatcccacatgcctgtcatcccacacgcctgtcatcccacacgcctgtcatcccagcaccttgggaggccgaggcgggtggatcacccgaggtcaggagttcaagaacagcctggccaacatggtgaaatcccatatctactaaaatacagaaattagccaggcgtggtggtgtgcacctgtaatctcagctacttgggaggctgaggcaggagaattgcttggacctgggaggcagtggttgcagtgagctgagtttgtgccactgcctccagcctgggcgacagagtaagactccatctccaaaaaaaaaaaaaagaaaccatatttaaccacagagtaagttttggaagccctttccgtttgcatgtacaggctgagaattgtgtagactctgggacatcacaggaaagatggtgcccaccgggggtgtaagatggtgcccgctgggggtgtgagtcggtccccgccgggggtgtgagtcggtacccgccggggttgtgagtcggccaatgctgatgacttgactagttgggattatcttcagactcttcctaagcgaagccgcttgcctcctggtggatcaaactagagagttactaatgtgtgtgtgtgtatttttttttttaatatcttttagaccctggaagctgtcctgaatttcaaatactctggaggcccgggccacactgaaggatattacaggaatctctccctggggctgcatgtagaagtcgagccgtctgtatttttcacccgagtcagcaccctcccagcaaccaggtaaatgtcttcctgccgcacagccgtcttgttctagagtctcaacagcactacgttcagaatcctgacctcagtgtgtttttgtcatgcatcccgtcagatccgtgc

SEQ ID NO: 41168 - DNA, 2300 bp, Homo sapien
agggtgagttaggtaatgaagatgcgattaaagacaaaaagaaagtgtcccagaggagacataaagagggcagggagaaggagctgaggaaaggcttcacagaggaggtactgctagatctaggaggagacgaggtgtttaccaggtgggtaagagaagcatagatggagctcattccagaaaggtccacagggtgctcaaagggagggaagcgtgaaaagatagggcacgtcaggagggtttatacacatggcgctctgctttctctcctaagcaggtgtctttatgaagtatagttatttttttctctcttgacaataaggaggcccagtagttccaggaagaaaggcactgtactgtggccaggaaggaaccatccgaccagcccagggaatcaaactggataaccagggggagacagattcaacagtgttagccgaagtctcaagagaagtgctgactgttcagaataaattaccaattcatccatcaatttgccatatatttatagaccatttattatgcgtcaaccactatttgagcacagtcgccatttcccttgacatgaggcctctgggtgaggccactaatgacaatgatatgctgctaatcacagtaagaaacaggaacctaggactttatgagctggggttggaaaggggagacctgggggagggtagaagaggatggaccaggtctgtgtatctgcataaccttcagtcctgggggcaggtggctggagccggccaagtggtggctgagtacgtttgggctgtcccaggagccacgcagtcagggctgctgctgagtgggaccctgccacgatgcagcatggatgacaggcccagggggcaagcggaggcagagtcaactcagggagctccatgtcgttaaatgtcgccattaacactgtttctaaaagggttagaaagaggaagtaaggcttcagttcgaggcaactctgggaaatgtcctaatcacaagaaggatgtttaagaagtaccttgtcggtgtgaaccgttcttctgttagctgggtaactacagctggtccgggcctggtgcctgggctgggggaatggcacccccaggagggtgtgtgtcgtagctttttacagcacctgtgtgtgacgcagcattcctgccgcctgcgttgtcatctccctgcctcagagctgctgcatttcagactgtggctgaaaatatcgggagaaacttggcctctttcatctgtttccctagctagttcacagctccccccatcgtgccatcatactacttgcatattatttgtctaagatcatgagtgcccacttagatatccaactatcgcacgggcctgtgagtatctcagagatcgcagggtctcagtcatctttattcctgatgatattccatgttgcctcatatttctccctcccgagaacatctttcttcattgatcttcctagaaaatgcctcgttcttcaagacccattgcagagcggggagccctcctggttccgttcaggctgttgcagaggtctttcatctggctccatagctctatgcttacagccgacagccctggcatacagtgtagcacatgtattctactgtcattctttgtttacagatctgccctcccaggagacagtttcatccctgcatctccagcctggcatatggtacaatgcttggtacccaggataagtgctaagtaactgctgagtgaatgaataaacataggaagcaaagggatggtccagcgtctggatttagagatgcatgccaataaattattcagatatcttcattgatatgctcaaaaacgcgtatttctgttgctcaggaatcagctggtggtatacactgtctctctctcccaggtgggagggtggagtgatggaaagaacacaggagttgggctgcccaggttcaagacctgatcctgtttcttcttagctgggtaactcttggcaagtcacattttgtcttagaacctcttagtaccttcatctgtaaaaagaatagtcgtgtgtatctcagagggtcattgtgaagaccagctgagatagcgtcatggctaaggagagtgctttgtagtcatgaaggtatcattagtaatatggtatcaactattcttcattgctacttattagattctaggcactattctaagatttcacatcaggacttttcaacagcagcactatgacattttttctagataattctttgcggttggagggggctacaggatataggatgtttaggagcatccctcacttcaacccactggaggccagtagggtcccttcc

SEQ ID NO: 41169 - DNA, 2300 bp, Homo sapien
catagaccttactcctacctcccacagtttgcccatagtcccacattggagtttctctctgccaagaagctcccggtcctcatctcctcctaggagactggacctgacccttgcccagcctctgcagcccctccctgggggcctgaccttggctggagtggggtccctgctgccatctctttagtgccatggcctgttcaggactcagctccttttcagtgccagcccgattcccacccaagctccactgctcatgacaactgggatgctgcagctgggaccgtcagggcctgtgttaggcccaggccctgtgactgccaggtgaagcgttgttttgttttgtttcaaaatcctgttgtttgagacacaaaatagtgaatcttggcagtgttttatgtttttccgataccttctctgcaaatccacattgactataaacttttgcttgagaaaggctgcctgctgaaaggtgggaaaaagcccttgatggtaaggacacgagtccaattttccttccttgacagaggaagtttatttcttgactcatgatcgttaaagatatttaaattccaaggagctcaccttgatttattatgcaattgtttcaccaaaatttggtttggatgcagaagctcctctatcagagtctgtatctggaagcccccaggaaacacgtgcccggcaccatgagcttggcttgtgttaagcagcatttcttcccttgggtggcagaggtctgagtctggaacattcttttctgtcctttggaccaatagtgtgtgacaccaagtgcttcggcgtgggaagcagatccgactccgatcctgtgtgctgtgaccgggagcagggccaggaggagctgggcattggaaagactgctggagagtgtctggagtggggtggtccacagtccgcttagttgacttcatgagccatttctggatgcactaagcacacgatgttggctcaagtatgctggactaattgtggctctctgtggaaatccttcagggacaggaagaaggtagtggggtactcaggaaaccttcaggccccaggagaacatgttggcctccccgctctggccacctcctctgtctgcccctttgtcctgtggccaaacttctccagggagccgtgtgtgtgtttaacctcacctgtcacatgcctctatttgtcatctgctggcatttgtccccactgtgctaccagatatattttctctgtgatcaccagtgacctccttcccaacccactgtttgcagcctgtggattgggaaggatgcaaccaggacaattagttttgtggattcagttaaagtcaatagaagtcaggtgagggctcacaggctgagagcttgagtgcaggagcctcggggaggccctggcttctgtgttgcacgttcatctggcttggctgccttggcctgtcccgtagtccagggcctcacctgactggtgtgaggatggagccccacagatactgcctgaccccagggcctggcccagctgccctcatgtgacgccaggtgttggtgggcattccttacagtttgtacctgtaagaaggggtctgtgggacagcttctgtttcctctttggcctcagctctatgttagcagctggaatggttggtatacattttcctcttaaatctatggagtttcccaaggtacttctaagcatgacattttttagattttgagagaacagcggcctcatggtttatttgaatgaattcatcatgtaatttttataccccataacttagtaattaagtatttttatgcttcacatatgcctgagaaatgaaggctgagtgagggtgttcatgtttatgacacacaaagacctggacgtgtctgcatgaggaaagcatgaggcatgtggcagctcactttccattcctgagagctggatactgaactccatatatgaagcccagatttcctagcccctgtttctgaaatgcatgagtatggtgattcttctttgggaagtgagtaattttcaaatggccttggcttcttccttctttcttctttaaatttcttcttcttattttagatctgcacattcattgcaaccttcttctggtgatgaaatatctactaatgtatctgtccagctttacaatggagaaagtcagcaactaatcattaaattggaaaatattggaatggaaccattggagaaactggaggtcacctcgaaagttctcaccactaaaggtaggtattgtaagcagctttgaccctgggaatgtttgtattgtttacttgtagaagagatactttaaa

SEQ ID NO: 41170 - DNA, 2300 bp, Homo sapien
tggtgtgagatggtatctcattgtggttttgatttgcatttctctgatggccagtgatggtgagcattttttcatgtgttttttggctgcataaatgtcttcttttcagaagtgtctgttgattcctttgcccactttttgatggggttgtttgtttttttcttgtaaatttgtttgagttcattgtagattctggatattagccctttgtcagatgagtaggttgcgaaaattttctcccattttgtaggttgcctgttcactctgatggtagtttcttttgctgtgcagaagctctttagtttaattagatcccatttgtcaattttgtcttttgttgccattgcttttggtgttttagacatgaagtccttgcccatgcctatgtcctgaatggtattgcctaggttttcttctagggtttttatggttttaggtctaacgtttaagtctttaatccatcttgaattaatttttgtataaggtgtaaggaagggatccagtttcagctttctacatatggctagccagttttcccagcaccatttattaaatagggaatttatgcaatgtcaacatgccagctctgggtcagatgtcataggtgtggtggagtcagtcctcatctctgtgcaggttgcagagtgtgtgggaaaagctgtatcttgagaacatgcttatgaaagctctgaaagttgaataattctggtcaacagacgttcttatctgctagagaagaagccctccactgccctgttagccacccgtgtctgctcggggtgcctctgagttcagaggcctgaatccagcagctcctctcgcttgctgtgtggttcctgggccaatttattaccctgtttggaccttgagtgtttgccttgcagtgacgggggttatcatacctatctcaggaggtccttatgcagagtaatgagataacctgtgtggaagtgcctcacacctaacacatgcctgccacctgttgattgattctgaaattccttctggtttgcctaagagaggattgtaaagggaggagggggtgatggaaattgggacagatgctgaattagctttctgttgctttgtaacaaatgaccacagactcagtggcttcaaacaacacaaatctgcttcctcatgatttgtgtgggcttcagctgggtcctctgctcagggattcacaggactgaaatccaagtggcatctggggctgtgtcctcatctggaggctcaactaagggaagggcctgctctcacgactcctcaggccgttcttcattcatttcctgtgatccccgttctcttgccagctgtctgccggtgctgctttcagctcccagaggctgctcttaggcccttgccatgtggtcccctccacaggccctctaggcaaggatatggtctcctgtgcggtctcacctgattagaacaagcccattcaggacaaccttccttttgattaactcagagtcaacggattggggtcctcaatcacatctgcaaaaactttccacctttgttttacaatatagcctaatcatcatattcacactgaaggtggggattacatagtgcatgcacaccaggttgtgcacaccaaggctgggggttttggaggtcgtcagaattctgcccctgcacaggtactgaactgcagttgacctgggagtgggtggggaggagaagactcccctctcacaatcttaggggaatagggcaaatcacactccgtgttactcacaagtgaccccagtgccgtcttcctgtgttgccagcttctgggccccgtgaagcgcagtgtgccttatggctctgtaccaagaacagtgccatctggactgatgccagcatgaatgcagcccgccgaaggcagtgacaagcgccattcatgtggcatcaaagtgccagtgacagctaccttgctttgtttcagagaaagctggtggaaaaagcagctttgaatcacccatctcaagaagatcatagagcctgctgcctcactgagaatgtaaattgccagaggaataattggaaaccatgtagaaagtgaaaaaataccaactaatacatggattcatttatgtgtgtgtattttctagatttccagtgggttcaaggagatgtgtgtgaagttcagctgatggtatataacccaatgccgtttgaacttcgagttgaaaacatggtatgtatcaccaatcatttgacctttttgggctaacatacaaacttctcattaaagtaggttttacttaatgtctgaggcacacatcttacgatatgtgtctgtttttatg

SEQ ID NO: 41171 - DNA, 2300 bp, Homo sapien
tcctatataccttttgcccagtttccccccgtggtgccatgttacaaaaccacagtatgttatcacaaccagaatgttgacttgctgacaccttgaggtatgtgttactatcctcatttttattcacaatgaaactagggttcagggaagcacacaggcttgctccaggtcacccagatcgtgcgtgtagagctgggagttgaatatcggccctgacttccaggcagtgggatttccatcatgaccgtctgtaggctgggggcagcattcattggattgttcatttgtttgtttgttcactaatcccttcaacaaacatgtattgaggatctcctatgagccagattctttcacgtgggtcatctaatttaatttttccccagctctggggaatcaggtaataacgttttctttttatatctgacaaaattggctcagagaggttatggcaactctcccatttataaaggaaaggtggtatatttgtgtaatctctccttttatgttaggcacaatgctaggccctttacattcgcaacctcctcaatctagatacagttttataaggcaagttctttttcttttaattctttttttttttttttttttttgagatgcagtctggctctgtcgcccaggctggagtgcagtggcgccatctgggctcactgcaagctctgcctccctggttcatgccattctcctgcctcagcctcccaagtagctgggactacaggtgcctgccaccacgccgggctaattttttgtatttttagtaaagatggggtttcaccatgttagccaggatgatctcgatcttctgaccttgtgatctgcctgcctcagcttcccaaagtgctgggattacaggtgtgagccactgcgccccgcctcttttttttttttttttgagacggagtctcactctgtcacccaggctggagtgcagtggcgcaatcttggctcactgcagctttcacctcccgggttccagtgattttcctgcctcagcctcctgggtaactgggattacaggcacgtgccaccacacccggctaatttttgtatttttagtataggtggggtttcaccatgttggccaggctggtctcgaattcctgacctcaagtgatccgccagcttcggccttccaaagtgttaggattacaggcatgagccaccatgcccggccaagacaagttctattatcaccactattttgtagctgaggagttccagggagcccggaattcaaatccagatgtgattgcatggtggatttttcttaatatcctgttgaggggatgggggagcaattacacacgtgtttattcattcactcaacagacatttttgagcactgactcttactactcctggttaggtggtgagaatagaaagacaagaaacagccccatttctgtagaagctccatgctgaggccaagggactgaaggtcaacagttacagcattatgatcagagctgcgacagccacgtgtagagccctaagacctgttgatgccacggctttccttggggcttcccctgcctctgggtagtgaaggtcacagtcactgcctcccagggtaggctctcagcactcaggactctgtgtctcacagcctcatttcttctctctgaacagggacttcaaaatgagcgtccctgactacatgcagtgtgctgaggaccaccagacgctgctcgtggtggtccagcctgtgggcatcgtctccgaggagaacttcttcaggatctataagaggatttgctctgtgagtcagatcagcgtgcgggactcccagcgagtcctctacatccgctacaggcaccactacccacccgagaacaacgagtggggtgacttccagacccaccgcaaagtcgtgggcctcatcaccatcacagactgcttctcggccaaggactggccacagacctttgagaagttccacgtgcagaaggagatctacggctccacactgtatgactcccggctctttgtcttcgggctgcagggggagatcgtggagcagccgcgcaccgacgtggctttctaccccaactacgaggactgccagacggtggagaagagaatcgaggacttcatcgagtcactgttcatcgtgctggagtccaagcgtctggacagagccacagacaagtctggggataagatcccccttctctgtgtcccgtttgagaaaaaggactttgtaggactggacacagacagcaggtaagcttacctagagacccaggccccttggcttccctgcatcagaaagggaaagcaca

SEQ ID NO: 41172 - DNA, 2300 bp, Homo sapien
ctgggcacctctgttgaaaacttcctggctgtctggcaggctggaaatcagctctatttgttttgccctgaagatatgttttatttataactcattctgactctgtagaaaataattcaataaaaactcaattggttttccactagccctgagcagggatgagggatagtatcttattttataacacatgtgataataaaacagccctggtcacatagcccagagcgggtaagtgcctgctggctgaaaggaaaaatgctggctcagaccatttctcccttgctgctgtatgtgctgagaaaaccactcctgtcctctttacttttccattttaggattttttttttttttttttttgagatgggctctctctgtcacccaggctggagtgcagtggtgtgatcttggtttactgcagcccccgcctcccgggttcaagagattctcctgcctcagactgcctagtagctgggattacaggcatgtaccaccacgctcaactaatttttgtatttttagtggagactggagtttcaccatgttgcccaggatgatcttgaactcctgacctcaggtgatccacccgccttggcttcccgaagtgctgagattacaggtgtgagccaccacacccagccctttttagtgtttgttgttgttgttgtttgagatagagttttgcagttgttgcccaggctggagtgcaatcgcatgatctcggctcactgaaacctctgtcttccaggttcaagcgattctcctgcctcagcctgctgagtagctgggattacaggcgcgcgccaccacatctggctaattttgtatttttagtagagacggggtttcaccatgttggccaggctggtcttgaactcctaacctcaagtgatccacccgcctcagtctcccaaagtgttgggattacaggtgtgagccatttctcctggccaggattttttaattgaaaaagaaatacatgtacatgttaaaagattcaaacagaacattaaacatacataacggagagcggctctctgttttcaattttccctgcggatgccactgttaattcatgtgctgggcatcttaagtctgtaagcctcccccatctcctgctttattttattttatttttgaacccagaggggtttaaatccttaaatggcttctgcccgcacttagcaagcttggcgccttggcactgaactaacgacagctgtcctagcccctgtcgcctctttggaaccttttatgtggatggattgttggggccctcaaagtcgggagtgccatggtgccagctggggatcaagaccgcgcgccacacagggggaagccggcccaggctggggctcgcacctcacgtgcctcccgggccctgcgatcctggaggcgctcccaggccgcgcgcgccacggtcacccacccacgtggggggcacgaccgtgggagtcacggggggtaccgtgagggtcacagggggtgccgcagggatccacagtgggcttccgcggggcctccacccctgagcttcacagaggaagtgaaatttgagctgcgcgccctgaaggactggtaagcggcggggacagaactgggcctccttccagctgcgccgccccaggtgcagaagctttcctcctagtctctgttctcttgctccggtccctccctccctcctcgctccatctccctccatctccctccttccctcctcctcttcctccctcctttcacccctcctttttccctccctcctccctcctccaccctctccctgtcccccgcttctctctctcgctgcccctccctccttctttcacccctcctcctcctactctcctcctcctccctccccgtccccgcttctctccctcgctcctcctccctccttctttcaccccacctttttctctccctcctccctcctcctcctccctccccatgtcccctccctccctgtcccctcttctctccctcgctcctccttcctcttttctccctcgctcctacccccttgcttccctcgcgtctcttgcaaaacccgggacggatcgggggcccaggcctggcctccgcgcacgcgcaggagcagcgccggctcggccgccagtaggaagcgccagcccagagcctgggaagtggccgcagaggctgctcggccccgctgcccgccaggtcgtgggctcccgctccgggcccggggccaccggctgtgtaagtgcaaagcgggggggctcccggtcaggcaattcggaccggctgcggggagggctgcgcggctggccgtggagtcggcg

SEQ ID NO: 41173 - DNA, 2300 bp, Homo sapien
aaataaatttaaaaaaaagcagaataatagtccccgctctccttcccccacagatttgctgagacagcaacataaattgattgaagtgtgtacattgcaaataagcaatgtttccttttgccagctttcaatcttgctttccaagttgcttgccttatccacttacagacagaataagaaaagacctatgcaaaaagtagagtctgtggggtctgacagccctggatttgaatccctaaatagcaccagccatttgtgtgaccccagccaagtagggtatcctttctggacttcagcactaaaaatagctcccttgcttggatcttatgaggtaagcttggagcctagtttctgcactcagacctccattagcagtggccttttaaatgtatcttttctgtattctctgttaagcccatacgctcttttgtttatttattcatttaaaaaaaataaaaaaaaccactttttttttgagacagggtcttgctgtctctcccaggctagagtgatcatggtttactgcagcctcgacctggctggactcaagcgatcctcttgcctcagtctcctgagtagctgtggctacaggtttgtgccatcctgcccagctaattttggtattttttccaagagacagagtttccctgtgttgcccaggctggtcttaaactcctgggctcaagcaatccgtctgcttcggcctcccaaagtgctgggattacagctgtgagccactgcacggcctccatgcggtcgtaacaccatgaggtagccacgttgggcagcttgtgcgttgtcagggagacactcttcctcagcccctgggcacctctgttgaaaacttcctggctgtctggcaggctggaaatcagctctatttgttttgccctgaagatatgttttatttataactcattctgactctgtagaaaataattcaataaaaactcaattggttttccactagccctgagcagggatgagggatagtatcttattttataacacatgtgataataaaacagccctggtcacatagcccagagcgggtaagtgcctgctggctgaaaggaaaaatgctggctcagaccatttctcccttgctgctgtatgtgctgagaaaaccactcctgtcctctttacttttccattttaggattttttttttttttttttttgagatgggctctctctgtcacccaggctggagtgcagtggtgtgatcttggtttactgcagcccccgcctcccgggttcaagagattctcctgcctcagactgcctagtagctgggattacaggcatgtaccaccacgctcaactaatttttgtatttttagtggagactggagtttcaccatgttgcccaggatgatcttgaactcctgacctcaggtgatccacccgccttggcttcccgaagtgctgagattacaggtgtgagccaccacacccagccctttttagtgtttgttgttgttgttgtttgagatagagttttgcagttgttgcccaggctggagtgcaatcgcatgatctcggctcactgaaacctctgtcttccaggttcaagcgattctcctgcctcagcctgctgagtagctgggattacaggcgcgcgccaccacatctggctaattttgtatttttagtagagacggggtttcaccatgttggccaggctggtcttgaactcctaacctcaagtgatccacccgcctcagtctcccaaagtgttgggattacaggtgtgagccatttctcctggccaggattttttaattgaaaaagaaatacatgtacatgttaaaagattcaaacagaacattaaacatacataacggagagcggctctctgttttcaattttccctgcggatgccactgttaattcatgtgctgggcatcttaagtctgtaagcctcccccatctcctgctttattttattttatttttgaacccagaggggtttaaatccttaaatggcttctgcccgcacttagcaagcttggcgccttggcactgaactaacgacagctgtcctagcccctgtcgcctctttggaaccttttatgtggatggattgttggggccctcaaagtcgggagtgccatggtgccagctggggatcaagaccgcgcgccacacagggggaagccggcccaggctggggctcgcacctcacgtgcctcccgggccctgcgatcctggaggcgctcccaggccgcgcgcgccacggtcacccacccacgtggggggcacgaccgtgggagtcacggggggtaccgtgagggtca

SEQ ID NO: 41174 - DNA, 2300 bp, Homo sapien
gctctctgcctccctcactaagctccagacacactggcttttcagttcctcaaactgcccaggcattttcctcgtcaggtgttctccctagagcctgacttgtcccgaaagctcatcttgtctcagtctttctgtatgagtggctccttttctttcttcagatctgggcacaaatgtcacttcccagaggggctgccctatcactcgcacatggttttgtttccttcgtagctttcagcattggaggtgtattttttttttttttttttttttgagatggagtctccctctgtcgcccaggctgctggagtgcagtggcgcgatcccggatcactgtaacctctgcctcctgggttccagcgattctcctgcctcagcctcccgagtagctggcattacaggtgcccaccaccacgcccagctaattttaataatttcagtagagatggggtttgactatattggttgggctggtctcgaactcttgacctcaggtgatccacccaccttggcctcccaaagtgctgggattacaggcgtgagccaaagcgcccggctggaggtattcttacttatttttcagtctccctcagacctgaaggtcagctctaagagggcagggaccatggcagccctgctcactggctgtacccttgtgcctagcaatgcctgacatgtatttctgtgctcaattatttgcgccaggacctcacgtcacagtggtgaagaagacactacacttaacacgctccaattcaaacctctgccaaaatgtgctccctgtctcagtaaagggctctttaccaaggcctttctgatatctcagtaagctgtgctgatactccacagcagctccctcttgaaatcagaccccaaaccctaccacttcccatgatcctggcagaagttaagttggtggccaggcgcggtggcttacgcctgtaatcgcagcactctggtaggccgaggcgggcggatcacgaggtcaggagatcgagaccatcctggccaacatggtgaaaacccgtctctactaaaaatacaaaaaattagctgggtggcgcgtgcctataatcccagctactcaggaggctgaggcaggagaattgcttgaatcggggtgttggaggttgcagtgagccgagatcgcactgcactccagcctggcgacagagcgagactctgtgtcaaaaaaaaaaaaaaaaaaaaaagttaagttggaccccttactcttccaagggcctccccactcattcagagcgaattctgcggtctccgcggccttccctggtctggcccctgaccatctcctgcctctctcctcccagctgctgtccccttggtactgccggcctcctgagggccacgttcctgggttctcgtaatcatcttctacctggtctctgtgattccggccttacgcgcacccacgccctcccagccggcagctgcagggatccttttaaaactgcccgggactccactgctcaaaccctaccaccacttcccattttccttagaaaaaaaaatccaacaggacctagccccgggctgcctgtcagacctcggcgagcacgccaggctctgcacaccgtctctcggagcagtcccgaagaggccgttcccaccagactccgggacctcctcagggcagctcttcgtcctccaccccgcaggaaggctcttctcccaatcaccccgcggcgcagcaagcctggccccgccgcatcgcccgcgctggactctgctcttccaccggtcgcctggctaccggcgcaggacgcatccgctgtccgcttggtcgtcccccctggactttgtgcttcaagaaagcgtcactttttgccgacggcggcacgcccggtcctagtacagcgcaggcgcttaacacacagcacccagccacgaggcccggagtcagagggctttgcttgcccattcacagagccctcacccgcggatcaaagtcgtattccgcgaccgcagcccggagactcccgggagcggcgcggtgcgccccgcccccgccaggctctcggctgccggttccgcgccgggcctcgcactcgggggcggtgtccgagcgtcggcgcatgcgcagatcgggggcgcgaggcctcacggagctcgtagtttcccggacgggccgctcccggcctcgcggcctcgcctccccacactacaactcccacggggcagcgggcgcggctccccgtacccaccagctggccgggcagggcagccacttcgcggtcgggcccgccggctgcgggcacccgcgcgacgggcgggaagatggc

SEQ ID NO: 41175 - DNA, 2300 bp, Homo sapien
acaccggagtgtccccaggaggcctttggggctggggtggcccgtggcttgttccctgcgcctctgggaactggatgagtccttcggcgggactgtgacccgctggacagttaaaaggatttttcatgggcattttcctacacataaggcagttccattaggaggagctttagaagtcgacataatccagacagtggacaatcccagtggcccagacaagccatacgacattttcctgtgacctctctctgacccatctctcacgctcatgagaaaaggaatgtacaataaatagaaacagaaacttcctcagtgctcatgcgcctcacttgcagaacgtgagtatttcatttatgtttgaagcccttccccaaagtgaccgaggagttgcactctagctgccgtgccagcagtctcgtctgctgtgacgcttctcggtgcggatgcagtgcacctgtgactttgtcatgggggtgcccctgttacacacacacacgctgactcttttttatgaggaaaatcttcgactcaaaataattgcactgattttttgacaacttctttttacgatgtcccacttcgcatctgctgtacttgtttgagatgattgtaaatagatttgtggtaggagaagtgacatgaatgcaacacgtggctctgttgtggagacactgcctcgtattcagtattatgtgttaaagttgtgtggacttaactctgttccgccctttagcttcgtgtctgttgaccatttatgaaggacaagttcgcctcattttctttttcttctgaagggaagttctagatcggttactaggagaacatggtctcttggtgcctgatgatttagtcctaagcagactcgttgcagtcttgtgaacactgttgtggtctgtttgattcctcgtcgcttaccgtggctctccaaagcatggtctttgagttccacccagcctgggacagtccagacgggaggcatctgctccgcctgctactaggacgcaagggcctccttgcatctctgtggtcagagtcatcttaaagccatgaggttactgtcgtgtcaaagctgtcatttgtgcccgttattttgctggagtagcagcgtgtgctgtagcccccgtgtgtcactctgtggtcaggctaccctgtgtcacacccagcaagaagtttttcagccccagaccagtctgtgtgtgtgtccgagtcacaccagtgccattacggtgccctcgcttatgcttctttcagtatgttttgccatgttattgtctaaagtgaatgtattggcttagccaaatcactacagaaggtggttcctaaataccttttagtttaaaaaaaaatgcagataaaggctacctctgaattctcaatagattcatcatgtttgctcttaagtgtagctgtccacactgaaaacagccaatatgttgcctgaataaactgaattgtgaacatctatctgttcagttctggcttgaaaatgtgtgtgccatactgtgacccacgggcagcccctcctcctctactgtgtcaggtggaccagggtcacctctgttctgcgcagctttgagattctaggattctacggccggcacgaatggcatgggagggttctctgcacgggacggcataacggcatgccatccttcaggctggcaggagcctgcgcaggtgtggcaaaatcttgaaacagcctgtgtcctgcctggcttttcactttcctatttaatataagaaagcacttttttttctgctttacctacaaatgggttgaaaatggcctcctctgtcctctcctctcttttatacactctgtaaaatcacaaaggtgcttcaacaccgactgtcatgcaaataatacatttaaaatagttgcatggtttcaaagacaatgcagacgtaattggcctttgactttgggacctcgggttactctcactccctactgcaaaacaaactaagggttgaaagcaaagcattctgttcaaatccagggccctttgtttgaaaagaacacagggcccacagctggtgttttgaagtagaagttcccactagtggcgcagtggaccgtctgatgcagacttgcaggaagtcggtcctgggaggctctgaacacccctccctgtgattaaccactttgctgtcagaaatgtcattttcccatacactgtgctgtgggcccggggcctccttcgcttctttctttgggttccatatgttgcccgatcttgaggttagcgctcgccccaatttctccatgagtttactctgagttgacaggcgatgatctg

SEQ ID NO: 41176 - DNA, 2300 bp, Homo sapien
gccttgaacattctgatgttgtcactaaagttgatttccaggcgatgctcgtgtgcccctggcgtggctcacccaagttcctcgactgagggccggtggccatgcagaggcgtccgcaggtgccgtgttctgccagcaccgcccttcacccggcctgaactaaggagcagtggcagaaggtgggccccgtgtgtttacagcatttccaggtccagagaggttggcagacaagtgccattttaataaaaaatgtatttaaaaaaagaaaaaagacaatatactgacagtctaatcatcagatttgtcctataggactgtgacatttattttccaaagtttttaaagaatacgggtctgtggtgataaatacagtacaatcctttttcactgttatgtctttaatgtaagagaagaatatatatatctggtttgcagtattaatgtgatagatagatgctgttttttcattttattgactatggggtgcttctgtgatctgtttggcatatcaagagtgttttggagcctggagatgggaccgcctctcagttcttagtgcttaaggacaggaatatgcaattgacttaatgtgacagcaacccgcttcccccgtggagactgtgcagcgtgtacccatgggagggacggatgtgccctccgcgccgctcgccaccctccctgccgcctcatccccgtgtgtcactcactcagctgatgaagcacaagtggaaattatttattcttgcattgctgggaaacattgatgtgtggggactcactcctctccgtgtgctcttttgtcagatgacttccatagatctatgcactgagattcgtagaaagctgttggtggtggctctgctgggcgtgaggccgtcggtcacagcgaaggagcttgcctggccctgggaggcccaaggatagcagggccagcagagggcatgggccgttcttctggggtttgcatttggggccccagacttgggtttgccaatctagaaactgttgcactaagagtgacaccacggacgattttgaaggctaacaacagacaactctgtttgtgctgagtgggctttttgtctctgtacacagttttagtaagactcaaatccatgttccgtgtagaggcgtcaggaaggaggcgagcctcccctagtgctgctgtgcgctccgtaggtcccctcttcctgctgctgttccctccccggccctgcgcgacacttacctcggcactgtggtggggtggggtgccaaaggagctgcctcctgctcagcggcacccccccccccacctttgtgctcagctgctttggaggcagcaggaggggcagcaagccgcaggtcgggggtctcccgatacctcgcctggatattggcggcaatgacaaagggatgactattatttgtgaagatgtgtactcagagtggtgtgtgtgtgtgtgcatgcgtgtgtccctgtgtgtgagtgtcttattaatggcattagtctcttctggctgtatttttttttaatctttttaaatgacagaagctcccactctaagaaatggcagttccttttgttttagtggcaagtggcactttctcctgttttcagaaggatacagacatgctcgtagcttaaattaatggatgcattcaagctaaggagggaatcttgtgactaataacttttcaaatctgaaattagattagtttccagccatttttacaatcatctggaaccatgtgtctcaaaggtgtgtttcttccacctgcgtcaggctgtctgggggatggcggttcttgtttaacatgcagatttgtgggcctgctgccacctcctgcgtgcggtacttcagggatggccagggcatctgtgtctaagcgatggcctgcagccctgggctccctggggtctgaggacccagctctggtggcacccagcagggaggaggtgcttcctgagcagatgcctgagacagactgggctggcagaaaagtaggactacaatttttgttttttttaatcattttgaaggaaaactttcatttttagtgggccagagtacttcgaaaagggtacttttttatagccctatgcttgttttataaaacttttaatactaaaaacattaatagaccaaacatctccagctgggtcagctgcacacctttgtacatgtctgatgattcagagtttaaatggctgtagttacaatttctcaggtaaacaattgttttctcaaatttttaccaatccctgcattattaggataaattttgagacagtgtaaaaacctcaaagtacagtaggg

SEQ ID NO: 41177 - DNA, 2300 bp, Homo sapien
tcagtagattccagacttcacctaagaaaataaactcagatcatgaaattccccctgggtgctagaagggccggcccaggctctctctccctcttccttcctgagcctcacagaggagagaagggtcttttgtgttcattgtcccatccttagtgctggaggtggcgggtctgtggccctgacccacgcccccttccctgggccagtccgcgtgtcccatcattacggcaagagcacggtttggtacgcaggccggagtggggggtgagagtgcaccgctgtcctgggttgtactggtgtttctttgcgggaggaggtgatagatttggcccctgtgccccagttaatgtctcccaggccggtagggttcgtttatttcatggatcattccatggaaagtgccaggcctgttgccaggcactggaggtaccaagatgcccgtggctgagggagcagaaggacgagagggcctgtggcctggcagaggctgcagatggcccggcagtctggattgggggaaggggtctgtgcagtagaaactgagccacgtggccctttgccctgcactagcagcccccgtgccctcatccccacacagaggccaacccttcctgtgcctgtgggcctccccctcactcacccatactgcacccaggcgtctcctgccgtcaccgtgcggccggaaccggcctggcctgctttcctcgtcctgtcctgggggcttcaggccttctgggcaccgggagcgcgcggcacgtaaaaggcttccagggtcaccacggtctgctggaagacgcgcaggcctttctggtcgtgcccattcgtcctgactcctttacacacactgtgacgttgtggataatttatgagtaatgatgcatgtaggtattttttgtttcccaactccagaaacaaaatgagaatttaggggctcagaaacattccagataacccaaagcacatgacatggttttcactcccggaagtgctctgaatgtttgctcctcacacgtcaccctaaaaagcaaacgcaaatgaaaagcagcgcaggggaaggggctccgggatgccctcggcctgaacagcccctttgctcctcagattcccgctgcagcaggagagcgggcagacggtggagtgcacggtggcccagtatttcaaggacaggcacaagttggttctgcgctacccccacctcccatgtttacaagtcggacaggagcagaaacacacctaccttcccctggaggcaagtcaccctcttcctgtgtgtctctgggggcttgggagggcggcgtcccaggctggggcatgcagcttcgagaaaccgccgaggccccagtcagatacaaatggcactgcctctgctgctgcaggaatgcgggtgggttaatgggctttgttacacctcggttttgccttcagtagaatggggtctgcagctctcttgtgggattggtgtgaaccttgcctgaggttgtgtgtaacgtgtccagcaggccccgcagcgcgaggcaggtgctccgtcactgcaccgttgcgtcattcactctcctctaacatcacgactctttgaaaaatccttgccttgggaaaggatcaaattccgaccctgagccatgtgctgtaactcttcccttggtgtttagatcctgtcattcaggtagggctgggcagctccagcacctcgtcccacaggtagacgtctttcgcacctgcagctgctttcacgcccgcagccaccgaagactggagagagcccagaagtgccggtgtcaggacacagccccgctcacctggtgggctgggcacagaggccgtggggtctctgtgttcgcgtgacgtggggtttacttaacaggcatttctgttgtgaagcggaaggccgtggagcagcccccacagcagacacctgcacagcacttcatagcccagggatgaggcagagacggtcccaagcagagccaggccaccagcccctgagccccctgcctgctcccctggtcactccagtgcggcactgacggcctgtctctacgtcctcttcacaggtctgtaacattgtggcaggacaaagatgtattaaaaaattaacggacaatcagacctcaaccatgatcagagcgactgctaggtcggcgcccgatcggcaagaagagattagcaaattggtgagtgtcagtcccgggcagggctgccctgtggaatccagtccggttgccctggcacagaaacctctgatgcttggaacggacgcagctgctagagagatgggaggcctccacccactccgtgcgttt

SEQ ID NO: 41178 - DNA, 2300 bp, Homo sapien
tgtaatctgtctctgctttgaactatcggtggaggaaggccgtaggtacgtggagaaacactctaggaggatggttgccaaaatggcatctaccttgttaatagagttgcagaaatgactgtgattcttttccgaattcctttggattacttacattaattttataatcagggaggaaactgctgttttcattctgggaaaagaagagcagtagaggcgggattattagcacgtctcaggtggaaagtgaaagggccgtgtaggtgattagatcagcgcagcccacaagtagggagcatcgaggctcacagcgtgttttcccttcagaatcattagtgacggcgcctcccgggccaccagaccccacggtgcccgtgcagcaggtgaggctgctgtgctggagaatgcgtctgcttcagtcgagtagctccagccgggtcagcgcagcatccctagcaggcccggaagaggttgtgaagccctcacgctggcccttccacctcctacgggggagcccacagcgggcagctccggggcctcggagcctacctggggagcccacggctaaaggagccggcagatgctgggtcatgcgtggacagccactggccagaagcaacacgtctccccacggctggggctgggcctggctggggctggcacttggcaggtgcccaattctatctgcgcttggggacacaggccccaagaggtgaagagtagacagtgaggacagtaaggcgaggcaaagccaggacagggagtctggaccagaaacacgccaggtcctgggggcttgtgatccacctgtgcggtgtctttaaacgtctttcaccatcccccagtgaggccacgggtcccccagcctgctgctgtcacagtgtcccacacagcaggccatgcacacaggctggagtgccgtgtggtaaacgtggatttaaaaggaggggaaacggaactctgatgagggtgtggtgggcgcaggcgaagcccacccagaggcagctgttccttccggaagacacatctgacgggaggcggggtggggtctcttggttccaggtacacccccgtgggccgctccttcttcaccgcgtccgaaggctgctctaaccctcttggcgggggccgagaagtgtggtttggcttccatcagtccgtccggccttctctctggaaaatgatgctgaatattgatggtaagcagcgccctggggtcttcactgcagggcagggttgggcatgggctggggggtcaggaccccggtcggggggtggcatgtggccagctccacgcatggcctctgtcagagccagcgccgctgcgtgacacctggctggtctcacctgcagtgttgggtgggttacggcagtggctctcaggccagcgtgaagccacgagatggtcgcaccctcagaggctgtggtcaggggctgaggcgggcctgaggatccggggcttccttgctgctggcctcctgtaggcctgggtttgactgtagcctgggtgtggcctgtccctctcttgggaggcttagtcgctgctctgtgcaggacatccgctgccctctctgtgaaaaagacgagagtgaaggccagcgaaaaggatctgtcttctcatttgggagctgattattatgaaaagctctagaaagcaatgagaatttgatcttgctcagttatacatttattgaaaaagaactacataaaaggaaatggtgaatttcagaaatatctacaccagacggtaaccagaaaatcctacaacactggcttcattctcggagggtgactttagtctttaactaatcagccagctcctttctgtcaccctgaccagagggaggccagcagctagggcctgggcttgtcactgctggcctgcccgtgtctgggcctgaggctagcctcagtagggagtgagaaccccggccgggtgtccccaccatggctggcctggcctatgaggcccctccaggactatgggcccgtccagcagccccacagtcatgcttaggcctttgcctcttttctcgcctacagtgtcagcaacagcgttttacaaggcacagccagtaatcgagtttgtttgtgaagttttggattttaaaagtattgaagaacaacaaaaacctctgacagattcccaaagggtaaagtttaccaaagaaattaaaggtaatgaactgtcccagcacacctggctgagggctgggaggccccttcccggtccgcctccgggaccgcattttgcagttctggttcttgtgcgcatttggggaggtgggggtggcagaatg

SEQ ID NO: 41179 - DNA, 2300 bp, Homo sapien
ttacaggccgggcgcggtggctcacacctgtaaccccagcactttgggaggccgaggtgggcggatcacaagatcaggagttcgagaccagcctggccagtatggtgaaaccccgtctctactaaaaatataaaaattagctaggtgcctgtaatcccacctacttgggaagctaaggcaggaaaatcgcttgaacctgggaggcgaaggttatggtgagctgatatcgtgccactgcactccaacctgggcaacagagtgagactcagtctcaaaaaaataaaaaataatctttacacatactttaagaagcaaacacatcagaaaccaggagtttaacaactatgagaatgaaaggctgattccctctgggaacaacatacacagtttgctttttaaaccctgagttcctgagaaagaagccagctccgtatgcaaagggtctcaagttgctgtcagggatgtctgttttagtgggagagcaagtggcctgcaagcagctctctctacagacgttcagtcttcttccttttgcttttgagacagggtctggctctgtcgcccaggctggaaagcaatggtgcaatcacgcttgctgtagccttcaatttccaggctcaagcgatcctcccacgtcagcctccagagtggctggtttttcattttgatgataatcttgaaatgaataagctcctttcagcctttctggatggtcagcagggcccagcaatctcagtgcccagtgatgctccttcaccttatcacgctctgacaaagggagaacgtgctgtgactgagcagagaccgagttacgatatagggctctgcataaagcgatctcatggttctaagaggggcagtggtctgtgcgttgtcactgccagcccagggtgatagacgttggttttcccaagaggagcaagtcctagaccaaatgcacatcagtcaagcacgatcaccccttgcaaactagtgtgctgtggagctgaaatgtagtcattttaaagttctgtgcttaatttgcatttgtttttacttatagttttataagaaagaaaagcataaggagtttgtgcacagttttgtctgtatatgtttatatttacacacaaggcgggcatcagggtagtttttctgaaaaggggctgagggcgtctatatggtatttgatatttaaatttgagacctgtcattgtggaaattaactgtgcacaaactctggggtaaaactagatatgggtgtgaggcctggctccacccttcctgtggtgggacctggggcacctcaactggccaagcctcaactgcctcacctgtaaaacggagagatggcaataaaaactacttcccaggggctttgtgagacttcagtgagcatgtacatccccgtccggtgcctgtgccccacggtcctgggtggtgcatctcccaccagccctagccggtgcctgtgctgctggccccatgccacatgttgagtagcgagagtttaaaattctttgtttaaggctaggtgcagtggctcatgcctgtaatcccagcaatttgggaggccgaggcaggcggatcacttgaggccaggagtacgagaccagcctggccaacatgactaaatcccgtctgtactaaaaatacaaaaaaaaaatagccaagcataggggcacacgcctatagtcacagctacttgggaggctgaagcatgagaatcactcgaacccgggagatggaggttgcagtgagccaagatcacaccattgcactccagccttgggcaacaagagcaaaactccatctccaaaacaaaggaaaaaagaaaagctcatgtcccagagagcatagagaacctactcaaagccactgtgttcggttagcatgggggtaccccggctgcagaccacgctcctcccactggtttgggggttctgtaggatctctgcagggtgcagaaattaaccttctgtgtgagagcctgcgtaaggcggtgtcccatgtccatcttctcgcatcgtgtcccagtgtcgtctttgggttttgtcttttttctgtgaagtactttttcgtgcctcacttgtggtaagagcggaatcgttctgatgctccattaccctggaggctcgtggggactctggcggctctggtccaggcctctgcacagggggcccgtgtcacatcgcccttacacacgaagctcctaaatctcctactgcaatgttagcctgcctgccttcatcccagcccctgtgtggaaagagagacgagttctcccaggcccgggagacgctgggaccgcccagcctcac

SEQ ID NO: 41180 - DNA, 2300 bp, Homo sapien
gagggaaccccgtgccccagagggcgaacccagtgactgcatgggccctggggatagagatggggcaggcagcaatggcacccctccgccagcagagggccacggtgtccgccatccaaagagaagtgacacaatgaagccctcagagacattatcttgccttctggaacgaaatccttgcaacaaagttccccaacacagcgctcaaaggagctgaaggcgggctgagggcagccagtgatgacagagccttctgggcctttgctgaggcgtgcagtcgctgacagcagggcagttgggcctcagggatttcgggccaaaacgagttttggggatatgtgaaggagacaggggcagagagagagggtgggcatctgcgaactgggaagattgatgaggttgcatggttcataaataggaaagtggtaacattcatgattatttaaaaatttccgtgaaatactacagtaaaggtacagaaaagcatataaagtaaaagtgcagtttaagggatggctgccaaagggcaccattgcaggaaggaacaggcctggcacccccaaatcccccaggggccctgctgtggtcacagccctctcacccccagctgtatccaccattctgacacttagagtaagcaccttcttgcccttctgtcaattatttactacttaatgatgcttccctaaagaatgcagtttaattttgcctgttttggaatttttgtgaatggctagattccatcctgtgaatatgagcacactgtttctccatcctgctctccgtgggtattcagtgccatgcagtccaagcggtgatgaagaatgccatgcacactcctacccaggtttcctggtgttcattactacacatttcaggagcacgttttgtatcggcaacttggtgaagactgatgtccttttgagttttcggaggaagtgctggttctcctgcccttcttcagggctgtcctccgagactgcagagaactagtgaccaccctgctggctgcggagctcctgtcagtcagaactcctgtttattctccgcccggaacagggccttgcacccatatgcagacagccgatgccacggggtgaaggaatgctccgggaaatctgggaaaaggcgaccaggcactttagattgtgggtcaacctctgccttctaatcctccatcacttaggggagaaaggaggtagccacaggctggcttttccaggaaagcctccgaaaaccagacggacccagagggaccggacagaaacgctcggaggtgcacgacggtccgagcaggcccctgactgctggaatgggcgtgtccgctgatctgatccctgataccagctacagtttactaaaaacttcttagattttctcagtgctttaaacggattatctgggttctggggccgcgccgggaggtggcggtgtggtcctgcgcgagcggccggccgcgttcaagttcaagctccgggctgggagggagcttcccgacctccgtgtttctgtagtaacttaaagagccaggctgggggccgaggggctgagggtgggagggttctgcgccccccaccggggggcggcggggaaagcgggggcgcgtggcctcccctccggctccggcggcacagccggggggcccggctcctccccgtcgggaagacgcggcttctctgggtggcagtgaagggtccccggggccgcgcccgcccccgcgccacacgggccgcgccgccctcggccctcgtccccgctcccgcccgcggttcccaccgcccggcgaggtctccgggcccctccccgggtccccgccccaggccccgccagacccggcgccgccgccgccgccgccgcggaccccgcccgcgcgcccagccccgctccccccgcgagcgcgctcccgccgccggcctcgcctcccctccccctccctcctccttcctcccccgcccctcccgctcccgctcccgccgccgcctccgcccgccgccccggccgcgtcgggtaaacctgtttggcgaggcggccgcgccggggcggatcgtgcggccggcggctccctcgcggctcgcggcgtcggggcccgtggcgcgcgcgcggccgcccctcggccccggagcccctcggcggcgccaccatgtactcgggagccggccccggtgagtcctggcgctcggggcgcccgcccggccgttcgcgcgctcctgcccgtggttggcgggcccggcgcgggcggcaggggccggggatcggggggccgcggggtcggggcggcgggggccgggggcgggcgagcc

SEQ ID NO: 41181 - DNA, 2300 bp, Homo sapien
ttggcttctttcaataaatttctaaaaaggagccagacatggtggcgcacctctatgactatagtcccagctactcgggaggctgaggaaggaggatcacttcagcccagaagtttgaatctggcctgcgcaacatagtgagaccccatctctttaaaaaaagaaaaggggacagaatgagattaatgaattatttattttcataagccaaaagaacagactttcaaaatggcttgtattacaatgaaaaaccaactttacaggtagatcggtaccaccttagaattctgacatcattatgaaacatctttcacagctggaataacataatgaatacatacaattaggatagggtatgaagcaaattgaaatcttgaaaataatatgtgtacttaaaatatattaagtaaagattcccgccccccgcccccctgagacagagtctcactctgttgcccaggctggagtgcagtggtgcgatcttggctcactgcaagctccgcctcccgggttcacgccattctcctgcctcatcatcccaagtagctgggactacaggcacccgccaccaggcccatctaatttttttttttttttttttttttgggtatttttagtagagacggggtttcaccgtgttagccaggatggtcttgatctcctgaccttgtgatccgcccgcctcggcctcccaaagtgctgggattacaggcatgagccaccgcacccgacctaagtagatttttaaataacatgaaatatacacctctgtttcttcattgtctgcttggtagaggtcattgaatccatcctaaaagaacagtattgttctaatactgcaatgcagctaggcacagtggctcacgcctgtaattccaacactgagaggccaaggcaagtggattgcttgagaccaagagtaccagaccagcctggccaacatggcaaaaccctgtctctactaaaaatacaaacattagctgtgcatagtagtgtgaccctataattccagctgctcagggggctgaggcacaagaatcgctggaatccaggaggcggtggttgtggtgagctgagatcacactactgcactccagcctgggcgacagagcgagattctgcctaaaaaaaactaatactaaaatatttacttttatgtataactaaaataattcatccaaataacagccaaaatcagtctcaatttttcctaggtagcactgcattttggttcttaactgagtctttaagcatcaacctaagtggttggaattggctacatctatagagggtttatcaactgcctgccaaggagcttccaagttgtcaagctccagaaaatagaaaaccattaggatgtctttccaaacagctttcccttctggaatgtcactgtgaatggtccctagaagcattatgacagtgcccctctaccacaataattgggcaaagggtaaagtagaaaggaacagaagctttaaacaggtgacaacctccctagaattacagaattgtctatttcttcttgatgaaacaccctgtggccccctcctcaagaagccctgttgatgtagtttgaactggtacatcctatgaagttaaacagaagaccacactgtgactctcagtgcagaaaataaaatacaggaagtcatctcttggaaatggtgtggttatagtaggatagcgccctggcttgagctttagagaaaacacattaaataaaactgttcagtttcaagtagtagaacctaatcataagaatcagctcaaaaaaggggtttctgttctacttttgttttttgtttttaaaataagctcccaatgtgtgtgtgtgtgtgtgtgtgtgtgtgtgtgtgtgtgtgtgtgtgtgtgttgttgtttttttttttttttttttttttttttgagacacagtgtcgctctgtcacccaggctggagtacagtggcacaatctcagctcactgcaacctctgcctccgaggttcaaatgactctcctgcctcagcctcccgagtagctgggattacagggatgcactaccattaccctgctaatttttgtatttttagtagagacagggtttgaccatgttggccaggctgggcctaatatctttaaactcagccccaagtcaggaatctttatgatagcattatggctagatgatgaagtggatctcaaggatattgaggggccgggctcaggaattgaggctgctgcagtttctcctgaatctatgagaattcagatgggcacttttcagtaattaaaaccatatgtcctcctcctcctttct

SEQ ID NO: 41182 - DNA, 2300 bp, Homo sapien
cagttcacaggaaacaaaattatatcaggttgttataggtaatgaggaaaatgagtcagggaacatgattaagaacagtgggatgggggcaaattagtctgaggagaggtctctgaataggtggctaaaaccagaattggctctaggccagcataagctttggtgcatggtaaagccctcagttggaggtcactgccactggtgttagcagcagctttatgcccttcttcattaaggcagtagacacctgtcacctgatagacttgggcttctgaacaggcttttaatgaactttgcagccatatgaagctgtggtgacaagtgcaaaacatctgcttcgtaacaccatgagctacgtgcagggttgtagagacttttcagcagtttggataacagggcagctggggaagggaagcagaggtgcagagtttgagtggctctcccaaaatcctgctgcagcagggccaattcatgtgctttactcctaaaggcacgtgctttatatgaaaggaagcagtgagggtgctagggctgttgtgtggaaagacagctttagttgcattcattttctgaggagagtatcacaaagttgagcgtgttaaactatggaatcaaaagagaaatgattgcaaatggccatttgtgtggcttctgttgccttagctgttagagtagattcctcccctgcttagtcttttttgttgcaagtgtgttagcagcttccttccgtccccaaattttctttcacagggtgttttgataagccatcttacacagaagcagagctataggcctacagatgccaatttactgttcttagtatttgctgaaaacagattaagagggagaatacagaaataaaagaatgtatgatttggagtctattaaaacttttttaatcttttaagtattcttataaacgtataagaataatatagattatctgcctgtcatataggacttaggaatagtttacagataataactgtcttaaagagaattgatttattggtgttataatctgcttccccaacttttttttttactgtaatcacttttaatgatgattacataataagaagtgaattcttccacttgtagatttgatctcagtcattaccatagatgtggaatgattgatatcccagtgactgtaaaccatatatattctctatttgctttgaattctgtacctttaatatctgaatgcagtaataaggcgtcacagaagaaagaacttgtagcttttcgtttcattggtgttaaacaaggatgctaggtcaaagtatcaaaatagagctccttggaaatgatgcatcacaaagtcctgtccctgctttactgactcacaagaatggcccagcagttaaaatccttatacatggagcagctgaagattttcgtttttctagaaagagaaaaaagacaaggctgaagtgattttttcagtataggtgttaccacatgagtgactgttttcttcagatgggtatttttaaatttcccattaatatagtggtggacttttaagttggtgtattacccaaaaagagtaggtagatacattggaacttcttgacgtgatctcaaaaaacctcattgtaatatgctgcttattctcctttttttctttgtagatctgcccttttgacattaatgcctaaaatatctgagtttaaaagttaggaaacaaattcctgttgcatttctcaaccctgagcaaatggaatgaattagcacagttaatctcaaaaattaggtaccatttattttctaaaggttccgttcagattatgctgtcaagtctaattgttaataaaatcagataccgtgttttatagataccagtcttatttggagaaagcccagtagacaactgtagttttaaacatgtatttggtgtagttgaggaagagctttgcggttggtagattggttaatttgaagcatatacatagttgtttcatgtcgttctgttttttacaagggctttctgtgttagccctgtttgctctccgataaacaagtctgtgtattataacgtattggacaatgatgtcacttttatttccataaatgactcatgtgtgagcaaaatttgagtaatagtgttttaagaatatttcagcgtagtagaggatttaagcagatcgctttgcctactttaattatatgaaataccaggaggtcagatgtttaacctctttcaacatatctgtttcttttcctgcagaaacagatgattatgctgagattatagatgaagaagatacttacaccatgccctcaagtaagtaaac

SEQ ID NO: 41183 - DNA, 2300 bp, Homo sapien
agtggagcttgcaggattggaagctgctgtgggtgagtcagtgagtgaaggatgaatgtgaagatctacgacattactgtgcactgctgtagactataaacactgtacacaccatatacttaaatttatttttaaaacctttttcagtagtaaacattagcttacagtaacttttatattttataaactgatttttttcggcttttttgactcttgtaataacaattaattttaaatatattgtacagctgtacaaaaaattttctttttttacatacttattctgtaagcttttttctagttttaaaatgattttctgtgttttttactttttcagcttttttgttaaaaagtaagacacaaacatacacgctagcctaggcctacacagggtcaagagtatccatatcaccatcttctacctccacatcttgtcccactgggaggtcttcaggggccgtaacacacatgaaactgtcatctcctatgagaacagtgccactttctggaatactttctagaagccctgcctgaggctgttttacatttaactttttttttttaaataagtagaagtacattctaattaaaaaaaaaatagtaaatacataaaccagtaacatagtcattatccagtattatgtgctgtacataatcgtatgtgctatacttttataagactggcagcacagtagattttttttacaccagcttcaccataaacatgagcattacaacttcaggatggctacggcatacctagcaataggaattcttagctctattatataaatcttatggaaccaccattgtatatgcggaccatcattgaccaaaatgttgttatgtggtgcattgactatatatactgtaaactgagttaatttccacactgtgttgtccatgatattctctgggtagaaattattatgtgattataatagttattattatatgattataataattataacagcagcagtacctgatactgggcacatgctacctgtggttctttacgcagaagccaagagaagctgtgtcattgtcacaaccaaggaagtagatactttgatatactttggttaaccccattctgtagctgaggaaactgaggcatgagaggttggccacatcaagtaattgacaagagatggggttcatacccaaacagtctggatccaaagcctgtgttcttaatcaacaggcaacagtgatttaaaacaagtggcatgagaaagagccatttggcaaatactacctaatgtggtcctttctgcaagatggacaaaatacactcgtgtatgaaaggatctggacagtctggtggcacacacggttgtgctggtgtgtaaagcatgttttttgaagctcatctgtttccatcagcacaccaggattctttggtctgttaacggccagttctctgggtagctttatttgcagcactcctcacttaggctgatgcctcgtcactcttctgccctgtgattctgtgagtttggtgacatctgagggctctaggaactcttgttgattctggagattaagcaaatattaccaaacaatatcaaattttatattggaaagagaatgatttctaagcccttgggcgaacatgctatatgtgctaaaaataatgaaattttattaattttcttttacattagaaattatgatggatggttgataaaaaatttactccacattagtttctgatagaagtcatactttaacttactgattgtctaaattcttcccttaactggagtatgccagaggggccagacactctgaaggaaaatacttttttcatctcttttgattctagaaagtgagccccagtttaagtgatttttctgttttcatctgggtttgcatttgtcacatattctaggaataatgtccttaaatatcagatttcctttctcaaatctcatgacaaatcttgtttcattcccactcttctctgttttcaagtgtatagagatgtctgatgtcatagcacagctgtcctttgcttactgggaagaacaatgaagtctgttttcttgatcttttctccgttagcctctgacagtgacggcaccatccctaaccattgcggagaatatggctgacctaatagatgggtactgccggctggtgaatggaacctcgcagtcatttatcatcagacctcagaaaggtgaggtgctgtttctgagcattcccaattgcgcttctaccaaatatttagctgtgcttgcccctaacagcctgttatcctcttttaggtaactgtaaaaatgaagaccaaa

SEQ ID NO: 41184 - DNA, 2300 bp, Homo sapien
tcacatccttgcctacacttggtatatctttttaattaattgtctggattgtctcttgcattcttttctatcatttcccccctcattttaaaagaatttctgtatatatatagggtattagctttttactgtgatacatggtacatatgtttttcttttgtgtttttggcatcttttgacttggtttataatttttttccttttactgtgctgttataccatttttttttttaactaattggagaatgatttggatgaaaaaggtattatttatgctttgtttgataccaacagagggttggctcttttctttgctggacagatagtggggagttgacagggtctggctctgtcgccctggctggaaagcagtggcacgatctcggctcactgtagccttcccctcttgggctcaagtgatcctcccccctcagcctcccaagtagctgggaccacaagcatgcgccacgactcctggctctttattgtaatttttttgtagagatgggttttgccaagttggctaggctggtcttgaacctttgggctcaagcaatctgcctgcctcagcctcccaaagtgttgggattataggcatgagcatctatgcctggctggatctgtggttttgtgtgtgtgtgtgtttgttcgtttgtttgttttgagacagtctcactctgtggtccaggctgaagtgcagcaatgcagtcacagctcactatagcctcaacctcctgggctcaagctatcctcccaccttagcctcctgagtagctgggactacaggaacacgctaccacgcccaagctaatttttgtattttttagtagagacaaggtcttgtcatgttgcccagactggtctcaaactcctggactcaagcagtcttcccgcctcagccttccaaagtgctgggattacaggcatgagcagccatacctggcctgccacgatggatctgagcaggaattgtactccaggtttacaaagctccctttgcttctgcacccagctgttctcactgcaagcctggggatgtcctaacactattctggtttattcctgaagtcttattcctgtttcctaaaccctttcactgttttgagaggctccttctcagcttgggttcaggattccgtaactgtcttcaggagacaacctgcagagtgtttgacacagtctccacccttccttctcaccagaatccaagatttgatcccttgctgccgaaagctctgctggtttctctcccattcgtagccttttcttgtctcttcaggctctgaagggctcagaattggcaaatgccctgtgggaaaaagcagccagctgttaagtatcatttcctgtcttcatctgtgtcactcattgtcttggttgcctcagaatatctttgtctctgagcccttcaaacattgtttgagttaaaaagatttttaatctggattttcatgtttctcgatgggtgtttaggcttgtgcaggctatttcttcaaactcaaatagaagtcctttatcgcacttaaaaattttaattgtgcatgcttttttcgttttgttttcagttgctgtctgtctgattctcctgttaacaatgaattggttaagccagggaccttattttaattatagtgtttttaatcaccaatgcctagtatatataatgaatactcattgaatttgtattatatgaagaaagaacttttctcttaggtaaaagttttcaaaagcagggagcaaattaacaaatttggctttgctatgagattttccaacaaatttaaaggctatgattaaaaaaggggtgggggtgggggtattacattgtttgtagatactttttgacacagctgaaattggagtcctggccttttaataatttttttttaacaaatatttattctgtaaatcaggtcctactctgggtatggggagagacagctattattttagtggattaggtctctattctcctcagactccttccgcatataacatatcaagagagagtataggacatttgatataaacaacatatcacattgtaattggtagatttcaagtattatacacaaaaaattattttgttcttttaacagaatatgacagatacctagcatctagcaaaataatggcagctgcttaccttgaccccaacttgaatcacacaccaaattcgagtactaagactcacctgggtactggtatggaacgttctcctggtgcaatggagcgagtattaaaggtctttcattattttgaaagcaatagtgagccaaccacctgggccagtattatca

SEQ ID NO: 41185 - DNA, 2300 bp, Homo sapien
tcctcgtgaggctagcttgggcttaaggggggaaaatgaaagcagcatggcctcttgaggcctaggcttggaatttgtacaatgtcacttgtgacacatcccattggtcaaagcaagttacaagatcccatccacattcaaggggtgaataaattccacctcttcttgggaaaagtgtcaaagaattgatggccatttttagtctactatgctaagtgcagccccttcccccaaagttatccttaatgcagtccctttgtgcctccactctcctcttttaattcccatgcttttcttatccttttaataataagctctcacttcacatcacccaaagcttcgttcattcacttgacaaatacttactgtgtgccaggacctattagtgaacaaaacaaagcccgtgctctaatgaatctaagattctagtggagagagcggacaatcaagaaataaacaagaacacagtgttgggctatggtgaacaataggtgctttggagaacaacagagcagactaagtgcggactgtgtgtgaggatagcagggcagtgggtggttcctattatatgaagtggtcggctgtatcaatgaggtgatatataagcagggtattgaacgaagtgaggagcaagaagttccaggcagagcaaatagcacgcgcaaaggcctgaggctggcatggagaggcaattccttacaatttcatatgtagtaaaaagtaacaaaacccagaaaaacaccaaccttaatacatctcattaaagaacaatacaacccaaacatttaaatatggtaaaatcttgataagcaaaagctttttattttacttcatttttacttttataaaagctcctaatgcaatgacgtgtgtcacctctctgggcttcagggtgttcacctttcaaaaggcctcggtgcctgtctgtcctgcttcctggcttgtggttagcatcaaaatgacaccataaaaatgaaagttgcagccttgagggttcttctggtttcatttccgaccacaaggttgccagagtgacttttttttttttttaaataacacaaatcagttatcacttcctgcttaaagccctccaaaggttccctgttgcctaaagaataaactccaggcacctaagcaagccccacgcagccgtctgcatttttcaatccctccaacctcgccttttgctatttcccccaccccacctacggcacgttccggtcataaccaactagctcctcgctgaaactggctcacaccgcggaagcccgggtcggtgtcggggcgagccttccctccttttcctggagcccgtctcaggtctgtagccctcgggagggattgcagggctcgttccctgctggcgttcatttaggtaacctgtctacctccagtggacttctaagtccctttcatgatttttcatcttccaaaatcaaataatggcccagcccaacttagctataatgccatgaaaagaatctctgagcctcagtttccttgtctgcaaaaagggcccaggaaccgctcgttagggtcggtgtggtgcctggagagtgcactgcaaggcccggggcccgcagcgggtgcccgacagcgggcgtccaactctgggggcggggccgcagggccgctcaggagggaggttctccagaggggaccccttcgggatttgggggcagggaaggagatggggaggactttcccgaagtccgtctaatcccgctggcggagagcgaggcaggtgggaccccaggatgtccgctcggcggggcgaccccggccacccccgagaccagggctttcctcgtccggccgccacgcccgcgcgcagcctcgggccaccccgaaaccccggcgcggtcactacaggacaaattacgcgagcagagcctagcggcgcgctgggcatgcgcgggggcggcgcgcatgcccagtccccccgagaggcgggaactccggactgagaccgggtcgggcgtgcgctgccgagagaggacgcgcgcctcagccggctgccgcgcacgcgcgcgggcccgcgccgacgcagcacggcctcgagggcgcgagcccgcgccgccgccgccgccgccggtcccggaccactgtgagcccgcggcgtgaggcgtgggaggaagcgcggctgctgtcgcccagcgccgccccgtcgtcgtctgccttcgcttcacggcgccgagccgcggtccgagtgagtgcggggcgccgggcgcggggcgcgggtcgggggctgggcgggctccttctgtgcagcggtcgtgggctgggccgcggccctgagg

SEQ ID NO: 41186 - DNA, 2300 bp, Homo sapien
cctcagaggtcatctggcccaattatctggttttaaggaggaggaaaagggggcataaaggagtggattgcaagctctgtgcactgctggagctctcttccttaaagcatttggcctcttggtgataaagggacagcagagacctgctctcgcgtgagccttactgggtcctggtggcaagagctgccatgtgtttacctcccttggatcttgaccactgcccctcaggaagtcacggcttagggctgttgagctcacctgtcacacagcaacacacaggagccagactcaggccctgtgtgccctcagggagtggctcatggctccagcccgggttgagagcgcctctcctgcatgctggggactctaggtgacggattcaggctgtgtgctttgcagaggctgctaaaaatgaggccaccaaggctgggtgtggtggctcatgcctgtaatcccagcactttgggaggccaaggcgggtggatcacctaaggtcaggagtttgagaccagcttggccaacatggtgaaaccccatctctactaaaaatacaaaaagtagccaggtgtggtggtgggcgcctgtaatcccagctactctggaggctgaggcaggagaatcgcttgaacctgggaggcagaggttgcagtgagctgagatcatgccactgcactccagcctgggctacaagagcaaaactctgtctcaaaaacaaacagaaaaacaacaacaaaaaaccgaggccaccgtcgagagagacaggcaattgttcatgaaatcggtctttcttttgaagtcagagactataacaactgtggcctcagctcaccgatgagagccaccgatggtaggcagcctccaggcctgggggagaaccagcagatcctcaccatctttaggttaataagtgaaataaaacctgtgagtcaggctgcagtcacggcctcacccggctcagggaaggagggagaaattcctcagggctcccttttctgatgttgccttgctttgtacttactgttccttttcctgttcagctgatgacagatgtttgacattaagcattttagagttttgttttttagaaaatagaatcatagattatcagaagtggaagtccctttggaataatttcccctgggttacacagatggctatggcagggtcaagggaggggacggtcagcggggactgagcgcaggccccctccaggctctgcagcaatgaccaggcagcaagccggcctcccgggcttgtgggctgtcctctttctctggggtcagcctgaggctggaagaggcccgtggcccaccgggcatcaggccaagcctggagctgaccagggaagggccctgccaggccttgggcctctgaccctcagtcctgaagcctccctctagcggcgcccaccctgctccttttcctgctgaattttactcaagtccgtacttgagtatggccggccctaggttaaccccgcagagttattaaccaggagtggctctttccacccccccttcccgccggcccttcctgctgtccacacccggccaactccactgtcctggcaagggagggcttcctggaggcggcagcgggcggcgcgtccggcctttgtccccccacgctctccagggtaggtccagggactgccagatcaggggaccctttgcgtcctggagccttgggggctggatgacgtcgccgggcacctgaggaccccgcccattcctccctcggttccccagggagcgggcggccggcggggctgggcggggccgaaggaaggggccgcttgctccgacgccgcgcacgcgccagggcccgcaggcgggttaggaaatgacgaccgcgcgcgggtctccagcagcacccgccctaggaccggccccgcccccaagtcccggtccctagggccgggcacgccactccaggccccgcccagaacctccccgcccagtcaagccccgcccccaaactctgtctccccgcggtatcctctggggctctccaggccccgcctcggctcgggccccgcccctccaggccccgcctccagccccgccccgcagacggcgctcgcagcgcccccggcccccaggcggcgcggctggtccccaggggtctgcgggcgactgcgcggctgaggcgcccgagtgcggtactggcggcgggcggcgggcagccatggcggaggccgcgtcgccgcacttgtcgctgccctcggggctgctggagctctgcgcgctgctgggcgccccccgggacagtctccgaagtctcgagcaggtgaggggcgg

SEQ ID NO: 41187 - DNA, 2300 bp, Homo sapien
ataagagaaaggcatatttaatcaaatttagcccattaacatagctcatgatatatactagatttttgtgtagaaaatatgaggctatgtgtgcatttattttattttattattattattattttttgagacagggtcttgctctgttgcccaggcttccgtgcagtggtgtgatctcggctcactgcggcctcaacctcctgggctcaagggatcctcctgcctcagcctcccaagtagctgggaccataggcatgtgctaccacacctggctaatttcttttaaattttttgtagagacagggtctcactgtgttgttcaggctggtctcaaactcctgggctcaagcagtctgcctgccttgacctctcaaagtgctgggattacaggtatgagtcactgcacccggcctatgtgtgcattttaaagagggtcatttaattaatgatgacactgtcttagtgaactcaaaacatatttatgtgttttcaaagaggtatacaaattccgaaattcttttatcaatctttacagatgattccttgttttctaggaagccgacggtttagttctgataaatattgatcatgggagcatcacctactccaagtccacggacgataacgtggacattcctgatgtccccctcctggcagcccagacgtttattcagaggtaacgggaaacattaatggtatgaatttcagaccgtctttgttcagattctgtatttgccacttcgagtatcttttccaattttatataactgatagatgttttatatattatagtttggaaattatttgtgaattttgttttctgagattgagtctcactcttgttgttcaggctggagtgcagtggcgcaatctcggctcactgcaacctctgcctcccacgttcaagcgattctcctgcctcagcctcccaagtagctgggattacaggcgcccaccaccatgcctggctaatttttgtattttcagttttcaccatgttggccaggctggtcttaaactcctgacctcaagtgatctgcccaccttggcttcccaaagtgctgggattacaggtgtgagccaccgcacctggccatgaatattttgaaatgaaagtgatttgtctttattccaatcttgtctgaatgttacttcaagtcaagagacagtcacatcctgtctcttgagaggaaacctactcaacctctgtgctgtgccccaggatcctgtgcctgtgatccttgaagttccctatccattcattcattcattcactcattcattcattcattcattcactagatgtgtattgcatacccgtcgtatacccggaattgggcagtgcctgtgtactaatgacaggacagccatggcccctgccccttgagtttgtctgctgggttctgatgggcatgacgcattctgtccgagctagaagttgtccatttctttcactcccgccactgtattggcactttatcttttctttttctttccttttttttttttttttttgagatggagtctcgcactgttgcccaggctggagtgcagtggcgcaattttggctcactgcaacctctgccttctgggttcaagcgattctcctgcctcagcctcccgagtagctgggattgcacctccacgtctggctaattttttgtatttttagtggagatgggtttcactatgttggccaggctggtcttgaactcctgaccttgtaatctgcctacctcagcctcccaaagtgctaggattacaggcatgaaccactgtgcccggcctggcacttaattttttcacaccgttttatagtttatgttttctttcatctctgttactcaacctcattggcttagatcaggcgtcagcaaactttttccaacaagtgtcaaataatatttcatgctttggggctctgaggtctctgtcgaggtgcaaaggcttggcagggactttggtcaggggagggtgagaggaggtgtaattgctaattacgtcaggacggaggtgttgggtgtgccccaagcagtgactcagcttcagtgccagggctccctcggggttgctctgcggagctcatttttcccttcagcattttataaaatgatagcaggaggagagatcctgctcttgagtcctcacaacctgtgggtccaactgcagccaggccctgagtgcggtcgtggaggtgacgctggagggaggggagcgcttaggctttttgcaaacagccgggctgtacttgcttctggtgaagcctgtgatgcagtctggatttcagtcagccatcacct

SEQ ID NO: 41188 - DNA, 2300 bp, Homo sapien
cgtgagccctacctgatgtgtctaagccaggctctgtgctgacttcgccagagatgactccacagaccaagatactttgaccgtggcatttgaatacatggtatttttaggtcccggttggtttccctgaaatgaaactcactctgagcttcctgttgtgacgggcgaggagttcaggcggcttcccctccaggagcatctcgaaggcctgcagagagcgtgcaaagcagccgtggggaatggggaaaccgccttttcctgtggctgccgattctggaaggggtggccgagaagctggtagccgagcagggcttttgcaagccttgtgagattgcagggacaagaggtggggtcaggccccatcaagaagggggagtcttgttattcccattagcttggggctgggtctccgacaggttcctaggagttaggagaaccagccctgaggccaggccacaggtcagctcaggctctgcccatggggagcgtgcctctcagagacggcagtgtctcacccatgggagcaacagaccactggaatcgcaccccagaaagaccgggaggcctgcccttctggactcaggacggaggcagcactgcagggcggggggtcgcttgaatatcctcaggggaaaggtgaaacctcgccccttcacactgccctgcggtcaggcccaagggggccgaaacctcaacgcggtggtaaaaggcaaatgtgaacaatgaaagcaagcagacttctaggtgatagggtagaagaatattttcatgactttatggtaaagaaaaaaatgcataaattatatataaaataccataaaggaaaagaatgttgaatttgactatattaaaagcaatgactttattatttttattttttctgagacagggtctgactctgtcacccaggtgcagtggcgcgatcacacctcactgcaacctctgcctcctgggctctagcgatcctccgccctcggcctcctgattagctggactgcaggtgcacaccactatgcccagccaatttttgtattttttttttttttttttgtagagatggagttttgccgtattgctcaggctggtcttgaactcctgagcttgagcagtctgccggttttggactccaaagcgctgggttagaggcgtgagccaccacaactggccaaaagcaatgattttaaaaagaagacactttttttttcctcctttcaaatgagctggtttaattcacggtgacacaaaattgagggtagaagaccaaagagcgccctctggcaggctcaggtgggaatgacgggtgagaagccactgaagacgtccggtgacactgtcagttttttgttttgtttttttttttttttaatttaaaaaaaaaaagaaaagtttatgcttgaaagtgcaacaggctccagggcaacgctcactctagctgaagatggcaaaagctgtcctggcgggggtgcaggtgttgaaacaggagtggagtccaggccgccaccgcccaggcagagggagcagcgtgctttccgccaggggtcttagttccagctgtggctgggcctccctgcggcctgtgctttcggccccttgaggttctggtctgttttgctttctgctggaagcctcatcatctctgtccctctcctgggcctgcttcttgggctgtctcagaggcttcttgccatcttcatggccggacacggcgcctacagcctcttccccagaccctgccacaggaaatggacagaagacacttttgagagggtgaaaatgtaagctgcagactgggaaggatctttaaaatgggtgctgctaaaatcattgcttttaatgtagtcagattcaccagtcttttgctttatggtatttttatatgtcatacgtaatttatgaatacagcaccatggagtcagttaggggctcatatccagaacaccggaacagctggccgggcgtgcctgtggtcccagtgaggtgggagggtggccagagccctggactcggagcctgtggtttgctgtgatcgcacctgtgaacactgctgcactccagcccgggcaacatggcaagacctcgtctattaaaaagtaaaaaaaaataaaaataaaaaaaaataacagccacaaactagggagaacgaaaaacagacacttcccacaagagggcatggggatggccagttcaagccatcaggctcattagcaattagagaaatgcaattaaaccacaatttaaaagccaaaagctccacacccttagaatggccgaaattaaaaagatggacggacgccagcaag

SEQ ID NO: 41189 - DNA, 2300 bp, Homo sapien
cctggtggcacagtggttactgggtctcttttggagcaaaagaggagacagctgcctctgcagtgacttcagtgttatccacctgtccccacgtgccaggtggcagagaccagggcccagcaaaactcagtgtccactcgtcacacattattcctctcacttagagcaagcttgtccaacctgtggcctgcaggctgtacgtggcccaggacggctttgaatgaggcccaacacaaatttgtaaactttcttaaaacatatgttgagttttttttgcaatctttttccttctagctcatcagcgatcgttaatgttagtgtattttatgtgtggcccaagacaattcttcttccactgtggctcagggaagccacaagagtgcacacccctgatttaaagcaagtttgaattgtttctgataattttaaaacaagtgcaactgttaatacatttttagtagtgtgtccttggcagtgccatggtgtgtcgcttcttccatgaccatggtatcttgagtgtggaagctgggattcctgccctgctcatccctccaggcccccagcggcccctcctgcctgcagaccatcatttcttggggattttccctgtttgcccgtcagcgctgtgagctgcccctccctgcggatctgtgtgcgcttccctgtcgcccgagaggccgctgagtagctccccgtgctctgagaccccacactcccccgcaccgtggcctgcgcgccctttgtccatgtttctcctgttcttgctcatggatttgcagatgacgttcacatttaaattgcattttatagttttcaaaatattttcgcatctacactctcctcctatctggtcaccctccaagcagccaccccatcatgggatctgctgagaaatcctcatgccttactccttgagcatgataggatttttttttttttacatgtttaatgtgaaaagaacactccagtggagtatatacctaagtatatattaggcattggctggtaccatttttttttttttgacagggtccctctcccattgcccgtggctggagtgtagtggcacaatcgctgcttactgcagcctggacctcccgagtagctggggctatataggtgcgcaccaccacacccggctaatttttgtattttgagtagagatggggtttcaccgtgctgctcaggctggtctcaaactcctgggctcaagcagtcctcccgcctcggccccgccaaagtgctgggattacaggtgtgagccactgcgcccggccatggtatcagttttgatggctgtgttcccttgtctaaaaataatgtgggaaaatccgtggcacagtatgtgcttgcaaaactgctataaaacaaatactgtgaactcaaatacataccaccaagagggtgggaccactcttgagatacctgaatagcaaactttacatgttagaaggtaataagagcctgctaaatcatttccccccatattcaaatcatgagcctcagatgataaagtaataggatccatgatacagtaaaaatattgacaaaagtctagtaatgctttaaaccaaacaacaaaaaaaggaaaaattagggaaattatttttctaaatttaatttttttcagttcgttcttagttataagcatttcaaggctgggcgcagtggctcacgcctgtaatcccagcactttggggggccgaagcaggaggattgcttgagtctaggagttcgagaccagcctgggcaacgtggggaaaccctatctctactaaaactgccaaacatcagccaggcgtggtggcatcagccaggcgtggtggcatcagccaggcgtggtggcccatggctgtagtcccggctactcgggggtctgaagcgggagaatcgcttgagccgggaggctgaggctgcagtgagccatgatcatgccactgcactccagcctgggtggcagagtgagactctgtctcaaaataaacaaacaaacaaaaataaaaattctgatttcaaagagtctaaaagcaatcattatgttgactttgcttagcttagacagaaaccctgagcgcactctctagacactgggagcactgccagttctgcttgttcacatacagtcggtctcatcatttggagattccgtatttgcaaattcgaccacctgctaatatttacttgtaactcccaaaacagatactcgtggtattttcttggtgatccacagacatccacgtgcacagacgggggaaaaacttgagtcacctgatatggattttctgggccaacaagtgtcc

SEQ ID NO: 41190 - DNA, 2300 bp, Homo sapien
gactgtttggcttgtgggtgggcagaaggcacagcgggtagggttcccaagtcttgtgcccacaggggccaggcggggcgtacagagtgaagtggatctagaacgaggaaagctgggtggtgtcctcggtctgcttctgctcacgggtgcggagaacccatgacaccagtgtgggccaagcgtggtgatgaaggcaccacacccggccttcctgctgagcttgctgtgggcactgtggcatggggcagccccgagagggcacagcctcccagaggtgcaccagccatggtgtcagaagcctggactcgcctgataatcgcctgagtgctcagtgttggccttgggctgcctgttcgctgctgtttcccacagtgggagcagcactggacacggggcatccagggagacgggaggaggaggtggggtctccttgagcagaggctcatggtggggaaagtgcacaaggctgcccacttggtccaggcagccccagccctgggtgaggggccacactccccactcctttttcccctgacttagtgtcgggggcgcctgtgtcaggccctgttggggtgggtagggaggtgctagtctggaagcaaagctggctcaggaggttcaggggtggcgcagggtgcaggctcgagcccagccccgcccacagccgcctgcacctgcagccagcccatgtcacccgagagctctgaggatcgtgctggctccctggtcccttgtgtgaacggggaccgctgacgaggttccatttcagttcatggtcatgtcatggctctatgacaacacctcattgagcctgcggcccgcggtggtgggagaggtgggcgtcccgagaaacccgccttttcctgccgagtcagttacatttgagccaagcctggctgtggctgcattcatagcatgtttgcatgttattatcatgtttgcaggttacgtttgcaggttattatgtttgcatgttattatcatgtttgcaggttatccgtgttgagcacattttctctcatggcgacttggttctctcttgggttaaaatgtgcacagtgttttcaggggcccaagttaaaggtgtgtgtgtgtgttttgtgcccccagcaacgtgtactcgtgcagcatggacggcatggtgctggtgtggaatgtgagcacactgcaggtgaccagccgcttccagctgccgcgaggtggcctgacgtccatcagactgcacggcggccgcctgtggtgctgtaagtccggcccctgccatcagagcgggcaccctacctccctgctctgggaaaaggatgctgaacgagagcagaaagcctctttcctttgcttcacgcctttccagtctttattttaaactcgggttccctttctgtggtcgcagcaacctttactccacctgcactgctgctcctgggggctccccaggcctccctctgcctttctacccagcggctgacgggatgcctgtcttgcctggacgcaccactgctctcctgtccctcaccttggcttttgctgtgccctgctctggggttgaagctggcccatgtgtcccccggagtcatggctgctcctcctgggaggcctctgtgtgcgtcacgtctccacacctgggggcagctggcgagcccgtgctctgttcccctcggctgcttggcacagagctgcagcctgggactctccgtggacccagactggggattttgccaggggggcgatgggaggagcaggtgctttgcctggcggctgtgtctgcatttctggacgccccagagcacagaagttgccggcactttgaggtcttcctcggcatgtgccagattacatgagtgacggctgggaatatgttttcttttttgtaatggaggcgtgtttcacatatagtaaagctcaccaaaaagtgctcagtttgttgtgttttgacaaacatctaaactacataaccatgaaacaaatcaagacacgcagcgtttccgtcacagctgaaagcgtctgtgcccctttccaggccgtgccgccattcaggggatacaagtgctcttagttctgtcatctgaatttggtttttacagaactttctacaaatggactctacagtaggccttcttctgtatctggctttattcagacagcaggatgtttatagtattcatcgctgacgttctgagtatcaatatcaatagctcgttccttcttgcagggtaatagtccattgtgtgcatatggaacatgctcatccttcccctgccccaagtgggcactgggttcactctgcttaactgtttgaaaaa

SEQ ID NO: 41191 - DNA, 2300 bp, Homo sapien
cggccggactgtccccagacacagcgtgcgctcgggcagcaaggccgggcggcagaggcagcactggcctgggcgctgctcctggcggccccccagccaccagggccctacctcccccgctgcttaccccatcctggagctgggcacgcttggggcttcagaccttcacgtggccaccggagctgctgtctcaggacccctctccggcacagctgtttgtctccaatacaaggactgtcctgtgagtgtgcagggccctgttggccgtgctgggaaccctcggcacccatgggtctttgcggccgcttccctctctgccttctgtcctgagaggctttctgatggaagggcggggacttcaggagcggccctcccttgttgagatggggtgctctgacagcacctttaactttaaagacctccagggcccagccctgacagccacagtgggtcttatttgagtcggtgatgcagaaacagaggcctgtgcttcttcagcttctgggaaacctacttccaagagtctactcaccgggccggctgtgttgtggaaaatagtctaatgcggcctctgacatgtaattcatttaccgagagtaagtagacttgcagagaactttcttatcatcgtgtaatggtgctgtggtgttgtccttccagcattttgaactcactgcccatggatgtcatcagagcaccacggcctcgggagtgcaggcagggatctagtgtccagcgctgagctgtgcgcaccatgttctcctttaatctccataatgcccacctttcccagcgtgcccctttacatgcagggcagcacgttcaaagcccaagctgctccaaagtcccgcagccagagtggggtgggctgcaagctcagagccgagcatttctgcttggaggccttgtggcccctgctgttggccaggctttggctgtgagggaggtgcaggtagggaagtcaggctcatcacccagtgggtctgttgtcagggcccacctggcacgcactggagtggcagcagggtctctgccatgggtgcaggccgtggtctgcgggtgccgtcacctgccacgtgcttgttgagagcctcctaggatgcggtcctggatggtcccactgccttgaagcttgtggccttgacaagggagtgcctggacaccaggggagctgcccctacccggggaaggcactggctggaccctccccagtggccgtggctgaggttctgagcgggatgtgagcctggtgttttctagaagaggaggtagggtggggtgggcggttggagtctggtgtggagagggaagcggtctggcatgggctgtccagccagtgggtagggtagggtgttgtgggctgcaggcatgaggcaggactttgagggccctggacgccacggcaggtgcaagcagtgggttttaggtggtcactctgactgcaggtggcgggtgggttacggaggatgagggaggaaccaggggtcagttggaagcctgctatgctcacaaaactctgctcctgagagtgcagctcttttaagggcactaagcagttattgaatgtcaggtaaggggggaaggtaaagtacttcaggcagaggcagcagtgtcttcgaaggtcccatgggcgggaggagccgatggggagacaagtgtacggcggggatgtgcagccgaggaggcagcggcacctggcgccaggtgggctgtggggcgggtggtgttggtgcccggggtcctgacagcatgagtggtgggtgacagagccttttctctgagttaggggaccccagaggaggtctagatatgaagcggcacatccagagatgggtttgggatgtattgaattagaactttcctttctctcttccaaggcctggggtagctgttggcttctggaactgattgacccctgagcttagccagggctgcaggacatggcctgacctgcattttgtgctcttcaggaagcttccggaatctcaggccaaaggccatacggttgtttatacagctacgataacatcactgtgtcatcacaaagatgtttgcttgttgcaacatctgttttaaagagccgagaatgggtggctgtgctgatagggcagagaggagcccatgctccagctgcggggagtgcctgcccgaggagctggccagtgaagacaggtgcctgccagtgaagacaggtgcccacaagctggacacagggtcggccctgagacaggacagcagctgcggaatgttcccgctggctttctggagcgccagcgtcctgcttgggtctggccaggggc

SEQ ID NO: 41192 - DNA, 2300 bp, Homo sapien
tgaactcctgacctcaagtgatctgcccgccttggcttcccaaagtgctggggttacaggtgtgagccactcctggcctcacttctatttttcaaaccgagggtgatgcttaacccaagagtaggtgctgtcaggccgaaacatctgttctggtccttggctggctttcccaaggccctgagtgtcctagggccttgtgacttcctctgtgaactggaaaacagcccccaactccagtccctgcctggctaggcttgcctgagcagagcagaggtgagaggcaggaaagatccagcagcctcagagctgtgaacggtgccagccccgtgattgacatgtcagccgcactaatagtatcgcttcatctctccagactctccctttcccggtttgtccactgttctgtttggaaataaggttgtgcccttagtcataccttgataagaagggagacgcccctgcctgccctctctcttctgttccacctcctctgccgaacgttcaggagctcctcattcaaaagaccgtcagatgaaatgtttgctagagataacactgtgaagcatttagaaacaccttgcaccagcctacttcttaaatacttgttaaaaacgagatcacaccccaaatagagtttcatagaatataccttttttatttttcattattttttgagatggagtctcactctgttgcccaagctggagtgcagtggcgcaatctcagctcactgcaacctctgcctccagatttcaagtgattctcctgcctcagcctcccaagtagctggaattacacgcatgtgccaccacacctggctaatttttgtatttttagtaaagacatgttttcaccatgttggtcaggctggtcttgaactcctgacctcaagtgatctgcccaccttggcctcccaaagtgctaggattacaagcatgagccaccgtgcctggcctcttttttaaatccagtttttattcagcagaatgttccgaaagatccagagggtaacatgtgggcaaagtccctgagccctggctggggtggcctgggtggggttgccttcctccgacacccaactcatgtgggccctgggcgcccagcaccgggttccttccccccaaacccatctcatctggactctgggcacccagcgccgggttccttcccccaggccttgagcctggctttgcagctcctgctgccccagggcaggtggtggtggccgcccagccctcacccagccccgagtcctgtgtggaaggcgattcctcccactttaccggggaggacacagaggctgagcgtggtcacggccggagccccagcgcagcatctgagctgcaggctggccgccccccaccccgctgcacccccatattccactcacagaccttcttcctgctgaacacagctgggccctgacgcctctgtgccttggccacaaggcaccttctgctcactcagctgtccctccagtccccgtagggctgcagacccaggcccacccagtcacaggcctggcagcgagggggaacaaaagggtcaaggggccgcccagggctgggaagggccttgctccacctcgctctcctccattccccgtgtgggcctccgtctcccattctgtgaaatgacccgtttgggccacagggtccccaagtcctcttggcttggggccgtctgttccaagaggaggggccatattggtccttgaggcccctgcggcccagtaagtctgcagtgaggcctccctggacgtatatatcaacaaaaagtcaaactccgtaaagtgtttgagacatttattctgagccaaagatgaatggccgggggcccatgacagccccaggagaccctcagaccatgtgttcaaggtggtcgggccacagctaggtttcatacattttagggggacacaaggcatcaatcaatacacataagctgtacattggttacgcctagaaaggcggaaccaccggaagcggggatgcttccaggtcataggtggattcgaagattttctgattggccgttggttgaaagagttattgtcggtagataggaatgtctgggttaagataatgggttgtgcagaccgaggtttcatcatgcagatgaagcctccaggcagcagactgcagagagaatggatgggagatgtttattatcagactgaaagactgttctgccagtcattccaaaagggaggggggataacaaggtatgtccgtctcccgcttcccaccgtggcctgaactcgcttttcaggttcactttggaatgtccttagccaagac

SEQ ID NO: 41193 - DNA, 2300 bp, Homo sapien
agtcaaactccgtaaagtgtttgagacatttattctgagccaaagatgaatggccgggggcccatgacagccccaggagaccctcagaccatgtgttcaaggtggtcgggccacagctaggtttcatacattttagggggacacaaggcatcaatcaatacacataagctgtacattggttacgcctagaaaggcggaaccaccggaagcggggatgcttccaggtcataggtggattcgaagattttctgattggccgttggttgaaagagttattgtcggtagataggaatgtctgggttaagataatgggttgtgcagaccgaggtttcatcatgcagatgaagcctccaggcagcagactgcagagagaatggatgggagatgtttattatcagactgaaagactgttctgccagtcattccaaaagggaggggggataacaaggtatgtccgtctcccgcttcccaccgtggcctgaactcgcttttcaggttcactttggaatgtccttagccaagacgagggtccgttcgtttggctgggggtcttaggattgattttctggtttccatatgcaatgggagtgggggagagatggggtgggggcagcctgaggctcagccctggccaaggaagccccctccaggcattggccaggttctgactcctacagtgttacagccggcagggaacttggacccacaagctcctcccctccccaagcctcagtttccttgtttgtaagatgatgcctggggtccttgcttccttgtagggctcaaacaagatcccaggctctattaggaacagtgccaaggcagggggcccccaacagctcaagcaggctggagtttggtgctcacggagtaggggaagctggtggcttctcaggctcatgacattgtccctgcagggtgcagggctattccctggtggggctgggggtgtgtgtggccattggcaggagccccgatgttctcatccatgagtcagcagagatgggaacatcaatttatttgagtggctggtgcagccgagtccttggaggacaaggagtttttgccaagcctgggccgaatgtgccagggcttggggcagggaaactgtgtccagggacacagcttcaagggcccctggttgatgtccccagggcctgctgagtgccaggccctgggactcagagaggacaccacccgatgcaggccctgggactcagagaggacaccaccggatggagctgcccaaagggagtgccagtcggatgtgggggtgggggaagaggagggaccaggatgtgacgggtccgaggtctcacggggtgcccaggtgggctggatttacagagcatgggcggcctgcaggaccatgaaggggcaatgggggcagaagacagaggttggaggcagggtggcatggagggtctcggggcaggggcaggagggtctccagggtggtcagtctgctgcagtcagcagagggcactggaggggcctgggctcaggctccaggtagagctgacctagcccagaatgggcaggtgagggaaggccaccgcctggtgggcttggctgtcccctcacctggaccccatcgccggcctcttccttgcacggggtagatgctcattgatgtggtgacgtctagcaggaggatggccctgggcagggctgtgagctgggagacctgggctgggatctcagctttgggcccacacactgggatggaggagtgtttactgctgtctctgaatggctgcaggaaggctgagggggcacatggttgatgggccaggccactctgggcacagttgctgagagtcggctcttcctaagtgggggcacccggggtggtggaagggagtcagatgccaattcccaatgggtcctggtggtcgtgccctgctgcagggccttggcacccgccgccatagccatggagtccaggggggcccccaggggctggaaaggcagggaaacagattctccttgggagcctccaaggaagccagccctggctagcacgtctgtgctctgtctctggctttgcctgttctggacatctctggaggtgtgagcaccatgtggcctttcgtgtctggcttctttcacttagcacggtggcttcaggtccctccgcattatcgcatgtgccagtgctttgctcctttttacacctgagtaatcgtccactgtggagtcatcctttcagctgctgagagatgcgtgggcagtttccacctgcagccatcgtgagtagtcgggtgaggctgctgaagcagacgagtgagggcactgcc

SEQ ID NO: 41194 - DNA, 2300 bp, Homo sapien
ccagcatcaccctgggactcactcccacaggaaacgttctgtgttgtttatgatttgtctctgattgggacactaatataggccccgtgcagacaaattggaaaagcaaaaggcacatagaaaggaatcccaaaatacttttttggccatgcagtccctcagtccagctgcaaagccgcctcgaccttttctgagagcgtttcatccacagcaggggagggacgcatctctttcggggggaccttctggggctcctgaagcccacagccctgagacgccaggttcccagcccccatgtgcccagcctcctctcctcccctggctgcctgctgtgcccccaaatcccgtctctggtggcacacctgggctgagggaggacagacctattcatccaacaaatgcacccatcaatgcccgcgtgtcagggcctggagatagagagcttgcttgcagtcggggggagctgggagctgagcctgggcccttgtgtggtgggggtggcaggaggggctgggcacaggcctgggcagcacttgactcctcccagcagcctccagggtagcacgcacccagggctggggtcccagaggcagagggcatgctgggtgacctcatgcaggcactgacctctctgactctgaggaagaaggtggccgccgactggagggacctggccctctgaaagcaagagttcttttgctgccctgagccaggccaggggctgtttgaaggcagggctcattgttccccaggggtgggatggggccacgcactggtcagagggagtggcggggcacagcctgtttacagcaggggccaccaggaggggaaggggtaagtgtcctcccttctccagcaggtgggggaggggcgctgtgcagaagaaacggcccacgagcctccccaccctgctggccccaaagacttctcctttctcctgaaaaagccagaaatgcccttatttggagggtcagcccagctgtagggtgggggtagggccgttaacccttcatttataaatagagggataaatcactgccgagttaaacacgccagggcaggaacataaacagagtgggtggctccggcacagcccctcgcccgccccccaccctggcccccctgcccaggccagacgggagctcggtgtttatttgactcacactctggctccaggcttcagccccaaccagccaccccacaggggcctctgtctccttttctgtagtttggggggatcataggggtgcccgcctctcagggccagtaggagcctggggtgcccagtgagactggtccttggctcccatgcagccccactggacagcctaattccctttgtaaaggtccctcatgaggacccccatccagggcattgacctgatgctggcctaggaggaggggagaacagatgggtggtcccggaggatgggggccatgacggtgggtgtggggacaggggagtgggcagggcagtcagaggtccccaccatgaacaaggctctgtcccagcagaactgggtcatcagccaccaactctgctggcgctgccgtgctgacccgcttgcttagtcaccccagcagcaacgcgatcccagtgacatggattaggaagcaggtagagaggttaagtggcctacccgagcaagcacactagtcagtggcacagctggggctggagccaggccctggaactgcacactggagccccgtggtcttgcccttatcagctctccatcccgaggacagccctgcaccgcacgtgtttccgcctccccctcgtgccaggacggtcgcagaaacctccgtattttgtcgagtctccacgctggcaagtgccagtcctggaatttgaacacgcgtctgactctgaaagcctgtgccttttctgctgctgtccgaggctccctctgggtagagccaagggagcaggcatttgaggccccagccaggcgagggcatggagaagggggatgctgggcgtgcaggggcagacgggccagctgagttctgggcctcagggcagggcttaaggccaggctggcgcctggggtgacctggtctccttgcttccaggcctggggtgtgctggctgccgtcatgccctctgtgtctccagcggggccctcggccggggcagtccccaatgccaccgcagtgacaacagtgcggaccaatgccagcgggctggaggtgcccctgttccacctgtttgcccggctggacgaggagctgcatggcaccttcccaggcctgtggctggcgctgatggcggtgcacggagccatcttcctggcagg

SEQ ID NO: 41195 - DNA, 2300 bp, Homo sapien
gtgaccaagcttcaccactgtcctgccaggaagacctgtcattgctcccattttacaggtgtggaaacggaggggcaagaaaccaagtatccagcaagacactgggaggccaggccctcctgcctctagcccagcctcgggctgctgcacttgctaggaaacaccactgcaggcagggaggggtgccagggaccagagggagtaggtgacagcaagggcggccagggtggaggtggggagaaacggtgctctcgaggtgagaaagcgccctggggtggtctgggacagtgaccatctggttacagcctttggtcagatttgggaccttcatggaacaaggcaagcccaaggtcttggggggcgaaaaatcaccactatctgccagccccaggcccaggagctcccagctcagcccctctggccaaatgccacctggacaccagcctggtacactttccacttaactcaccctttcgccaggacctgccaaccagggagaggcctccccaagctgtatcaccgccatctggatgtaagtccctaaggaggtcacgtgcataggcattgggcaccagcggacactctgcccaccctggcggtgagagggagggctcacaccagcttatgcccccctctcagtctgactgtgtgcacctctgcccaagtcctcagccagtaaagtcacgtctgtgtagcttgggagtagttacaccacagaaattggccaatgccaattcaggatttggttaagcatctgttaagcatgccctcatgtcatctttgagcccagccacccatggtgcctccaagacctcctcgccatccaaactgcccacttgtctgagaaagctgcccacctcccggccttcctcctgcctcccatgtccagtgcctgactgcatcagccagccaccctcaccatgttctgggctgttacttgggacagagaggggaccagctgaggcccccagccttactccagtggtcagcgcaagcttccgggaggagggcaaaggcagagaggagcaggcagctgaggaaaccacctggaggctgcatctcatccccgcctgcattttctcccatcacgccgactgcctgcgggggcctgtccgcaacctgccccgctcagccagccagccatgccccatctccaggtccagcattgggcctggcacagagtaagtgcttggagaacacgttgggggtgttgaggggtgaccagctccctagcggggctatttggaaacagcccaggaattcctacacagggcagcttctcctccttcgtaaccacagtgaggggggccggcgtggtgatggggagatccccaatgcctaattccactcaggtgacaggttcggggcccatttacagcagctccaacgccccctttgcagatggggacaacaaggctctgcttagccccgcaggctaggggctgcaccaactccacctttgtgggcctcagtctcctcatctgagaaatggggttaacgaacttcttgggaggattgcaggaactcagtgaagcacggctctgcacagggctgccaggcggcttctgtctgtgcaaggccacaggcaccctgtgttcagtgacctcctctggtctgcagccgaggacactgctccaacctgggagcagggcccccagggtccacagactaggtggatgcccaacacccaccatcgtgtgcggggcacaccccagagcccgcaggcagagagagggggtgcagcacgtgcctttctgtcttggctgagggtgcccgggcacacactgtgaccagctagcctggacctcacgctgcccttggagccgctatcacagagggccagggaagcctccctcataaagggcttccctccgggaaccggcagggtgaaactgctctgcccacttggagctaagcatgccaccaccccacccctgggccaccagctgcccaggggcgtgtcaggagtcacccgtttaatccctgaggcacgtggatcaaggctgctgacctgattctaccggggtgtgcttggagggctgaggcgccgcccgagtcccaacactggtatggtctgaggcggactccacccggcctgagacctgacgctctgctttcccctgacctccactgacatctacgacccgccctggaggcacggaaggctgtggggttccagccccccaaactgtgcagctgaggaaaatgagccgtgaatgggggcagagccagatcctgggcgggaccctgcgcaggatgaactcagggtaggaggtctcccgcgcacccagaaacgggag

SEQ ID NO: 41196 - DNA, 2300 bp, Homo sapien
gacctcaggtgatccgcccgccttggcctcccaaaatgctgggattacaggagtgagccactgcgcctgacacccaccgcccattttaaccttcccagaaccatgcagtggacagagcctgaggtgtggcggctgctctgagcccatgagcactggctgccacccagggtgtggagggcaggcagggaggagcccactgtcccaggtagccaccctctgagtccaggggcccaggcctcaagccctacctgcacctgggctgaagctccaagggcccagcctgcctggtgggcagctgggaagggggtgctggggctggggcaggggcacaggtgagagggggtgggttggggaatggagggctctgctgggcgaggggccctgaagtgcctttccttgggtagcaggcagtagtgacagggccgggcttgggttgagtctagggggctggagagtctgctaacagctgggtcacagccagggccagcagtgcggggacccctcagcagcagtgcccaaatacagcttgggtcacttgtgtcacccctcatcgtgctcatggggtaacaaagaggccggcaccttgctcaaggcctcccagcccttccgtagagagggaagggggctgcgtgctcctggaacccctttgcctgggagctttggggtcatgagacccagaaagggagagaggcaggcgtggaggtgccttgggttgctgtggccccccctgccgcctcccctcttcagggccctgtcatggtgtgaacccactcctggccacctgtgctgtcaccaccttggcatgtgtgcctgatggctggcccattggcgtgttctgtccccgcctccctgagctcctggaggggcagagctggcctgtttatccccgagcctggctgagacctgtgtgagcagtggagacacagtggcggggggacactggtggacagggggctgctgacaggcaggagactttctgcagaaagcaagaggcgattagggtggcccacggccgcgtgtggggccaggcccctcacctccctgtgctggcagcactgaccgagtgcctgggccccattccctgaggatgggccacccagagacacctgggctcagatgttcacagtggctgagaatcggaagaggagagggcagctgtcctggggtggagtttccgcagatcacagcaggtgggcaggggccaggctcaggcttcttaggaactcggcctctgtccccacagagggatctgtcatctgtgtgctggggttcatcatgtcctcgggggtgtgtgtgtccctgaaatccctgtcccctctgtcctccgtcatgccctgctggctgtgtggtggctaccctgtcgcctctgggccctgggtcagtcctggcaggagccgtgcttccttgtgctcccatataaggaaatagacccaaaagggtcattctctcagcatggtcaggaggagggctctgggagaggtgtcgcctgtgactgtgggctcatgacaggcatgaaccccttgtgggaggcggggccccctgtgatccctttctattcatttccttcgtctttccccacagatgctgtgtgctgtggacccacctggggttcatggagtgggccacggggcccagccctaagcactgctgcgcccagggtcgccgcgcctcctgctgaggggtccccgtgccactggctctcaccattgccctcgcctgccgatggcctctgctgcccagcctggggccagctctaccgcctgagccccctgccccactccaggactcaccgtaccccgatggggtaacgtgacacaggccccacacgtcagaggccgctgtccccacggccactgcccgtgacccctggcccaaggcagctggagttggttcagttcaagttcattcttcctctggcccttgggggcttggggcccacctctgagtgaagggggctgtctgcccatccaccaatgtggagagggcgcccccggtgtggggtccagctctggacactgcttggcggccgggttcactttgagtttttaagttttctttgctgagcttttttggttgttctttttattttttgcctctttatgactatccagctctgagagacgggagtttggagttgcccgctttactttggttgggttggggggggcggcgggctgttttgttccttttcttttttaagagttgggttttcttttttaattatccaaacagtgggcagcttcctcccccacacccaagtatttgcacaatatttgtgcggggtatgggggtgggttttt

SEQ ID NO: 41197 - DNA, 2300 bp, Homo sapien
gttgggtgaagtttgctgtattttttcaatccaccagccaagttttggggtcacctctgctggccctgtgtagccatgtccctgccccaagaggctcacagtctagcagggttggggggaagacaggctggtaagcctcccagttacagctaggggtgctccacctcggggggtggcggggacagggggcatggaggtggggccttggggtgctgcaccttggggggactgagggacagggtgcatggaggcagggcctcagggtgctccaccttgccggggggacgggggaatggggggcatggaggcggggccttggcgtgctccaccttggggggcaggggaaatgggggcatggaggtggggccttggtgtgctctacctcgtggggcaggagaaatgggggcatggaggtggggccttggtgtgctccaccttgttagggggcagggggacaggggcatggaggcggggcctggggggggcacagtgcagagtaccacgtcgggaggtgggggagatgccccaggtggaaggactgcctgagctgagtgtggagtgggggtccgcgctggccaggaggggaaaaggggtgcagtctggattatcccattggtgggatggtggctggcctggcaggatcccgagacagatgcagcatgggatggggccccaggcagagctctgcagggaggggctctccaggagctgtgtggaccccaggccaggcggaaacccaggccgaggccgaaggttgggcaggtcccctggtggctctctgggagtccagggtacctgcctctggactcatccctccaagggtctcgggagaaaggtcttactgcccattttacagatggaacagctgaggctcagagaaccaagactcctgcttcaggcgacagtgtgtccagggtgggcctggctggttctgctgctagccctgaatggactgaggaggatgttggtgggggtggagggagacgctgggggcccgaggctgggggtcccgactgaggggaccccgtccgaccgtcagcccccagccactgtggcgcgccaagatggagacaactgaagattgagtggccaccctgggcggaggctgccctcaatttgagtgcctgcccagccccagcccccaggaccctgggaccctggcaggctgtggcttgggctcaggccccagtcaaggtgaccctgtctccaggagtggacgggtatccacctgcagggcacttcacagacttcatagtttgtctctgtcccctgggcctgaccctgagtttgtccccaagtcctgccagtgtctcctggggcttggcttggtcacagcagaggggcctgtggtgggcagggagctgacacgcataacgcttcttttgttgaatctagatctttctttcaaatggaaaaacgttatgcaaccaagctctgtggggggcggatggggcagggctgaccaggtggacacgggaggggaaggcggtgggtgggggaggatggctggaggtcactgcttgggtctggccgacaccttctggaggaaggagagctggctggtggcgaattcccggatgctgggctcagggtcacttctgagatgttcaaaagctccagaagaggaggagcaggtcagaggtgaccccagcgcaggagcagcccctttactccagcccaggtgttgggggggtggggggtggggtgggtggtgggtggggccagctcagaccccacctcctgtgactccaggcctgggatgcttccctccaccactaacccaccacccccattccccagccccttgttctgttggtgccatgaggcagctgtggagtgagtgtgagccttaggccccaggtgccctgatgggggcctggggaggggaagggccaacctcagcctccagacatgaaggtgggatggcggctgggtgctgcccaggaggcctgtgtctttgtcctgatgctgatgctgggtagggggggcaggagggggttcccttctggggcctcagtcttgctgtctgtgcagtgggtcttaagagtgcttgggcaggggtgggagggtgcgggctgcgggagctctggagggagggctgcttactgcggaacagcaggttggtgtccacagcattcagcatctggaacacggcctgggggtggtagcagatggtgtggcctgtgtaacagacgggcagctggtggctcagggctccctgtctcctggggggctgtagcccacccctgcccctcttcagccccaagctcctcctcatccaccccctttcctctcttgtg

SEQ ID NO: 41198 - DNA, 2300 bp, Homo sapien
cactgtggctttgatttgcatgtcctggtgataagtgatgtcgggtgcctttttatataccggctgattatttgtcttctttggataaatgtcgattcaaatccattgcccactttttaattggctgatttggttttctgctattgagtgacagcagttccttatatatcttggatgttaaccccttatcagagagagggtttgcaaatattccctcccattccgtaggctgccttttcattttgttgtttcctttgctgtgcagaagcttttgagtttggtgtagtcccacttgtctatttttgctttttcgcctgtgcttttggcttcatatccaaaaaatcattgccaagacccatgtcaaacagcatttcccctgtttccctctaggagttttacagcttcaggtcttatgtttacgtcttctgtgggggtgtccactggtcaaacagggccactgtctcctgggaagggaaattcacagagtcaggccttggggcagcagccaggggagctggaggtgggacccagctggacaaggggcatgggtgtccacctggcccctcctgtcacctccagtcaaaccacagcccccaccatcccgccgcccagtcaagcccagcaaggttgaacaaaccgcctcgagaataaatgctatgggagcccaaagaaatcagggtggcttccccgaggaggtggcctgggcgggggtctccaaggacaaataggaaagggcaaaaatgagtttctctaggaaagtggggggcagggcgcattccaggaggaaggcactgcacaaagcctcaaacctggctgcagcctaggaaccccggggagttgggcagggacacagagaaggagcctgggaggccagggggctgcccggcccttgagtctggccccttcctcattgcaggcgaacagcaggagggggaacggcctaggcaaagtctaggtggtgggacccacgtggcgccctccggcttcactgcccccagtgggtagtgcccgcagccccaggcctaaggcggtgggatgccaggcacccctacccatgacgccctttctgcgggtccctggctggagggagggtgcggcggggagggcgcgtgggctgggtggcacgtgcgcctctcacaggccccccgtccaggccgcggccctcctgccgcgcgagtcctgcctgggcccgcagcgccatctgccggccgcgcgggggccgggtcgcggagcaggcggcggggagggagggggtgccactgctccaggggcctcgtcctcaccctagactcgggtctggggacctgagtttgaggctcatctccaccactgattgctgtgcgaccagccgctggctcctggccctctctgagctccaccccaatcccagggcggtgagcagggccaggcccacagcggccgctctgaccctcggtcctgctccagtcttacagacggggaggagtgcacagcgaggcacggcgaggttcccgggcacgcggtcagcagagagggggctggatttgattcggggcagcctgcccagccccacaggctgagctcccaggctctccccgctcctggttccttcggctggagaggatcccagaagcggcaagcacccgcacccagaggggagcccaccacatggcaggtgctcactctcacgcccagaggggagcccagcacctcgcaggtgctcactctcacgcccagaggggagcccagcacatcgcaggtgctcactctcacgcccagaggggagcccagcgcatcgcacgtgctcacactcagacccagaggggaagtcacagctccagccccgggacctgccacccacacagggacctggacttagcaaacaaatggcccaagccggatcatccacgggtctcccaggagacaactgaggcccagagaaggaaggggcaggcccgggaccccttgaggacccacgtctgagcacgcacccacaaacacaggcacacacgcacacctgctgtccccacaacacagacagaccctagaaaggatgctgtggacactggaaccattgtgacctcaggggtgaggtcaggcctgccagggcgggggagggccagtgccgtagacagggccggcccacaggcgtgaggccagagttagtggtgagctcctgtgggtctgcactgcaccccaaccatggacaggcagtgttctgaaaggccatacagctgcaccccgacgggtagagtgtcgtcagccgtgtcccaaaactccaggtcagctcaaccccagcagggaccccctgaccccccccc

SEQ ID NO: 41199 - DNA, 2300 bp, Homo sapien
agacagggctgccgggctcatggaacaggcccagcccctgagtagcagcctcgagcagctgagcccagagaaagatgttgaaagtcagcccgtagcaggcagggcaagggcctgggaggagaggggccagacccctgcctgggtgggacctcttcccagagccaacggcactgctgcccctcggtgtggcctctgagccccgctgtaaagcaagtgacacccacctggtaaggactggtcagcgccgagcagggtggcccggaagctcatggtgcacatccacgcagccaccacatcccatcctgtcccaggaagtcacaggtatttcccattctgtggacggcagccgaggctggaggaggagagacccggcaggctccaggccccgcctgccaagcaccatgctgtactgcccacagtggccagcgtccctcagtgtccagcagctgcaggagacctgtggaagccccaggaagaggcctcagggcgtgcctggctgggccctctctatctgagtccactgcatcttgcatgaaggttccttgggaatcctggggagacctgggaagttcattgggagctctggatgctgaaggccaggagcttgggccgggtggggagggcggtgcaggggctggggggcttgccagggtctcctagcacaagccacccagctcccggcaggtggagtcaaatagacgtgtctcctccaccgcctccaccctcccagccgagggcccagaccccatattggctctctcagggcctcggcctcctcttgccctcctagaaaaggccctgaagagggaattctcatggctccctggctctcctcagcgactccctcccacagcaagcaggcctggagcaccagcacctgaccctctgggaagcaagcaggtgggagcagggagggcgaggctcccagccaccccgctgctggtggaaagcctgggtctgaacccacatcttccacagtatgaaggaggctcgatcaattccggaagatgctagacttcttccagaaattccagccccagatcctgcctcttgcctcctccccagagccttgtttcacaacatgattgaaccgccccattatttaataaaactgtcagaacaactgatttgtgcgatgtacatggttccctttttttgctcttctttctttccagattcaataaaccctgaagttgttccaagaagacaggcgagtgatgggaagcatcaatttcctgaggaccagcccggctgcacaggacaagccgcactgaacccagtggggagccacccctagaaaggccagggcagctgcttatagggaggcaacaaccacccctgcatgtggagggtaggagaggaggtggcagggagtgagtgcaaccagggaaagcttcctggaggaggagacatcaggattctgtcttgacgcactaacaggagtttgccgatggaatagaggtgcaagagaattgcatacagaaggaaaattgagtttgcaaggacatctgcaggacagcaggggctgggggagaacgcttagggtgacagagtgcgtggccccgggggggtagagcgctcagactttgaagtcagagctcataccaggcctgggtgccaaggtaaggtccttgatctccaggctggggtcactcaagggctgcaggattctcagggaggactgtaggtcccacaggcactgggctcgggaaggggcagtgtccccaacccacaacagagctggtgtagccgggagcctcgccccttcccagtgcagggagaaggcagcccacagcctccatcacccaaaggagtcgactttcgcacgcgcagggctgtcaggctgactgtgcacccagaacaatgcagcctcatcgctaccgggtcctgttgactgtcaggccctgggactcagctgcttcagctcctaaactgggcacctctttctgactcgcttgttgggagaaaggctccgcccctctccagaccccgcccccagggaggaggggcaagacctctcattggagggctctgtgggaaggcgggctctgagcaccagctctgcccctagcagctgctgggctggggcaggaagggggagagtccccatggccccagcagcaagcccctgcctctctcctgtccggctgctgccccactctgaggcccaggttctcttctcccaagagcgagtgcgttgggtaagtcagcgccagggaccagcccccaggttccccagctcccaggtgagtgcagagagaggggcggcagctacagcccacttagctcaggccacctgg

SEQ ID NO: 41200 - DNA, 2300 bp, Homo sapien
cagggaggggcagagatgagggaagggaggggagccccggccctaggcccaggcagctattggctatttccctcatcccttcctgaggaccccttagcatcctcctccccctccccatcggctcagcctgagggagtgggctcctggctcttccacggagaggtttaccttccctgacttgctgtggggcactcaggcgggctcatcccagatttcggaggagccaacaggtacggagcccctcctctggtggttcctacccacgctagaccattccccctgcagtgtccaggcacagaaacagccccatatacgccttgtatggtcaagaaagcggctcctggaggtggtctgccctgggaggaaagggcttcactttcccctcctttgcacacctgaacacggagctgtcagaggaggctgagtgaggtggcggccagacagacagcgccagccacggaaggggaggtgggcaccgtgccaggcacccggcatcctcagtccagactgacagctgtcagacaggcattggtcctggcgaaccttccccttcaagtggaagctggggggtcagcagtcatgggcatcctccctggttaggagccggcttccctgcactctagctgtcctagccgaagagtgaagccctgtccaaatcatggcgaggctgcaagacaggcacacactactgcctcctgggagcccaggggagactgaaatacaccaaggcaaggagcgtgggtgggcccaggacaggccggcctgagcaccagcccaggaatgctggtgggcatgtgcccctcttccctcccacccatgtgtgcacacatttgtgccatatactaccgttcccatgttcgcgcctgggcacacacttgtgccagcatacacacacttgtgcacttgcacctggtgtccaggaacactccctcagctcacagacgtgcgctgtgtgcacagtaccacgcagtgtccacgagcacacttttgtgttcgtgttcacagaacccgtgtgcgcacacgtgcacagtcctgggctgcagagaaccccagccagcggggcggtgggggaaggggagggcacgcctccttcccaggagctcagcaaggctgtccgcgggagcccagggctgcctgcagggctttggcgtaggcctcgcaagcacagcaagcatcacagagtgagggcggcgggagaacctccgcttgccggagaaggtgcagcggactcatcactcttgctctcctgccttgggtgtgactcttggttcacctctggggaaacaggctgaaaggtgaccctggcggcccaaggacacacacccattgtccgcaggttcctcccaggtgtcttctccagcaggtcaccgggagagcgaggggctggagtctttcgggagctcagtgcccgcaggcagagcagggaaagggaggcgccccaggcccctgcggaaggaggtcccaggagggtctccgcaaggggctccatactctgcacttcagctcctccagggaggggctgcgacctcgggcaaaggtccctcagatgtcttgagactcagtttcctcgttggtgacactgggagtccggagtccccgcggggcctgccagcccccgggcgagcacggccccacgcggagcccgtgcagcctgacttggggcccaacgcccgtccccgcagcgcgagacgcgcaggtgcccggccctgccctggccgagacccgccgcctgcgcagccccgcagaagctccagctttggcccgtgtgaggtccgggctcggcctgggctgggcggagcccgctcccgaagcgcctcagcgccgggccgccgccctccacgtgacctccaccttcgccgtcatccccatatgcaaaacggggaaacggggaaacggaggcccaccaccaggcaggtgaggacagccgactcgcgcgcgcacccgcagaggcctcttggcccagccgaccgccgtccgcgccgcttccggctccgcgccggggcctctggggcgggtagtccccgcgcgcgtccgggaccggcggccattggctggtgcgggagggggcgcgcacgccggcggcgggaggggccgtcacgtgatgtttgggtgcccgccccgcccgcctcgcccgccgtgagcgcccggagcggtccgcgagccaccgaggcccaggtgaggcggcggcggtggggctggggcctggccggggccgggcgtggggcggcgagggcgaggcggccggggaccagcgcggggcccggagcccggcgggggccgcggcgtggcgtggtatgggg

SEQ ID NO: 41201 - DNA, 2300 bp, Homo sapien
actgggctcaccccgggactgtagcgcaaggtgaggctggggaggccttctggctgtgggacctgcccacagccgctccctctccatgagatggtgagggggcgcccaggacagcccggcttttccatgccttgtccaagcccacccagccaagcgtgtctgggggcaggactggaggagggcttccaggaggcaggggacatggcagcatcttcccaggtctgccacgaatgcgccaggatgggaagattgttttgtaggtttgtccctttctaaaaaaattttctcttgggagcccggaatgtttgccaggaatgagaccacagagggccaggttgggccatgtctgttcccagatccagaagccccagccagcttcctccccctgctggaagcacttcctgcagccccctggctaaaattcccccacccagctcttaatctcttgttgagagcagtggggtgcccatcccactttacagatggagaaaccgaggctttgtggtgagagatgtgtccgaggccactgtgcagtcaggagcacagcccaagtccagcctccggcctcctggctcccatgggctcagagcctctgctcaggctggggccagacctcgaggctgcctgggcccagctccctgctctgcctacaaggctgtgcaggaaggacgccaggaggggactgcagagcagtgaccgaccttgtcttgccagccagctgggcctgggcagcaggaagcggcaagtcccgtgggcgggcgaccggcatttgtgcggtcagcagagcggaggcatccccaccaggaggccgggtggcctgggggagggggactggctacagctcccctccctcctgcacaggctcaactgctgggtgggatggacggcctggccagaggccttgggggtggtgaggagactgaggtctgtaggcagaaggaacttgccaaggtccacagcgaggtggatgcccgctgggcccagggcagccccggatccagggccttcactgtacctctgctcacccgtggcgctgtgagtgggcagtcactcaacctgggccctctcctggagctgggaggtgtctcctggtggcacaaatttagggtcagcctggggctcacgtatgggttctccgacccactcactgtgacgggtaaattatggattctctctgtgtctcagttttcccatcatgaatgataggaagtaatgctagccttgcagaggaagggcagaggtgaggtggctcctggtggctccatcccccctccatccctccccaggccctgtgcctgtagctttagggcacgagggcacacgtgggagggccgaaagagagcttcctggcaggagcaccagctgggcacaggctgctggaggctgcagagggcagtcttgggggggcaccaaatctgaactcccctcaccccaaagatccagtcattgctattgaggctctgcacccccttcctgctctccaagcctttagaaagggctcgggggccagacgggaggctggggaatggcccgagtaacctttctcctgtgctccgggcccacttcccttcccacggggtttgcagaatcttcctgggaaggaggaaggttagagaggagggaccaaggtcagcaggaaagacagagcctgagagagctacaccctccactcacagaggggcagccacgcagagcgtggtgagcgagtgggcaggcaggccagggcccccgggagccacgccaggctgcgtgggcaaaggggtaccaccaaaagccccaggtggactgccagcccctccctgctcaggcttgggtggaggcggaggtactttgttccccaagctgggccgctgcccctgcaggtggtcacattggtgagtggcagacagacaggtggacggagcaggtgcctgggagggtgccagggcctgtgtctgcggcccaaagtcctcctgccctcgttggtagcaggctaagctgcctcctctgagagagcccacccccatgcccagagcccacgtctccccaagtgctcactctgaccctctgctctttctcttccagctgctgctggtggccacaggctggcaccagggccctggactttagaagccgttgctgccctctctgtcacctgaagcggggccctctcccatcccacccttgccccgcctccctgcccccaccgggccggccctgcccgccgccggaccctggcatgtcaagacctggtccgcgcctgcctgcccagcccgcggaaccccggcggccccgcgagctaggatgaggggccaggccgc

SEQ ID NO: 41202 - DNA, 2300 bp, Homo sapien
cccagcagggcagccctcctgctgcggggtctggccccggtctgactgcagccccatgggcggcaggcctgtgacgctgtagtggggcctgcaggtgacccagcagccgaggagtggtccccgtggagcgtgtgctccagcacctgcggcgagggctggcagacccgcacgcgcttctgcgtgtcctcctcctacagcacgcagtgcagcggacccctgcgcgagcagcggctgtgcaacaactctgccgtgtgcccaggtgggtgggaccttgggctggggcagcggacagccagggcagcggggggccagggcagcgggggcggtggccgcagtgggcagcagcaccttccgtccctctgcagtgcatggtgcctgggatgagtggtcgccctggagcctctgctccagcacctgtggccgtggctttcgggatcgcacgcgcacctgcaggcccccccagtttgggggcaacccctgtgagggccctgagaagcaaaccaagttctgcaacattgccctgtgccctggtaggtgagagggagggcgtaggggcagggaggaagggaagaaaggggaggtcacagtgggccaccggccaggcccaggagcccagctttgcccactccagacccacctcagggtgctcagaggttggaacctcagactgggtttaggaagcagactgaggtgtgaccttggggcatttcccacccatatcccaggctgggtgtggggtggtgacctctagggttttctcacccatatcccaggctggatgttcatgccatgtcccaggctgggtgtggggtggtggcccccagggttttcacacccatgtcccaggctgggtgtggggtggtggccccagggtgttctcacccatgtcacaggctgggtgtggggtggtggcccccagggtgttctcacccatgtcacaggctggatgtggggtggtggcccccagggtttactcacccgtgtcccagcctgggtgttctcacccatgtcacaggctggccgtgggtggtggcccccagggtgttctcatctatgtcccaggctgggtgtggggtggtagcacccagggtgctcacacccacattccaagccaggcattggggtgccgggtgttcacgcccactttgtgtctccttcctcccccgggccgggcagtggatggaaactggaatgagtggtcgagctggagcgcctgctccgccagctgctcccagggccgacagcagcgcacgcgtgaatgcaacgggccttcctacgggggtgcggagtgccagggccactgggtggagacccgagactgcttcctgcagcagtgcccaggtcaggggtgcgccaggctggggtcggggggcacctaacaagcaggagcctctaggaaggggacaggccccacagcgggtgggggtaaccatgggccccggcatgtgactgaggagggagtggggtgcacagtggggtctggggtggctgtgggggaaacggagcatggggtggctgcagggtgagtgaggtgcactgtggggtgtggggtggccatgaggagagtggggcatggggtggccatggggagaggagtggggtgcacagtgggacttggggtgtccatggggaagtggagggtggggtggctgtggggtagcagggtgcacagtgggacttggggtgtttctgggggaagttgagtgtggccatggggtagcggggtgcacagtgggacttggggtgtctgtggagaagtggagtgtggggtgactgtggagtagtggggtgcacagtgggacttggggtgtccatggggaagtggagtgtggggtggccatggagtagtggggtgcacagtgggacttggggtatccatggggaagtggagtgtggggtggccatggattagtggagtgcacagtgggacttggggtgtctgtggagaagcagagtgtggggtggccgtggagtagcggggtgcacagtgggacttggggtgtctgtggggaagtggagtgtggggtggccgtggggtagtagggtgcacagtgaggtgtggagggtggtggggttggctgcatgtggggtgtttgctttattttgtatcaggctgatgactgatttctcctctcctggtctgaatttcccttctttgacctcctgccccacattcctgggtccctatgtttcactgccgcatggctctgtgtgggtccctgtctttgtgtcctcctgtcactgtggctcctggaccctgcccttcttgtcgcctgtgccctgtgtctggccacgccccg

SEQ ID NO: 41203 - DNA, 2300 bp, Homo sapien
gtcagaggccacacgggcttgtaaaccctggcggggctggcccctggtcattgaagtgctggctctcacaatggacacacatgcacggtcagtgcccagcacccagacaacacctacaggctcaggctggccccaacccggacatgtggccctcggtgaccgctggctgcactcacccaaggctgctggcgtctgcccgtcccgcatgtgcccacccagctcctctccctgggattccgcagtggagaagcgggaaggtccctgtgctggagacttctctgcctggctccccctcccagctccgcggtgcccctccgccctcccttctctgtccgcccacttacctttaattagaaatgccaggagagccatttttggggagtttttttgccagaaagacattcccccccaggggcggaaggaaggaggagacagactggctctgaggctgggagagggctccccgggagagccggttgggggggggctcagagggttggcagggaggggggattccagcaagtgggcacctgtgtgcccttgagtgcctgaataagacaggggatgctggggggagctgagggctgtgagtggggggtatgagtgtgtatgtgggagctatgagtggggggtatgagtgtgtatgtgggagctatgagtggggggtatgagtgtgtgtgggggctgtgagtgagggcatgagtgtgtggggtggggttagagtgggggctatgagtgtgtatgtgggggtgtgagtgtgcagcatgtgtgtgtctgagagagggaaagggcagctggcagcaggaacaagatgtcttgattgtcagcgatgatgtcctcatggccctctggctgtggggaatggtgtgtgtcacccctgcctgggtaacatcagaggacctgagacccatgcctatccagccagcactggagtaactcaggaagggcgtccctacccccgccaggttgccagggaggcagaagggacctccctcccgagggagtctcggcttccggagccccgctccttatatggtgcttggcttccctctgcctctcctgatggcactgtgctgccagcaccggcccccctccctctccctcctcgcctctcctccctccccttctcctttccctccttccacctccctccctgtctccctctctcctcccctcttccatccccttagaagtcttggagcctctggccaggttcttgatatagccagggtcttcagggcccaattcccttcactgggggctaaatgtcccctccatgtcctccaaaccccagccccccaggtagcagctgccagatttccctggaaacacagaaaagtattgggcctcaccagagacctgcgtatgggggcatggggcagccctgtccagtcactgccacgtgggcccctgtcacccatgcacaccaacgccagggccaggcagagcgagcctctgcctggctgtgcgtccctcacacagagcccaagacctggactcaggacccgggcaggagtgagtgggagctcaaagccacatctgggagctcacatggagacttgctgagcccctgggcacagaggctgatggtgagggtccttcccgggctcagctgcacatcctgcagagctgggtgggcggggtcaggggcagtgaggacccaggagagcagtggccagcgccagccccctccagccccgcaaagagagaggcgagtggagaggaggaaggccaccttgggaccctgggaggcagcagatgacagcccgcccagcgcccgggagggggcgtgggaggggcgcccagtgcccggctcagtccctcggtccccgcaggctgaatgagccccgccgtccggggtgggaggtacggagcggagggattagtcatcctggccccgccatgtgtgcagggggtgggacctcccgtcccttgccgcccgggagccgagtgggcgcagggcggggcctgcaggggcgcgggcggggcgctggcggggagcctgcggctgggccaatgagaaaccgggctcggcgagccggccgcccacgggcctcgctggctgcataaagagccggcggccaggactcagcgcagagctcgggcgcggcgtcctccctccgcagcagccgagccggacctgcctccccgggcgtgctccgccggccccgccgccggcccgcagcgacagacaggcgctccccgcagctccgcacgggacccaggccgccggaccccagcgccggaccaccctctgtccgccccgaggagtttgccgcctgccggagcacctgcgcaca

SEQ ID NO: 41204 - DNA, 2300 bp, Homo sapien
agcccctgaagtgctgtgcctggagataccattgtggaccctggagaggcacctgctgcttatgcggtaaaacctctaccaccccaaacctggtcagtttgaggggagccgctgccatagtatccacagagaaggccggagttccagccgtgtggagcagcagaggggagtctgacagggtcacctcctacacagagagaattggcagctgactgcactgccaggagccaaggcctaggtgtgtggagcctggaagaccagggatacctgaggcaggaggtgcagcgtgtggagtgagaaacccgagagggactggggcctgtgctcaggatcagcagagcaggcaggcagagtggagagggagagacggagccccagaaggggagcaggaggagagggaagtagtggcagcagcccaggccaggcgtgtgtcctgcaagtgctaggaccagccacccctccccatggcctccaagccggctgccgggaagagcagaggggagaagcggaagagggtggtgctgacactgaaggagaagattgacatctgcacgcgcctggagaagggcgagagccggaaggcactgatgcaggagtacaatgtgggcatgtccaccctctacgacatcagggcccacaaggcgcagctgctccggttcttcgccagctcggactccaacaaggcgctggagcagcggcgcacgctgcacacgcccaagctggagcacctggaccgcgtcctgtacgagtggttcctggggaagcgctccgagggcgtccccgtgtcaggccccatgctcatcgagaaggccaaggacttctacgagcagatgcagctcactgagccctgcgtgttctccggagggtggctttggcgctttaaggccagacacggcattaaaaagctagatgcatccagtgaaaagcagtcagccgaccaccaggccgcggagcagttctgtgcgtttttcaggagcttggctgctgagcacgggctgtccgccgagcaggtttacaacgctgatgagaccggccttttctggcggtgcctgccaaatcccactccggaaggcggggctgtgcctggccccaagcagggcaaggaccggctgaccgtgctgatgtgtgccaacgccacgggctcccacaggctcaagcccttggccatcgggaagtgcagcggtcccagggctttcaaaggcatccagcacctgcccgtcgcctataaggcccaggggaatgcctgggtggacaaggagattttttccgattggttccatcatatctttgtgccctcggtgagagagcacttcagaaccataggtttgccggaagacagcaaagccgttctcttgctggacagctcccgggctcacccgcaggaggccgagctggtgtccagtaacgttttcaccatcttcctgcctgccagcgtggcctcattggtgcagcccatggagcagggcattcggagagatttcatgaggaacttcattaaccctccggtccccctgcagggcccccatgcccgctacaacatgaacgatgccatattcagcgtggcctgtgcctggaacgcagtccctagccacgtcttcaggcgggcctggaggaagctgtggccgtcggttgcgtttgccgaaggctcctcctctgaggaggagttggaggcagagtgcttcccagtgaagccccacaacaagtcctttgcacacatcctggagcttgtgaaggaaggctcctcctgcccgggccagcttcgccagcgccaggccgccagctggggggtagcgggaagggaggcagaagggggacggccccctgctgccacgtcgccagcagaggttgtgtgtggagttcagaaaagactccaaaagctgaccaggacggcggaggagatcctggtgagggcgaggaggtggcctgggagcaggcggccgtggcctttgacgcagtcctgcgctttgcggagcggcagccatgcttcagtgcgcaggaagtggggcagctgcgggcgctgcgtgccgtgttccggagccagcagcaggtgaggaggcggcgtggtgccctcggggctgtggtcaaggttgaagccctccaggagggccctggtggctgtggggccacagctcagtctcccttgccctgctcatccacagcaggtgacaactgatggcttctctgccctgccctggccactggccctgtttctccccacaccctggagtggcatggtcctgtgccccgaccccacctgaggcaggagggcatgtgcagacactcaagagcccttccaggag

SEQ ID NO: 41205 - DNA, 2300 bp, Homo sapien
cagagacattggctagcacataggagtctggatttctggggaggggccctggcaggagacatgaatttggtcgttgccagtgttggatggtatttaacggcatgacactggaggagatcacccagggagtggggactggttgaacaaaaagagccaaagaatggcctggtcagtaaggaaccagcaagggagggtgaggaagagaagaaccagagggtgggagggtgctgggagcccaggtaacaacggacctaaggatgagtgagctggcacatgggctcgtgcctggaatcccagcattttgggatcgcttgagtccacgagctcgagaccagcctaggcaacacagctagacctcgtttccacaaaaaattaaaaagataggtgagacagtgcatgcttgtagtcccagctactctgggggttgaggcaggaggatcccttgagcccaggaggttgaagctgcggtgaggagaatgtaccactgcactccagcctgggcaacagagtgagaccctacctcaaaaaaggaaaaaggaggagtgagctacccaaatctgtatttgtttattattgctgtcctaacaaattaccataaacgtggtgatccaaaacaatacaaatttatatcttacagctctgggttcagaagtctaatggcacaatgagtgtcatgggctaagatcaaggggtcagcaggctgcattccttctgctggctccaggagaggccctgtttccttgtctctcccagccactagaagccgctcatagtccttggcttgtggccccttcctccatcttcaaagcacatcactccaacccctgtgtctgttgtcacatttccttttctctcctctttcatcccattgtcctctcacttggcttcctaactcccacaagaacccctgatatggcacctgccctcctatctgaacccgtgggctctgcatccagatggaaccaaccgaggatacaaacaattcggaaaaaaacctgtgtctgtactgaacatgtacaaatttttctcttgtcactattccctaaacaatactgtataacaactatctacatagcgcttacattgtattaggtattataagtaatctagaagtgacttaacgtatacgggaagatgtgtgtaggttatatgcaaatacgaagccattttatgtaagggatttgagcatcaaggattttagcatccttgagaagtgctggaaccaatcctctatggatacccagggacgactgcacattgggctcaccctgataaacataagaatctctccacctaaagaatcttaacttcattgcatttgcagtcccttttgccatgtaagtaatgtattcacaagacctggaagttaggatgtggacatccttggagggccattattctgcccaccacagtccaccctccagtttccaaaatttgcataggtcccatgggcaaaatccacgcacccatctcaaggtcctccacagcctcaactcattacagcaccaactcaggtccatactcacttaagtcgcacccagttcaaaagtttcaaatcccatcgtctgaatcatctaaattgggtatggattggaccccagctaagtaagggggtcaagcaggcgggctgagcactggtcctggtgaccggaaggcagcactgccctccccgcatcagaaactgcaccgggaagaccgtcctgggctgatcggcacgaaaccctgggcgcctgtggctgccccagaactgcaggagccccaacgccttcagcgcagggttcactgtcatgaaaggaatgtgacgccctgcgcccattctacagatggagagagcagggcggagcccggggcccaggccgcgcgccccgccttcgccccgtttcccctctcccctccctgcccgcgccttctcccctcccacgcctccccccaccctgggacccccccactcctctcctccaggcctcctctcctcccacgccctccgcggccacccagctctttgaaagcctgcgtctggctcccagacaccaccgagtgctgagtcctccagcctgtctagagcgtcccggaagtagctgggggaaggcgacgaggcgcggactggaggagaaccgagtggccggcacttccggccggcggcggctgctccgggtgagcagggtgagtagggtcctggcctgaggcgctgggcggccgggccgggccggatgggtgcgggcgctctccggtccctggtgggcgcgggcggcgcgggcgggagccgcagtctgggcaggcgggcgcgcggggcggggcgg

SEQ ID NO: 41206 - DNA, 2300 bp, Homo sapien
aagagggttgccaggcagagttatctaactcagggtccatgtacaaaggcaggggtcaggttgaaggagacagcagcggccacaagtccccctcaaagccagccagcagcaggaagccaccagcccctcgggcttgcagggatgagggggagagcacagtgaccagaggctggccagaacccgggggacaggagaagcctggctgacgggacctgggccttctctagagggccatagccactgccaccaccacccagccactggcaggagagcctgggcctgctctagagggccatagccactgccaccaccacccagccactggcagcagagcttgggcctgctctagagggtcctagccactgctaccaccacccagctggctggcaggagagcctgggcctgctctagaggaccatagctactgccaccaacactcagccggctggcaggagagcctaggcctgtactagaggaccatagctactgccaccaacacttagccagctggcatgagagcctgggcctgctctagagggccatagccgctgccaccacccaccgcccagctgactggcatgagagcttgggcctgctctagagggccatagccactgccaccaccgcccagcgggctgggcctgctctagagggccatagccactgccaccacctcccagctgactggcaggagagctggcctgaacttgcctcttccactctctcatctcctgcctgtgggagctggaccagcctcccaggacatggagcaggacggagaggggatctggggcaaacagaggccatacagccctgggcctagccgctgcctcctgctactgcagaggctgctaaaagctgcacttccccgactcgtttgcagctaaagttccaagctgagggggtcactcaaggtcctgagggtaaagcacctagcccagggctcagcccacactgaatgccccataaatgaaggcccgtccaacagggtctcctccccagggaggctgtcccctgtgtcaacaagagccaaactctgtaaaatatttgaagacatttattctgagccaaatatgagggaccatggcctgtgacacagcccccaggagaccctgagaacatgtgcccaaggtggtcagtgcacagcttgatggtacccattttagggagacatgagacatcaatcaaatatattgaagatatacattggtttagtccagaaaggtgggcagctggaactgggggcttccaggttataggtggatttaaacatcttctggttggcaatcgcttgcaagagttatcaatagaaaggaatgtctgggttatacggggttgtggagaccaaggctttatcatcagatgaagcctccaggtagcaggcttccgagacaatagatggtaaatgtttctcatcagactgaaggcctgtgttgatgttaacgctggctgttccagagttctgaagggaggagggataatgaggctatccaaccctttgctgtcatggcctgaaccagtttttcaggttaacttcggaaagcccttgccaagaggagggttccactcagatggctggggggccttagaatgttacttttggtttataccggaacagcccctgcccctgtcctttgcagcacctgctaatgatctgtcagtgacgctgtgaccaaggctcatcaccctgcgggccgtgggccccagagggcggcacagcttctataggagcacagggcccagggaggtgccctcatccttggctggaaggccgaggcctggaggagtctggagaaagggtctcccttgtctggccttgcactgtgaggtgggggaggtgggagaggcataatctgggtcttgaggacgtttcagccctcagcccggggtggctgagatatggccctgggtaggctctgtcctccagaggtggaaagaaggacaaagggagagggaggtgcaggtcgctcagggaggagactcggacctgcccagccccggggccctcactggctccaggaaacccgctggtgttgactgtgggcagtccagcctctccccatttgaggccatataaagtcacctgaggccctctccaccacagcccaccagtgaccacgaaggctgtgctgcttgccctgttgatggcaggcttggccctgcagccaggtgaggccttggctggcccccagcagggaagggagcaggggtgagccggggaggccagagggatacctgcagggcacacggagaggaggggaaggaaggaggaagggagaggaagggggtgaggctcttgc

SEQ ID NO: 41207 - DNA, 2300 bp, Homo sapien
ggagccaggcagggcaccagcctccctcactcagcgtccttgatgctccccagagcaggtcagcaagcccgggccggcagcttcaggagacacagtgtggccagaagcacctgcctgagcctcaggccccagttcctgcacctgagccctgaggggtggagagttctgtgcgggctcccaggtctgcagggccctcccagaaaacaatggcctagccctcaactctggactcaggccctgggccaaggcaggtctgagtgtgccttgggcctgggagggtgggtaggtgttgggcagagctcaccatggaagcccagagctcaccatggaagccgggcaggctgggctgggtgtaggcgaggcggggagggtgtgaccagtgcccagggtcactcagatgctggcctggggagctgcaccctgctgacaatgccaccctgggcccccagtgttcaggagggaggtctccccgtgaagtcacatgtcagacgggaggcctggctctttccagcacagctctgcccactgtctgctccatgacccaccctcagagctccaggccagggttccaatcctggctcggtatgggatgtgggcaacagacccgttccctttcctgagcctctgtctcctcttctctgaaaccgccccccgagccccacccctaacacccttggaggcctcaccctgagcaggtccccacccaggtcacaggctgcacccctagccctagggcgggaagcaggctgtgtgcaaaaggcttcccctgagcgcagaaggcaagtgtggatggtgtcctcccactcaggggcctggggatgctcacggggcacagattctcccagaaagaagcctctggaggtgtaatgggcaccccagagagggaaggcgctggggttcagggttgggggaggccacctgtcaccggggaccctgctgtagtgtttgaatgctgtatggtgggtgtgcagctctaaaacaaattttgaaaaatgggggtgctcaaatcaggccaaggggatgggtaggagcttgaatggtagcagtccctccccccggaacgctctccttcctgtgaactttctgggtccatcctcccagcaaggaggggtcatagatgagtcgcaaggctcagagaggtctggccacatgctccaggcagcacagcaagtgcaagtcctgggaactgccctcccaccctctgcagggacgtcctcctttcaggggccaagctttgctcctgttagggcggaggctgcagcccatgtgaccagggccctggtccagacacagccctggatccggtgcccgcctggggtgtgcaaggacagagggtctctctggcttatccaacaggtgtttattaagggcctacgctgtgctgaggctgccattcagggagccccacgaatgtgaggcctggccccttcctccaggcctccaggccccatctctggagactcccaggaactcacgtcgactcctgtcctccagttctactcagtccacttcatctcagcctttaccgggccctcctgagtgcctgtcccctgctgggtgcgggggacaccacggaccagacctggctcaagtcatagatggggtgggcagggaaggcttcctgggggaagaggtgcctgagcacagggttaagggtggagaatgctgggccatggaaacagcagcagagagggttggaggggccatctgcaggcggatctgtgtcaatagagccgatctgccgggtgggagtcctggagagggccatgggagggtcagggtgggggacaggggcgcagacatacatggtcagacttgcgttaggatgtgcctcaggaaccaggacaggctcccactgggccgggtgtgtgaggagtggcacagaggcctggggcaccacacccagtgtgggctgcagcggggccccccagagcctagagctggccgggtccccagagcagcaggccgagtgcagggagcagcgcaaggatggcagcagccggctgcagggcatgggccccgctggcgttgcacaagtcggtgtcacagcacgtgatgttcttcttgcccacgtagtagtcctgtgagtcatccacgcagttcaagctgcagcctttgctgatgacggtcaggaggccaactgcgcctggggagcagcgggatccggggatggggctgccctgtgtgctcacctgcctgacctgccccaggcctcctcctgtcccaccctgcctaatgctctagagtccccctgggctggcctcaggattgcaagcagtgcgagggcctggtctcggccc

SEQ ID NO: 41208 - DNA, 2300 bp, Homo sapien
ccaagtgctgaaacgcctgctgcaactttacaatcaggtgcacctaacagctgctggaacgacctgccgtgactcaaagacaaggtctacctactgtgtcactcacccatcagagcctgccagctccccaaacctctaccagggcccacaagttttctttctaaacaataggtaacatttcttaaataaaactttcaaccttctctttgttcgtcagacacaccaaacacatttctggtctgtgtacgcccagaattacaattctgtgattcctgaataaaacgtttagagattcatcctataatgtatttgactttgacatgtgagatataaaaacactgtgaacaacacaaatgttcattcaaggaggctatttaaattaactatggtacatccaggccatggaatatgatgcaacttgtattagtcctttctcccattgctataaagaaatacctgaggctgggcaatttataaagagaagaggtttaattgtctcacagttccacaggctgtgcaggaagcatggtgctggcttctggggaggcctcaggaaacttacaatcatgatggaaggcaaaggggaagcgggcacctcttacgtggcctgagcaggaggaagaaagggagttgcctacacacttttaaaaaaaacagatctcgtgagaactccatcacaagaacagcaccaaagggatagtgctaaaccattcatgaaggaccacccctatgatccaatcacctcccaccaggccccacccccaacactggggattacaattcaacatgagatttgggtggggacacagatccaaactatatcacaactgtaaaaaaaaaaaaaagacaaagaagaaagcaaagaaaggaaaagagtgtgaaattcctgctcctgcctgtgttaacagagggcctctatacagagggttgagaggagaaagcagggtggagaacaccacctgtggattgccctttggggcctactcacatgggcccaatttctcgtaaaactagtatttagggtttcttttgaataaacatagaaattggcccaccctgtcttaaaacttgggaaagttacatttgtcttatctgagctcctttctcaggaaaccaaccatcgggcctcccagacagtatcaaggcgctgaaactcagtaggtccttgaggccagacccctcaccagtcatgactgcctagctgcctcctcactctccctaattcctgttttcccacacagggtgacatttcttccctgctctggaaacttctaattttagtgggctgaggagagggatttgtgactgagcgcccatctctgggctgtagcacttgaatgaggccttcttccctggcactgctgttggtgattggctttctgtgcagggcagggggcctagatgacaaccctgatgtttgggtagcactgtcactgtgagaggcatggaaatcctccagttcttagtcttcttggaggaaggaattcagacaagagatgcctagcaagaggtatagggttaagtaacctttatttaaagagtcaggatctcagagagacaagacagaacctgccactcaggagatagagccaaaagctagtgacttaggaggaattcttttctttctctttttttttttatttttttgagacagagtctcgctctgtggcccaggctggagtgcagtggcgcgatctcggctcactgcaagctccacctcccgggttcacgccattctcctgcctcagcctcccgagtagctgggactacaggcgccaggaggaattcttatttgagcttttagttaaggaaaacagtacagcttgaaagaggaactgctcaaaagaatgagtcagtcgctactcacgctggggagaccctcttgatgagagttttacaggattactcacgaacggcccaggcaggggccttactagtaagcacgttttgggaagtcctcagggcacgcaggcaccgtgacctcacacactagtgcgctggagtgtgtcattagcatctggaatctctccccagggatgtggtttttgtttttttttttttttttggtattataatgagctaaaagctattcaggggcgagttatcagaggtgagcccgtgctcttcagcggagaagatcccctacctggccgccggccactttctgtgggccgtggggtcctcaaggagacggcccttgggctcaggggctgcgtttccacacgcgcctttcccagggctcccgcgcccgttcctgcctggccgccggccgctccaacagcagcacaaggcgggactca

SEQ ID NO: 41209 - DNA, 2300 bp, Homo sapien
gctaagtctttaaaaaataactttttttttttttttttttttggagaagtgaggtctctctatgttgcccaagctggtatctaactcctgggctcaaatggtcctcagcctccccatggcaaggattatagaaatggcccaccatgcccggtcaacttaactctttcaatcaattgccaatcagaaaatctttgaatctgcctatgacctagaagtccctctgtcacttccagttgtccccacctttctggaccaaaccaatgtccatcctgcaagtattcattgatgtcttatgtctccctaaaatttgtaaaacccagttgcaggctgaccactctgggtacaagttctcaggatcttctgaggccgtgtgacaggccacagtcacttagatttggctcagaataaatctcttcaaacattgcacagtgtttcactctttttgttggcaaggggacaacatgggtgaccaggaggctgcattctttgagcaatggccaacaggctcaacggctatgtcctcagtcccttcagcccaaaaggccacccctccctggggcagagggctcagagcccagctacgacaaggtgacacttcagggacaagtgtgagcaatgctagggtgttgggaataggcccccaaaatctggccataaacaaaatctctgcagcactgtaacatgttcatgatggccatgatgcccacgctgggaggttgtgggtttaccggaataagggcaaggaacacctggcccacccagggcagaaaaccgcttaaaggcgttcttaaaccacaaacaatagcatgagccatctgtgacttaaggacatgcccctgctgcagataactagccaaacccacccctttattttggcccatccctttgtttccctaaggggtacttttaatctataatctgtagaaactgtgcttatcactggcttgctgtgaataaacacgtgggtaaatctctgttggaggctctcagctctgaaggctgtgagacgcctgatttcccactccacacctctatatttctgtgtgtatctttaattcctctagcaccgctgggttagggtctccaggaccgagctggtctcggcactgggggagctgccctgataggtagtgagctccctgtccctggggctatcaagcagagccaggtgccgccccagggagctccttctttgagggcggtccagaaccctggaaccccagcccaggcccaggcctgaatccggagcttgtttaacccagcaattccgggaccccatccccggtcgctggcatccgctgtcattcgagagcctggggctgacggggagagctggtccggccttctctgggccgcctttcctccccagcctcgtcaggaaggggcacaggacagccgagctgtgcgacagcccgctgggcctgcgccccagggcctccggcgacacttggagtccgcagctgagtcactgactctcacccgggctcccccgcttccgcccggccgtgatttgctccggtttcaaaagggaggaagggcgggaatgctcgggaagagcctggggttggcaggacctttagggggtggaatgaatgtcgtgagggcgagtaaggaggtaccggctggggctgaaaatgcgcacggggaccatgagcgtgattcgccctgagccgctgcgaacgccctgcgagctggggtggccctggaggtcctggagcagaagctaggttcccgcagagtccgctgcagcgccgctggcgatcgggctgggtcccattttccacgaaaagtcccgcggcttcggccgcggaggtgctggagcctttgcgctcagacgaagggccgaacggccagggccaggccgcgtcttcagagcctggcgagggtctcgcgctgctgggaaggcggagacgccggggcgcgcgtgcaccctcgcgcctgcagcgccgcgcacggccgccaggtgccgctgtggcgctcagcgcgccgcccgccccgccccagggaacgcgaaagtggcgcgggcctggacggcgggacggaccacgtagggcgctgagaaggtcgcgccacggtgggcggggctccgggcccctccccctcggccgccctcgcgctgtggttcgctccgggcgcgctgcgctcgtgagttcccaggaggcctggcgggcaccgtaaccagcgccgcggacaccggcaccggcgccacggactccgcaggaccccgcgcccgccgccgccgctatgctggggctgctggtggcgttgctggccctggggctcgctgtctttgcgctgct

SEQ ID NO: 41210 - DNA, 2300 bp, Homo sapien
cagctagtggggaggctgaagcaggagaatggcgtgaacccggaaggcggaggttgcagtgagccgagatcacgccactgcactccagcctgggcgacagagtgagaatccgtctgaaaaaaaaaaaaaaaaaaaagaaaatagtaatattgattcttgcaaaatatagtaattaagaaaattactcctttatcacaaacccttgtagcagatcacatctccccatatatacaagcattgcacctagggtggacgcgttcctcctcttacaggaacatgctactgggtctacggaccagctattctttcaccgctttaccttaataaacttgctttcactgtgcgctgcagactcgccctgagttctttcttacacaagatccaagaaccctcccttgaggtctggatctgaatccctttcctgtaacatcaggactgagatgagacgttgaccctcgtctgctcgggaggcacctgtccgagaccggagagggcagtgccctaagggcacaccaggggtgcacaggccctggcttcctgcacggacgctccaggcaacttttctggcaactggtctggccacatcggcctggtggccgtccccagggccccaggtgccatgctgcaggggcggttctgccctgctgggaggagcgagccctgggaggtgcatggccctcctctctccaactgcagaaaggccagaaggctttcagctactcggctcaatacctcaaccccaaacccaggtgaccagaacccagcccttcagctctaagctgtgtgaaaggggggctcaggtcctcgggaactcctaggaacctcttctaactgatcacctctccaacctatattcaggaccaaggaccagagaggtcaacactccagccacagaacagagtaccaggagagaggagaggggtgaacacgaaaccgtgaggggccaggttaagaaatggcaggagggaagcacgctaagcccgactatgaagagttgattcggggaccctaggaacccccacgaacaaaggcatcagtgaggaatgcccccggtagagagggaggggcgggagcggtaagaggcaggactccagcagtatccgaaagaggtgcaggcagcgggccttccctaggggagggggccagggactaggaggagcccccggaggtcccacaaaggccgtgctccggggccaggggcgggggccgctcaccctgcgctggcacaggtgctgcacgacgcgctcgggtgaggtgcccagcaggtgctgccggaagcgcagcagcgcgcacacgaagccgtcccgcaggctgacaaagcgcgcctccaggtagaacgcgcggtcgtcccagcccagcaggcgggtgcgcacctcgaagggctccagcaggcgcagcgagcggcggtggcgcgcgcacgaggccgccagcaccgtgtgcgcccgcaactccctcagcgccccgagcaccccgcagcgggtcaggtgcgcgacgcgcgcaaagtcggcctcgcgcaggtagcgcgcgttgttcatgtgcagcagcaggtccaagtccgagggcagcacgcggcccgggaagcgctgctcagctagcaggtcacggacgcgcggctgcagcaggcgcgcgcgcagcacggcgcacggaaggcgcaccaggtaccagacgtccagcagcgcaaagacagcgagccccagggccagcaacgccaccagcagccccagcatagcggcggcggcgggcgcggggtcctgcggagtccgtggcgccggtgccggtgtccgcggcgctggttacggtgcccgccaggcctcctgggaactcacgagcgcagcgcgcccggagcgaaccacagcgcgagggcggccgagggggaggggcccggagccccgcccaccgtggcgcgaccttctcagcgccctacgtggtccgtcccgccgtccaggcccgcgccactttcgcgttccctggggcggggcgggcggcgcgctgagcgccacagcggcacctggcggccgtgcgcggcgctgcaggcgcgagggtgcacgcgcgccccggcgtctccgccttcccagcagcgcgagaccctcgccaggctctgaagacgcggcctggccctggccgttcggcccttcgtctgagcgcaaaggctccagcacctccgcggccgaagccgcgggacttttcgtggaaaatgggacccagcccgatcgccagcggcgctgcagcggactctgcgggaacctagcttctgctccaggacctccagggccaccccagctcgcagggcgttcgcagcg

SEQ ID NO: 41211 - DNA, 2300 bp, Homo sapien
ccacccatccacccatacatcctccacccatttcccatccatcccccatctatccacccatccatccatctatccatcccatattcatcccccactcatccatccacccatccatccacccatcctccactcatcccccacccatccacccatatatccttcacccatttcccattcatcccccatccatccatccaatccatcccccatccattccatattcatcccccactcatccatctacccatccatccatctatccatccatccatctatccatccatcccccacccatcctctattcatcccctacccatccacccatacatcctccacccatttcctatccatcccccatccatccacccatccatccatctatccatctacccatccagccatctatccatcccccactcatcctccactcatcccccacccatccacccatacatcctccacccattccccatccatccctcatccattccatattcatcccccactcatccatccacccatccatccacccatccatccatctatccatccatcccccacccatccttcattcatccctgacccatccacccatacatcctccacccatttcccatccatctcccaccatccacccatccatcccatattcatcccccactcatcagctacccatccatccacccatccatccatccacccaaccatccccaacccatcctccattcatcccccacccatccacccatccatcctccacccatttcccatccatcccccatccatccaaccatccatcccccatccatcccatattcatcccccactcatccatctacccatccatccacccatccatccatccatccacctatccatccatctatgcatccatcccccacccatcctccattcatccccaacttatccacccatacatccttcacccatttcctatccatctcttaccatccatccatccatcccatattcatcccccactaatccatctacccatccatccacccatccactcatgcatccacccatccatctcccattcatttacccatccatcccccacccatctatccatccatcccctatccatcgcctattcatcccccattcatccatcccccatccatccatccatcaactcatccatctatacaaccacccattgggacatcacaggacagagaaaccagagaggctggtatacctggaaggactgtggagaggggcaccttagtgggtctcacagcatggggaagatgtgggacatcagatgggagaccaggcaatgtggtcattgagcggtatggcataggcaggcatgcgtgtggaacagggtgtcgtggggggcacgcagtaaagagcagacaacacagtcaggccaggaggctggagggtgagcagaaccttattgtcaggcgcctaaaatcaagaaactcaggtttggtctaaaggccattagtgggaaggggctggcagtgatgaggggccactcctgggcccaaccttgtcagcctgagagtggtctagctggcccatgctaccctcacctgacacctgcttcctacctctggtttctactttgcaggtgtgtatcaggtgtacacagaccaggtagaggtctgtggagagggctgcaggccaggctgcagggaaggggtgccaggcggggctagagcaacaagggcagaggctacactgaacctgggtcttaagggtcccccaggctggggctgggtggcctatgtgaaccccagaggcacagccaggacatgggggctcatcagaggggcagtctgagctcagcaggaaaggccttctctgtcagagctgtcccaggaccactggacatggctgaggaacagtgagttccccagtgttggaggtgtgcaagcagaggcctggccatcgtcctcagacagagctcccagatccagctccctgcccgtctgccatgttcctgccagctgcctccccactgggccctttaccacgttcctgactcacacggccggttctgccaccgcccagaagccggtgcccaagggcctgggtataaatccttgatgtgaggctggctacctctcatcacttctgagcacggagcaatggcctctcgctgggctgtgcagctgctgctcgtggcagcctggagcatgggctgtggtgagtgggccgcaggctggtggggaccctgcctctgagcttgtctgcccacctcctagggggatggggctgttgggggtgctttgtggctgagagcctccttaggcctccatgag

SEQ ID NO: 41212 - DNA, 2300 bp, Homo sapien
tctgatcctggtgatgtgctgaactctgatatttgtaatatgctgagccctgatcttaataatagactgatcccagattctggtcacacactgagccctgacccagaagttcctggtggaactgaggagggaagggtgtggtcttcctggaacacagtcctcccaaacaaagccagcccagaccctggctaggccacatttttccacaccccaatcaggcagctgcaactttgcagaaaggcttagcctggatctctccaatgggggtcaggcagatattctaggaggaggtgaatgcctgggggccaggcgtgtattctgggtagaaggcacaggtggggcccctgggtctgaggacaggaaggagctgggccatgccatggcagaggaattgggtcaggcctcaagaggaacccagggtgtgtagggtggggtgtctaatccagttagctgcacccagcatcaatggccagttgcagcgtggctgagtggcaccatgaaaaaccagacaggcttgctgctgttcagccttcacccaggcctggctgggcggccttgcctaagtcaattacttctcagagccacagttcccttatgcaaaataaattcattagcactgtgcacctctgaagctgcagtgaggaaaagtgagatctgctaggctaagtctctgacacaagtggggcgctagggaatccttggtgccccactcaccacccctgcacactccacccccacctagtctcagagagacacaggctctcccagccactggggcgaagaccagatcccaaacagctgatgcagcaggaaagtgtggggacaccaaaagggccatggcagggagggggtgcgggcaggagagtgcggtcgaccaaagacagaatttcaaacactgggacagaagagggaagggcattcctggcagtgggaacagcaggagcaaagaccaggatgaggtgggatttgggtgctcaggctgaagagctccagtgtgagtctgggcttagctgagatcatggccttgaccgccagggcccaggaagacacaggctgcttgtcacacatccctcccccaacccccacaccctacacactggcagctgcaggactgggagcagggggtggcaggatcacagaccagacacaacctggggaggctggagcaggcagtctggggggatgtccttggggggagctgggagctgagcaggagatggtctgaggcatcccaacccaaaatcactgtcccctgtctgagccccgggtaaggaactttccctcaatttccttacctgcaaggaggtggtaagccctgcctgagggcagctttatcagaaggttagagatgaaggtacccagctggcaggtggctgggggcatgggattagcacccccaagagaccccagctcctccccaccccactctctatccaggaccttctctgctgacccagtagtttttggcatttgtctccttaagcctctgagcacaccctgtagctggctgtccgggtggcagttcactcccaggcccccaacacccagcctgaccactcaaaggagctcggaggtgggaccaaggtcctcctggaaagattccagcccagaatcttggaagatccagcacacagatctgccttggaacacagatgacctgaggcaggagggatccctgaggagccagcagcagagagtggcccgtaacactcccctgcccccttccaggcagtctggggggtccctgggctgcctggggtgagccagtgggggctctcctggatgaggggggtggggagaagagccgagcacagggtgtgtaggagtcaaggagggtccccacaaagggaagaaggggcggccccaggccatggtggcggaggcggggagctggaggggtcaggaaagggcagggaggggaccggcctgatactggaggaatgaggaagggacagggagggtcccagttgggtggggtgggcctagagggccaggctgggagtgggaggagcagcctggaaggctggggagcccctggaggggcggggtcttcacacctccaccctggggaaactctaccccactaatccgctcagcagaccagtctgtcgccacctcacttggtgtctgctgtccccgccaggcaagcctggggtgagagcacagaggagtgggccgggaccatgcgggggacgcggctggcgctcctggcgctggtgctggctgcctgcggagagctgggtgaggtgtgggacccacaggggagctgggacggagggagatgccacccactgacattc

SEQ ID NO: 41213 - DNA, 2300 bp, Homo sapien
acatggccaggtcagcatggggacacccggctccagcaggagctctggtctgtcctggggtctttgggggcagggctgcggccctgggcaggcttcctccaggcggaggtcctggggaagtgggggagccaggccagctgccgcctcccccactatgtagcatctgattcgtcatctctcatgaaggcgatttggttcataactctgaaactctgaaaaaggtcaaaagaagcagagaggccctcggtggatatgccagcttttctgccggtgctttctcccactactctgggtggtctgctctcctcttcaaacctcagctcgcagggagggcctgaatctgccagcccctcaggatctccttccctctgggccctccccagccttaaggagcctcccagacagaagggtggacagagccacctgggcagcccgagagacacacgggggtcctccctgtggacagccctgccagcttccgcccagccctgagcttcatttgcatcttgaggagtaaggggtggtgaaatgggaatgctggtctggctcagctggtcgtgggcataagtgcccgctgaatggatggcatctctccctcctgtcttatgttctggggtccaggtgcttcccagggccatgcccctgctgctaatgcttgccctaacccttaccctaaccagcgtccagcgtcgtctcaccgagccgtaaataaatcaacagattcgcattgtctgcgcttctctccagccccactgcctcggcctgagctcgggcctcacctttccagcctggctgggctggcactccaggctgcatgcagccactttcctgtctaccctacccggtccaggtcctggacttttctggcctctaggcctgacctgtcctcggagccaggcacagggagggagacaggcagggctcctggggcttgctgagagttgctcccagttccgtgggagagaggccaccccccacccagcacccctgaggggcatacaaacccctgaggaagtctgggtgtgcggggtaagggaggcgggaactcccccaggaccccatcccaccatctctgacctctctgcctacctggttcctgaccccagcttctcgactgccccaggaaggagggcctggatctgccagcccctctttcaggatctccctcctcctgggcccacctcccagccataaggagcccccgaaacggaggggtagacagaagccatgtgggcagcccgagagacacataggggtccccgggttggcatggctgactggctacggacaggccctttggggccccagcccctggccagcctttggaggaacagctgatggctcccgctctccagggtgtcccttctgggctcttaccttatccttggggtcccttttagtaccaagggcctttctgtcccccctactcctctgcacagatcctggggcgttagtcacagtgtgacaatggccatgattccctgtacggatgacagagaggtggctcacaaccatgctccctctgtgttctcccagccctgcgggggtcaggatgggaaagctctggcttatttggaggaggtcttgtcatggaactcattctagggtgggagtacagatgaaggcctgtggcttccacccagccctgagcttcatgtgcattttgaggcgtaaggggtgggctggtggctggtgcccaagaccctccttcccaccagaccttccttcccagcctctgagggagaccggcctgtggccgtcacctgcctggtgccaggccttccttcccagccactgagggagagtggcctgtggccattgcttgcctggtgccaggccattttatcagatcctcaatcctgtcagccagggctatccctactttatggacaaggagagatggctcatgagatgacaccggcccgctcagaggcctaaccagcgagctttggggccaggttggcccctaccgcccggaccccagcccggctccttgactgagcccggctgcctggtgactcagacccgcagagtctgctgagcgggcgagggccagggcggggtgccagcaggtataaggcagccggccagggcgccgacagcccgacctcaccaggagaacatgcagctcggcactgggctcctgctggccgccgtcctgagcctgcagctgggtgagtccaggggctggggccacctcctgctcaaggcccccatcactctagcccaaccaccgtccctccagccctgggctgtgactgcccacctcgggagaacccattcctgtccccccaccatct

SEQ ID NO: 41214 - DNA, 2300 bp, Homo sapien
gctctatcacccaggcttcagtgcagtagcgtgatcacagctcactgcaacctccacctcctgggttcaagtgattctcccacctcagcctcctgggtgcaacctcaggtgtgcaccaccacacccagctaattttttggtatttttttttttttagagatgaggtctctctacgttgcccagccaagcctggtcttgaactcctgggctcaagcgatccactcgcctcagcctcccaaagtgctgggattacaggcgtgagccgcggtgcccagcctgcactactattatcatacaatttacttctacatttgctataaattccttaatacattgttattatttttgctttaggtaatcaactatcttttaacttgattcaaaaataagaaaaaaattaccttctatttcctatttctggtgtcatttattcctttgtgtagatccgtatttctgcctgaagaacttcctttaacataaaggtccccaacccctgggtcacagaccggttaggaaccacgccacacagcaggaggcgagcgctggcgggcgggcaagggaagtttcatccgtattaattcatcgtggtctgaggctgaagaccgcgacatactctggttctgacctatgcgttccttccacgccccttatcccaccagagtgtgagctccatggggtgggaatattctggaacgtctgctggttttattctttgccttctccccaactaggacctggcacaggagggtgcgcattacctctcggcaaacagaacaactaactggcctagtttgctggggaccgaaggatttcctggaaccggagcccgcttgcccagcaggcatggtgtattctgtacctcaggcccgcaaaaatgttttaaagaaaaaaatgagctttagggtagaagaaaaggttttatttttctttctcacattggaaaaaatgaaaactttcggacccatgaaattttattacattttgccaaaaacagaaccaataacataagtattcaaagttatgtaaagataattatttaatatgaacattatgatggtgagagggaccacggagcaaggggctgccttgcaggcctgccttccagctttgctacagggaccagaagcgggagctgagcgcaggggaggcaggcggaggccatgggcagcgaggcgggtgcgccaaagggcgccagttccggagctgctgggcctgggctgcaggagggcggagctggggccgcaaggctggtgccggccgacaaacgacgcggcgcgggcgagtgggcggaggcggctgcggggaaggctgggctgccgcgggacgcggtgaagatagcctgcggagtgtccgggctgaacacgtgagtctgagggtcgccagggaatcactgcgtggctgcctctgtgtcggagatccagatgcctggactggcctcggggtcccagcgcttgcccggcgagccggcggtccggggacgggtccgggccgaggcctgcggtgaactcggctcggcgggtgcccaggaggcgggtccggggcggggcctgcggtgaactcggctcggcgggtgcccaggaggcgggtccggggcggggcctgcggtgaactcggctcggcgggtgcccaggaggcgggtccggggcggggcctgcggtgaactcggctcggcgggtgcccaggaggcggggcaggggcggggcctgcagtgagcgcggcttggtgagtagcccaggaggcgggtccggggcggggcctgcggtgagctcggctcggggggttgctcaggaggtggggccggggcaggcctggggcggggcctgcggtgagctcgcgctgggcgggctgttccgggggcgggactgggctgggcctgcggtgagcatcaggcgatgcggcacgggtgctgcgggacacacagacacgcctacgattagactcaggcaggcacctaccggcgagcggccgcgggtgactcccaggcgcggcggtacctcacggtggtgaaggtcacaggtgaggtcaccctgatagtcccgctcgcgccgagagccctcccctcgacctgggaccgcagtgtttggggcggggctctccgtgagggggttgggaagctcgaagccgcaggcctgactctggcctttggcatcctggggttggcctgggcaaatgtgtcgtgagagacggatttgttgttctcgggaaggcgtaagtttaatttagtcctccaggacggagaccgagggccgagtatcccggcaggggtaggagagccgtaatccaacccccacctccccact

SEQ ID NO: 41215 - DNA, 2300 bp, Homo sapien
ctcattgttttttcctttctcctcttctgcagtctctgtaacatgtgcttttataaataaataattctgtatcatcacttttgttgatttattaactacagtgctttgacttttgcttttttctttgtctttttttagtgacactttagcgtcttagcatacacctttgacttactagtctacctccaagaaatagtaggccacttcacatagagtagaataaatctacaacagtgaacttccattgtccctctcctggtctatttgtattactatttttttttaaatttatttgacacagcgtcttgctctatcacccaggcttcagtgcagtagcgtgatcacagctcactgcaacctccacctcctgggttcaagtgattctcccacctcagcctcctgggtgcaacctcaggtgtgcaccaccacacccagctaattttttggtatttttttttttttagagatgaggtctctctacgttgcccagccaagcctggtcttgaactcctgggctcaagcgatccactcgcctcagcctcccaaagtgctgggattacaggcgtgagccgcggtgcccagcctgcactactattatcatacaatttacttctacatttgctataaattccttaatacattgttattatttttgctttaggtaatcaactatcttttaacttgattcaaaaataagaaaaaaattaccttctatttcctatttctggtgtcatttattcctttgtgtagatccgtatttctgcctgaagaacttcctttaacataaaggtccccaacccctgggtcacagaccggttaggaaccacgccacacagcaggaggcgagcgctggcgggcgggcaagggaagtttcatccgtattaattcatcgtggtctgaggctgaagaccgcgacatactctggttctgacctatgcgttccttccacgccccttatcccaccagagtgtgagctccatggggtgggaatattctggaacgtctgctggttttattctttgccttctccccaactaggacctggcacaggagggtgcgcattacctctcggcaaacagaacaactaactggcctagtttgctggggaccgaaggatttcctggaaccggagcccgcttgcccagcaggcatggtgtattctgtacctcaggcccgcaaaaatgttttaaagaaaaaaatgagctttagggtagaagaaaaggttttatttttctttctcacattggaaaaaatgaaaactttcggacccatgaaattttattacattttgccaaaaacagaaccaataacataagtattcaaagttatgtaaagataattatttaatatgaacattatgatggtgagagggaccacggagcaaggggctgccttgcaggcctgccttccagctttgctacagggaccagaagcgggagctgagcgcaggggaggcaggcggaggccatgggcagcgaggcgggtgcgccaaagggcgccagttccggagctgctgggcctgggctgcaggagggcggagctggggccgcaaggctggtgccggccgacaaacgacgcggcgcgggcgagtgggcggaggcggctgcggggaaggctgggctgccgcgggacgcggtgaagatagcctgcggagtgtccgggctgaacacgtgagtctgagggtcgccagggaatcactgcgtggctgcctctgtgtcggagatccagatgcctggactggcctcggggtcccagcgcttgcccggcgagccggcggtccggggacgggtccgggccgaggcctgcggtgaactcggctcggcgggtgcccaggaggcgggtccggggcggggcctgcggtgaactcggctcggcgggtgcccaggaggcgggtccggggcggggcctgcggtgaactcggctcggcgggtgcccaggaggcgggtccggggcggggcctgcggtgaactcggctcggcgggtgcccaggaggcggggcaggggcggggcctgcagtgagcgcggcttggtgagtagcccaggaggcgggtccggggcggggcctgcggtgagctcggctcggggggttgctcaggaggtggggccggggcaggcctggggcggggcctgcggtgagctcgcgctgggcgggctgttccgggggcgggactgggctgggcctgcggtgagcatcaggcgatgcggcacgggtgctgcgggacacacagacacgcctacgattagactcaggcaggcacctaccggcgagcggccgcgggtgactcccaggcgcggcggta

SEQ ID NO: 41216 - DNA, 2300 bp, Homo sapien
tcagatgttgtttgttttgctttgtgtattttgaagcttaattgttaggtgcatacatatttagaactgctgagtcctcttcatgaactgatcaatttatcatttggtaatgtccctctttttaaattttttttctttctttctagtacagatagtgttttgctgttttgccctggctggtctcaaactcctggcctcaagcaatcctcccacctcagcctcccaaagtgctgggattgcagatgagagccactacacctggccagtaatgctcctctttatttctgattatagtctttgctttaaacctactttgatattgacgtagtcatgtctgtgttcttttaattggtgttagcatagtatatctctctccatctttttacttttatcttatttgtgtttttacatgtctggtgagtttcccactgacagcatatacttggctgtttctatttttatccaatctgacaacctctgtttttaattgagatgtttttgtttgtttttgaggcagagtctcactcactctgtcgctcaggctggagtgcagtggcaccatctcagcttactgcaacctctgcctcccaggttcaagcaattctcctgcctcagcctcccaagtagctgggattacaggcacccaccgccatgcccagctaatttttgtattttttagtagagagggagtttcaccatgttggccaggctggtctggaactcctgacttcaagtgatccaccttcctcagcctttcaaagtgttgggattacaggttaggattacaggtgtgagccaccgtgctcagcctgattgaagtgtttagatgacatagtgtcattattgctgtggctgggtttaaatatatgtcatcttgctatttgttttctatttgtctcattgttttttcctttctcctcttctgcagtctctgtaacatgtgcttttataaataaataattctgtatcatcacttttgttgatttattaactacagtgctttgacttttgcttttttctttgtctttttttagtgacactttagcgtcttagcatacacctttgacttactagtctacctccaagaaatagtaggccacttcacatagagtagaataaatctacaacagtgaacttccattgtccctctcctggtctatttgtattactatttttttttaaatttatttgacacagcgtcttgctctatcacccaggcttcagtgcagtagcgtgatcacagctcactgcaacctccacctcctgggttcaagtgattctcccacctcagcctcctgggtgcaacctcaggtgtgcaccaccacacccagctaattttttggtatttttttttttttagagatgaggtctctctacgttgcccagccaagcctggtcttgaactcctgggctcaagcgatccactcgcctcagcctcccaaagtgctgggattacaggcgtgagccgcggtgcccagcctgcactactattatcatacaatttacttctacatttgctataaattccttaatacattgttattatttttgctttaggtaatcaactatcttttaacttgattcaaaaataagaaaaaaattaccttctatttcctatttctggtgtcatttattcctttgtgtagatccgtatttctgcctgaagaacttcctttaacataaaggtccccaacccctgggtcacagaccggttaggaaccacgccacacagcaggaggcgagcgctggcgggcgggcaagggaagtttcatccgtattaattcatcgtggtctgaggctgaagaccgcgacatactctggttctgacctatgcgttccttccacgccccttatcccaccagagtgtgagctccatggggtgggaatattctggaacgtctgctggttttattctttgccttctccccaactaggacctggcacaggagggtgcgcattacctctcggcaaacagaacaactaactggcctagtttgctggggaccgaaggatttcctggaaccggagcccgcttgcccagcaggcatggtgtattctgtacctcaggcccgcaaaaatgttttaaagaaaaaaatgagctttagggtagaagaaaaggttttatttttctttctcacattggaaaaaatgaaaactttcggacccatgaaattttattacattttgccaaaaacagaaccaataacataagtattcaaagttatgtaaagataattatttaatatgaacattatgatggtgagagggaccacggagcaaggggctgccttgcaggcctg

SEQ ID NO: 41217 - DNA, 2300 bp, Homo sapien
ctggcagggacgcagccacagtgatgcctgaggtgtcccacgggggtgagccaggtgtgcagggccctcctccagccccaggtgtggggagcacactcccccatggccccacactcagaacccactctcaggccacctgacatcccggaccctccagctccaccagacccagcaggaattccaaacctgtttttccagcagctctcatgcccctggccacagtgagtcaccctccccacctgccatgcccaccgagtcatcaccccgccaccaagccctgagctctgcctcccaaggcccctggaagcaccttcccccaagctgcccatgcctctcactgtgacccatggacacagggccttggagctggaggaaacctcctctctctgggtgggggcatggacctttgggtcacctgccttggcaagtgagactacacacgtccccaccaagctccagccagggccaggcaccagatgcaaatgtggggctgccccagggggctcccgcctgcaccctggtttctaaaggcaccaccaggcaacccctcctgtaggtggatcctccaggccccggcactgtgtcagggagagcccggccaggagcattctcaggagacatttgctgggatccccggcatctgagacgtggggctcagcaagggagagatgccgggaggaagggccagagggtctgtctcaagcccaggcctgactggccccagtacccacggtgctcccaaaagcctcagcccagcccaggaccaccctcctcggaaccggccctgccctgccctgggcctgttgttgtctgttcatcagccacgtggcagcggcggcaggaggctgggcccagggctgacctccatctgtgccccggctcccactcaccttcagcctagccagggcaggggcaaagcaagtctgtgggcccctccacaccactcaggtgggtgctgcccagcacaggcgagcggcagagcgtgctgggctgagcaggtggatgggggccccaagaggtgggctcctgcgcgaggcggtgggtgctcagagaccccgtctccagggaaagaaagtccctcctgtgagtataaagagggtgaaggcggggactggcctccactcaacgggcagcagaccaagaacctgctttgaggccctgggtgctggggcccagccccaaagagttcacgattttggggagactggagccgggacacctagagcaatagttacaaagtggccgggatggcgctgcccccaacgtagcaggaggggcctggagagtgggggaaggaatcccacggggagggcttctggggccctggagggcgggaggcagggctggtggagaccaggagggctcagtctctccctgcacaacgcagggtggagttgctgcctccacagcccgggccttctgcccacagggctccccaggcaacttcgagggccgggtcctcacagtcctcactctgtccagtgctcacctcactgctgccccagctgccctccctgcctcggagtggcctctgcctctgcctctgcctcacacaccccatcagcccacagccaccccgagcccttgcagctcaaggaccttctgcatccccggcagcaaccctgagcccagagccaggagagtaggaccagcacctgcccttcctacctcccctgccctggacacccacgggcacccacagggcaccgggcacaggctgcaactctattgagggaactatggggggaatgcagggacaaagacacaggatggtgatggatggtggggggtggggggcggggggtagcgggtggcaggtcagagacaaagtgacccaggaacggacggcagcgagagaacaagacccacagagacagagaagtgaaagtgggagagatggaggcacagcagcaggaacagcagggccaggaggccactgggccccgttgcggagggcagacctctgcctggcggggggcagcaggggcagcgcccagcgacagccaggctggtgggcgtgggccaggcagggtggggcaggtgcccgtcctgggctgacgcttgcacagagccctgcagaatgccgctggctggcggactgcccacccccgcccagcccgtgcctataaggccttggcaatgcaggggcccgcactgctcccagacgacatcagagatgaggacagcattgctgctccttgcagccctggctgtggctacagggccaggtgaggggctgggccaaggggacgggcgggtgggcggctgtggcctgtgtggtcaccaaatactaggagcct

SEQ ID NO: 41218 - DNA, 2300 bp, Homo sapien
caggagcaaaggcagaagaaacaaagtctccaagttagactcccaaggaattcccatataggaatgattggaggcaaatgtaaacatacagccttgaaaagtcaggaaaaaatcaggtcacttccacttctacatgggatgcagtaggttgtggctgctcagaatgtgacaaccgggcaaatcaatccacagagttaaaagtcacatttgaaaggcccttggacagatgtggaagcaccaaggcctgcatgaactgaaattccgcagagggcgagcccttcccagggtaccctttgtcattgcagatacatttgtcactttgggcaccagctgaaagccaggctggctacagacagggactccggtagggaatgcaaaccagagtgccgtcttggctcacggggaaccaaagtggcccagaatctccaggtacctaaagatcaagacagttttcccatggaagagcctccaagtgctgtggtgggagggaccctggggagtcagagaaggccaagtagaatcccccccagtgtggcagatcccaggagacagagtgcccctagaaggagcctgccacagtcataccactggtctccatcataagccagtggccccgatggaacaggtgtgtgggatgaggttcaaggggaaagtcaaagcctagaaagggaaacccgtccgagctgaggattcggtgtgaaaggtgagcatacaaattgggtcacccttgtcacacccaactaaggcagagtgccaggtagggagaccattcagcactcaggatagaaaacattgctccaagaatgtacttctctgaggcctgactgctgaaactgtctgcggtaacctgaaaccagttttatctgatggctactgagaccacctgctgcaactctaagcctcggttcacccactgccgtcactgattcactcatcaaccagagcttgccagctccccaaaatcctactagtgccaatgaaactcagacagcaatatgtactatttctcttctttataaaaaagagacatagttcctttttttttgagacagagacttgatttgtcctgcaggttggagcacaatggcacgatctcggctcactacaacctccacctcctgggatcaagggattctcctgcctcagcctcctgagtagctgggactacaggcacacaccaccacacccagctaatttttgtatttttagtagagacggggtttcaccatgttgatcactctggtcttgaactcctgacctcaaatgatctgcccgcctcagcctcccaaaatgctgggattacaggtgtaagccaccgcgaatttaaaaaagccttttctttgttctttggacatactgaaggccagccagtctgcccccgtgcccctaattgcagttatttcctcccaaataaaacatttcaatttcagaaattcacctattttatatgacttcgacaagagccaagccacactgtgtaggagatgctcgggtgaagccagctgtccctggccacacacagcttgaaggcaaaatggcaggagctcaagcgaaagccaggcaggtctccccctgaaacctctgcacaggtgggcgctggcggggctgaagggcaagggcaccgctcaagctggctttggtcagggttagggacagggccggctccagaggcgacggggtcgcaccctgagcggaggggctcccggggtccccaggggttatggtgatggcgggaccccctagagggagggtccaggaacgaggcaggtggactgggaccttgagggcagggtgggcctgggcggtgccaacaggctgccgagggtggctgctgtcccgtttctccagcagccagggccgtgcgcttctagaacattccccgtggctttcctaaagggagcgtggatggagccagggtgtgcagatttctgtgagaaatattttcacctgggagccccaagggggaccctgcccacctttgaacactggcagatgggctggaggcctggagcctggggacggggctttgagggtccggaaggagggcggggctgtgcggccggcggaggcccccgaaagttccagaaagcgggtggggaggtcggcgcgggaggctcagatggctggaggcggcgggcacgcacactgcggggctccgaggggcacaggtcagtttcctgaggcgggtcgggacccaggcgtgagactggagtctgcccaggggcccagctgaggcagcctcctcgtcagctgcttgggccgccaggacgccgccgggggtgcgccgcgcttccctggat

SEQ ID NO: 41219 - DNA, 2300 bp, Homo sapien
tgtttcttctgcctttgctcctgggggcttaatcacttctgtgcctctggttatctgtggcacatttgtatttgtcattagtcaaccggagactcggggtctgagtggagggtatgtccccctccagtgatggtttctgttggcttcccagggtgaggatgactcatgaccacttgcaagtggtttttgtgtctggggtttatgatcacacagtcatacacgttctaactccagactgactgttgagaaagcctctgggtaaggaattcctgggaaacacactgttttcatgcatcctctggaagatgaggcctgaagttaccagggtctctgtttgctgatgctgatgatccacattttctagcccactctgcttctctgacacctttagtcttgaggatccatgctctgtgaaggaatccaagctctcatttcgcactcaccttggccctggctctgtctccaggacctcttctactacaaaatcctaaagctctgggagctgggtgtcaacctgtgcccgaggaaatcatacagttactgtggactttccagtttgctgtcttctagtattccattgtagctcttgggtattttcccatccaccccaagatccagctggaaatcagtgaacacacttgatgggagttttcctgcatgtgctctgggcattgacagtagaagggtgttcagaatgtctgctgtgccctcatggaggaagagggcctcagtgtacatgctctgggtcagtaggtgcccttgagcccagctttgggagcaagtgttggatgagtgaaggaggcatccagggaaagcaggcacgacagagtggagacggggctgctgggtctcaggggaatgggcatggagtgggtaggagatccacctagggaggctggctggctggacgagtcaggagccccttccaagggtggacactgacaggcccccagtcttggtctcctgcatgccagaggtaccagcccatcttttttcctaaacttgatgacctagggctaggggcattttgaatctcagcctcgcccactggcgctggacttggtacacagggtggggcaaagtgggtactggatcctgatcatccctatccctggggtgtggcttcttgctgcacagtcagcttctagttctgtagccccagctgctcctgcggtggagggagctacacatcaggctctgaccccctccaggtggggccttcgcgtgaggggagtcagcacgcatcagcagctgggcccagggagttgccccactgagcactgcgggctgacctgctcccaaccagggagatggagcttcccccttgagtcgggctgctgaaggggggtaggggatggagacagtgcgtttgcaggagtaagggtgcagttgggtccctgcgagaaaatgtctcagttgtggcaactgattggtgacctggggggcgtttctgagcccacagtgctggcatcaggactcaggtgtgaggtgccccagaccctccccttgccagtaattagctgatggctcggtgatgcccagggtgaaggaagacttgattttgggaggggagttctctcgtaatgacactgaggatgccttcaagttgggcttctggcatgttctgccctcgctccccttctgtagtcaccttggccctcgtgttgctgagctgtgtgtgggagcgggaagcgcgtcagtgggcggagggagcgggaagcgcgtcagtgggcggagtatttgagaacatttcacaagccgctgttgaggttcagaatcaaccagcagatacagaaacatatttcggagcgtggggacccttgggtgagctgccacatgaagcagccccaggacctccctggctcaaggagtgacagcgagtttgtctgaggtgagggcacaggcctggcgaagcctcgtgtgtgggtgagacctgcccgaccccagtgccttacccgaggagctactggcccagtgggggaggcattcaggtgggcagagtcagggagactcatgaggccgttgaggccaggggcatagagctggccaaggagccatggctcactaacgtgttgtatggggctccttcccttcaggtccaggctcctgcgtgaagtgatgctcctctttgccttactcctagccatggagctcccattggtggcagccagtgccaccatgcgcgctcagtgtaagtatcattccctctcactgtcctggagaggacgagaattcacctggggtgctgggggtcactgggatgattggctgcaacgtggagcaagcctccgttagctggg

SEQ ID NO: 41220 - DNA, 2300 bp, Homo sapien
ggtggcgcctggtcaggtgggcagggagaggctgatgcttggagtcagtcacctgcaggaatgttgtcattaggacgggggaaggactggacgaggatgtcacagtggcgacagcccccactccatggcaggaggagaacgcttttgggaatagtggggtttaggtaaaagggcactcaagggtgggggccttcactgaggctggcctacagacgacatctgggagggagtcaggacccaggaaggcaagtccagaaggctgggtgcacataacggaaggaaggggagcgcacctgtatgtgtgtgcgtcttgcatctgtgcacatgctgtgtgtttctctgtacctgcatttgcacgtgttgtgtgtgcatgcgtgtgtgcacatgtgtctgtgtgcatgtatgtgtggtgtgtgtgcacgagtgtctctgtgtgtgcatgtgcaggtgccggcatgggtgtagtgtctgtgcacatgtgtacatgtgtctcttcacacatggtgttgaggtcttgcatgggcgcatgtgagcatgtgcatcttctgcctgccatcactgtcaacagctcacaacagccagctggacataaataaagctttgagttttgcagaaatgtggctgacaggggaaattcctccccaccattccctgggggcatccatggagcccccacgcactctggctgtaggtgaggatggcatgaagcacaaagcttggtttctgtcctgcagaagatgcagacacttcactggggctgctgccccagaggcactgtgcccagggcagggaagggcggggaggagagggcagccaggggctctcccctcaggacactgtgtgggtgaggtgggcaaagcttgacaacaggggtcagttcctttcttgcagaaaatccctcccccctactacagggagggcctgcatgggtgaggtggtgccagacttggggtgccaggtcccgggaatgacctcagttaccctgtcagcacctgtgggcagaagctaccatctcatccctgcttagacctgagtggcctttgtccagcacctggaggccgctctgagaaaaggctgcagctcgaacacaaacaggcagcttctaccagggcccccagtcagctccctgcaggccgattccccttggggacaaggaggatgggatacgggtcagggcctgtgtcttgctggggcggcctcacaagctctgccctggcctctgtaggaatgggcctgaatggcgcttcaaccgattgcggctgaatccagaagtgctgtcgcccaacgctgtgcagaggttcctcccgatggtggatgcagtggccagggacttctcccaggccctgaagaagaaggtgctgcagaacgcccgggggagcctgaccctggacgtccagcccagcatcttccactacaccatagaaggtgtgggccacgtgggaagatccagcctcagagaccctggagtggccagggacggggatgggggactgaagggagtgtggggaggcagccaggaggcccggggctgccttgtgctcagcagtgcatcctccccgcagccagcaacttggctctttttggagagcggctgggcctggttggccacagccccagttctgccagcctgaacttcctccatgccctggaggtcatgttcaaatccaccgtccagctcatgttcatgcccaggagcctgtctcgctggaccagccccaaggtgtggaaggagcactttgaggcctgggactgcatcttccagtacggtgaggccagggacccgggcagtgctatggggaagggacaccatgggggcccaatttctccctctccaccacccagtggggaatggaggccacagggaggggtcggggattcctcaccttcctgccagggagattggtgcgaggctggggctgggctgggctgatccggagaatttgggatgagagcagggagacttgggtgtcggggcagtctgggcaggaggaggacactgaaggatgtctcccagcaccaaagtctgagggctgcctcccgctccccggataggcgacaactgtatccagaaaatctatcaggaactggccttcagccgccctcaacagtacaccagcatcgtggcggagctcctgttgaatgcggaactgtcgccagatgccatcaaggccaactctatggaactcactgcagggagcgtggacacggtcaggccggcaaccagccccacccagagagggtgatgccaagcctgcctcccaggcactgcctgccaatgtcacacggcgcccacgtgtccc

SEQ ID NO: 41221 - DNA, 2300 bp, Homo sapien
tatggccattttcacgatattgattcttcctacccatgagcatggaatgttcttccatttgtttgtatcctcttttatttcattgagcagtggtttgtagttctccttaaagagatccttcgcatcccttgtaagttggattcctaagtattttattctctttgaagcaattgtgaatgggagttcactcatgatttggctctctgtttgtctgttaagtgtgtataagaatgcttgtgatttttgtacgttgattttgtatcctgagactttgctgaagttgcttatcagcttaaggagattttgggctgagacaatggggttttctagatatacaatcatgtcgtctgcaaacagagacaatttgacttcctcttttcctaattgaataccctttatttccttctcctgcctaattgccctggccagaacttccaacactatgttgaataggagtggtgagagagggcattcctgtcttgtaccagttttcaaagggaatgcttccagtttttgaccattcagtatgatattggctgtgggtttgccatagatagctcttattattttgagatacgtcccatcaatacctaatttattgagagtttttagcatgaaggttgttgaattttgtcaaaggccttttctgcatctattgagataatcatgtggtttttgtctttggttctgtttatatgctggattacatttattgatttgcatatattgaaccagccttgcatcccagggatgaagcccacttgatcatggtggataagctttttgatgtgctgctggattcggtttgccagtattttattgaggatttttgcatcaatgttcatcaaggatattggtctaaaattctcttttttggttgtgtctctgcccggctttggtatcaggatgatgctggcctcataaaatgagttagggaggattccctctctttctattgattggaatagtttcagaaggaatggtaccagttcctccttgtacgtctggtataattcggctgtgaatccatctggtcatggactctttttggttggtaatctattgattattgccacaatttcagatcctgttattggtctattcagagattcaacttcttactggtttagtcttgggagagtgtatgtgtcgaggaatttatccatttcttctagattttctagtttatttgcgtagaggtgtttgtagtattctctgatggtagtttgtatttctgtgggatcggtggtgatatcccctttatcattttttattgcatctatttgattcttctctctttttttctttattagtcttgctagcggtctatcaattttgttgatcctttcaaaaaaccagctcctggattcattaattttttgaagggttttttgtgtctctatttccttcagttctgcactgattttagttatttcttgccttctgctagttttgaatgtgtttgctcttgcttttctagttcttttaattgtgatgttagggtgtcagttttggatctttcctgctttctcttgtgggcatttagtgctataaatttccctctacacactgctttgaatgtgttccagagattctggtatgctgtgtctttgttctcgttggtttcaagaacatctttatttctgccttcattttgttacgtacccagtagtcattcaggagcaggttgctcagtttccatgtaattgagcggttttgagtgagtttcttaatcctgagttctagtttgattgcactaaaatttttaaaaagtaaaaaaaatacatgtggtttaatacaattcatgccaactcattccctcgttttttgctataaaccttgcaaggagatgaataatccaaggctcttggataagataagggccccatccatcttgctcctctcagccctggaggaggagggagagtccttttcccctgtctacgctcatgcacccccaatgagtccctgcctccagccctgacctctgccctcggtctctcaggcagatccagggccagttctcccatgacgtgatccctctcgaaggcaaggcaccaggcaagataaaaggattgcagctgaacagggtggagggagcattggaatggcactcagggcaaaggcagaggtgtgcatggcagtgccctggctgtccctgcaaagggcacaggcactgggcacgagagccgcccgggtccccaggacagtgctgccctttgaagccatgccccggcgtccaggcaacaggtggctgaggctgctgcagatctggagggagcagggttatgaggacctgc

SEQ ID NO: 41222 - DNA, 2300 bp, Homo sapien
ccctcagaaaccatgcaagcaagaagacagtggagggaaacatttcaagtgttagaagaaaaaagaaaatacatcaacctagaattctgcatcctgtgaaattatccttcaaaagtgaacataaatattttctcaggtaaataaaaattgaggggattcgctgccaatagaactgacttgccagaaatgttttttaaaagttctgcagagagaaagaaaatgatacaggtcagcaaccctgagctacataaagaaaggaagagcatttcagaaggaatcagtaaagagaaaatgaagtcttttattttttcttaatcttaattgatctaagagtttgctaaaacaaaacaacaacaataaaaataggccgggcgcggtgactcaccacacctgtaatcccagcactttgggaggccgaggtgggcagatcacctgaggtcaggagttcgagactagcctggccaacacggtgaaaccccgtctctactaaaaatacaaaaattagctgggcgtggtggtggcacatgcctgtaatcccagctacttgggaggctgaggcgggagaattgcttgaacccgggagacagaggtcgcagtgagccgagatcacaccattgcactctagcctgggcgacagagtgagactctgtctcaaaaataaataaataaataaataaataaataataaaaataaataaataaaagccagaaagtgtatttgatgatcatagttatgtatatgtgaaatgaaggacagcaatgatgcaagggatgggtgagtggaattaaaaatatcttattatttatttattttgagatggagtcttgctttgctgcccaggttggagtgcagtgggatgatctcaactcactgcaacctccgcctccttgattcaagcattcatcttgactcagcctgctgagaagccgagattacaggcatgcgccaccacacctggctaattttgtatttttagtagagacagggttttgccatgttggccaggctggtctcgaactcctgacctcaggtgatccacctgcatcagcctcccaaagtgctgggatgacagacatgagccactatgcccagcctaagaatatctgatgattataaagtgcttgcattacctctgaagctgtatagtgttatatgaaggtggagttggagagatgagttttaagcgtatattgcaaactctagggcaaccactaaagaagtgagacccagcctctagaaaaaaaaaaaaaaaaggaaattagctatcaagccacgaaaagaaatggaggaaccttaaacgcatattactaactgagatacgtcactttgaaaaggctacaaacggtgtcattccaactatacaacattttggaaaaggccaaagcatggtgatgataaaaagatcggagatgtcagggactggggcaggagggatgagcaggcagagcacaggttttcttttcctctttttaagacagtgaaaatactcctaggatcctgcaaggagggatacaaattacatacatttgtcaaaacccacagcatgttgaccaccaggaggagaccccatgtgactccaggaccctggttgataacaacgtatcgagattcctcacatggaaccagtgcgctcctgtggtggagggtgtacctgtgtcagggcagggggtacgtggacattttctgcagtttttgatcaattttgcaatgaactaaatctgtggtataaaaataaagtctattaaaagaatccaaggctccctctcatctcacgataagataaagtccccatccattttactcctctcagccctggagaaaggagaggccaggtcccaccaccttccaccagcatggacccccagtccagaccccacgccttttctcagcatcctcagaccagcaggacttgcagcaatggggaattaggcacctgacttctccttcatctacctttggctgggggcctccagccttgaccttcgctctgagagtctcaggcaggtccagagccagttctcccatgacgtgatatgtttccagagcaggttcctgggtgagataaaaggatttgggctgaacagggtggagggagcattggaatggcactcagggcaaaggcagaggtgtgcgtggcagcgccctggctgtccctgcaaagggcacgggcactgggcactagagccgctcgggcccctaggacggtgctgccgtttgaagccatgccccagcatccaggcaacaggtggctgaggctgctgcagatctggagggagcagggttatgagcacctgcacct

SEQ ID NO: 41223 - DNA, 2300 bp, Homo sapien
aggaagtaatttggggtgagccacagagcacagtgagagaagcaggtttatttgaaatggctccgttccagagtggggcgtgctcagaaagcaggaggaggagggcctgtcctctgttagtgcctctgcttacaagaaactgtaaggagctacaattacacctggaatgggcagatgcacccactaaggataggggctgtgggtgccatcagtgcccgttcatcctccaacctcaggctgctcattgaaattatctctgagtaaagtggcctgcactcttgggttatctggacagtctgcgggcttgctgggagatgccccatatggccacaaatattctgtaattataattggtgtccagcttgagacatggctatttttagaccataagcattaaccttataggtgccttgtgagtgcctcctactcacttcaagatggagtcactctggtcatgtttcattaaaccagaggcctggtgagcaagcgttcctctaacagtgggaacctcaacgtcgggccagtcggtaagaagttccagaggctggccctcgcagctcatgtgtgtgcatatgtgtgtgtgtgtgtgtgtgtgtgtgtgtgtgtaggtgtctggatctgacgctatctgcaggtaccggaatggtgttggaggacactcggctggtgtccgctgcagaactgatggcttgctcggtggcggggagacgtccacctgccacatttggccccagcagtcttgggagtctcctgtgttgatgtcttctgtgttgagtgagagacaggataaatggtttgagagttttttccaaacagccctcctcctaatgcagcttgttttctgaatcagagggtcctgtcttgaagggggcaaacccacccgtgctttcgtcccacagttcttactgagcccctgccatggcagggatggccccaggtgccggctgcagagacagaaccccctgccctcaccgccaacattccagaggggaagatgccctgcctgtgccccacgtaagacccagaggcagggactcccccgggccacagcctactggaggctcctgtccccagagacagctgggccatcgcccccaaagctgtggaagccccacccacgatgccatcataccacggccaggacatctcgtgacacacacagccccagcctcagcctccatacacacacacacacgcaccacacacactcactcatgcaaaacacacacacagccacattgactgcacccctagatttgagacaggggtgttacaggtgtctgtcagccccagccccctcctgaccacatggccacctgcccaccctcacatttccgcacaccctccccctactcccgtgtggggttcagaagacccctccctggtgctcgccctgtcacccagaaaggaaacgcactgtcaactggagaacaggccggtggcagagccccagcgcccacagcccctcggagagggcctggcgggaggagaggcacccaccgatggcagagcctcagtgccctcgcagaagccagcacccacaacctcccacctcccaacccttgccggtctccccacccccgcctgagggatggccaaggaacagcccagcctggagcgggaagcagggacaagatgacctcaggaatcccaggctgcgggggtgcctgcgtcctcccctcccgagctccactccgcaggcgagacccccaacactgctccccgacactctccgaggcacccctcctccgtgctcacacccaaacacgtctgctcacccgtgggcttcccaccccgaacacaacgaggactgtccaggtgtcagtgacggtcaccccgacctggtcccctgtccggcctcgccaggtcagcacccgccgcgcgcacagcagggccgggtggaaggaggccgggcctggccgtggctcaggcgccacctcactggggaaactgggaggtggtctcagcccccttctgggcctcagcttccccatctatcccaaggagccggggtaggcctgggcggcgcggggacccccaccgcgggctcgccgactccgcccgccggaggcccctcccgcgtcccgcccctgcccccgccccggggccgcgcggctgcctgggaggctccgggccagccgcggtccagagcgcgcgaggttcggggagctcggccaggctgctggtacctgcgtccgcccggcggtgagtccgcgggcccccggccgggacgcccccgccacctgcgcgcacgcgctcagacccggcggcctcggctgcggtgcacgcggccccggctc

SEQ ID NO: 41224 - DNA, 2300 bp, Homo sapien
tcttgagccagggagttcaagactgaagtgaactatgatcatgccactgcactgcagcctgggcaacagagtgagaccctgtctcaaaaaaaagagaaatctatatacacatctatatgtgtatctgtcagtgtatattagctaatctgtatctagaattttccttgggatggctcagtgttttgagcccaggcagctcccctcacatggagacctggggccaggtggggcatggctgagggggaaagcactccccattcctgatgttactcagttccgaggaaagcaccccactcagtatctgctactccccattctgtggctgggaaatgggctccgagagacaaggctgcgtgccactggtcccaccagcaggaaagggccagatgggtcgctgtactgctcctcggcctctgcacaggaccctctgcactgctggagaaagaatctggaacacacccagctggggtcgtgattctctgttttgtgagtgcatggtgttggagggggaggctgctgccttctgtcagggacagccgtgggcagaggagtgggagggacatcccgggcctggggagctagtgctgggcactgggggtaaggaggatgcctcagagaacagatctggagaggggcccgcagaggccctaaggggagagcagcaggccaggacagtgagacctgggctgacatcctggggttgggagtgggagccccaggtggccaaaaacagtgccaagtccggctggggcctatccccgcctccagggagtagcccgaggaggaaggatctccaattccttttccccccacccccctaaagtgaggttctggtgtgggggggtccctgagctgtctctgaggaagtcctagcatacagggccacaaacaggtccagctggtgccgccacctgctcactgggtggcacccaacccgctgggccaccaggctgagctaaggcaccggtgggagccgaaggcaattaggaaggccgggtgggccatggagcccggagggagccagccggcaggccgtggggggcgcccctggggcccaggctgcaggctcatggctcatccccaggctcagggaagctggcccctgggagccaggtatctaggggctgcccagccagcaaggggcgggagcctctcctgtgtcccggaacggggaggggcccggcggtccactcagggaggctgggctccttggacctcaccgcaagcaccaccagtgccaaaacaagaagcgggggcgggttccagtgctccggggtgatatgccgggggcggtcaatcctccctttccggccaggagctctgcaaggtcccgtgccccctcccctagtcctcaaggctgtccctcccggcccacgtagaggagccaggagcgtctggagttgggtgatgggctccagtggctgcgcagccctggggcggccgggaggctcctggcggcagtctccgcccgctcccgccccagatctttggaaacattcggggaggcctgcgggggatgggaggagaagctcagctctctggggaccaacccaccggcagccccagcccctctcctgcgcctccccgtgcgcccctcttgctctctcccaccctctcccgccccggcccccgcagggcgccttccgccgcgcgtggctgagccggggccgcgtgcaccgcagccgaggccgccgggtctgagcgcgtgcgcgcaggtggcgggggcgtcccggccgggggcccgcggactcaccgccgggcggacgcaggtaccagcagcctggccgagctccccgaacctcgcgcgctctggaccgcggctggcccggagcctcccaggcagccgcgcggccccggggcgggggcaggggcgggacgcgggaggggcctccggcgggcggagtcggcgagcccgcggtgggggtccccgcgccgcccaggcctaccccggctccttgggatagatggggaagctgaggcccagaagggggctgagaccacctcccagtttccccagtgaggtggcgcctgagccacggccaggcccggcctccttccacccggccctgctgtgcgcgcggcgggtgctgacctggcgaggccggacaggggaccaggtcggggtgaccgtcactgacacctggacagtcctcgttgtgttcggggtgggaagcccacgggtgagcagacgtgtttgggtgtgagcacggaggaggggtgcctcggagagtgtcggggagcagtgttgggggtctcgcctgcggagtggagctcgggaggggaggacgcaggcacccccg

SEQ ID NO: 41225 - DNA, 2300 bp, Homo sapien
ctgagaactcactcactatcaccagaacagcaagggggaggtctgaccccacgatccaatcacctcccacgtggcccctccgccaattccacatgagatctgggcggggacacaaatccaaaccatctcatcctgtaacttctttctccctaaagggtataaaatcgagctgtaccccggccaccttgggcacatgttccccgaacctcctgagtctctgtcatgtgaggtcatggtcctcacatttggctcagaataaacctcttcaaatattttagagtttggctttctttcatcaacacatcccatcctgtaaaacgcagagtaagccggagagaatggctcacacctgtaatctcaacactttgggagaccaagatgggaggatcatttgaggccaggagttcaagagaccagcttggccaacaaagcaagacctcatctctaaaaaaaaaataagtaaataaaaacaaatgtgagtgacttcactcttctctcccagagcctccagttgtcacttttctgagtttcttcagggtctcttgaactgtactcagggtgtcaagaggtacagttgggaaggatgggggcctctaatgagggggttaagagcatcattctggaggagacatgagggaggcagcagagaggggctgtggtgtggccttcacacactgcaactcctggaggtcgggcaggggcaggatgtccagacagtggacgcatgagtggggaagccttcagccaccctgactccacctaggaggtgccccaaggcagaaccagcagctgagcctggccagccccggcagcgatgagagacagtaggttttggggtgaccaacagggagccccagcaggagcccagcaggagagagaagctggatattgatcctgctggcccctcctgcagtccgcaggactgtccacagccctcgctcctcttaagcagctcacctgccttggtggcccctcccctcctggcccctccttttgggcctgggttgggggtggcaggggtcctgtccctgcacccggagtggagtgggatatggcactggaatgtttctaggcagcccactcctgtaagagggcctggggctgggcccagtagttcacacctgtaatcgcagcactttgggaggctgaggcaggaggatcgcttgagcctcggagttcgagagcagcctgggcaacatagagaccccacttctacttgagagacacacagagagagagagagggagggagggagagagggagggagggagagagagagggagggagggagagagagagggagagagggagggagggagagagagagagagagagagagagagagagagagagagagagagagagagagagagagagagagagagagagagagagggagagagagagagagggagggagggagggagggagagagagaggcttctggtaaatgctcctattttgcaaactctcttcctattttgtgattaggatgctccatcagtttctgccaccagcttgctggagacgctgcgtgtccctgactcctctcaaagggtgaaaagctcagtcgcacccgagacctgctcctcaggcagaggatgaactgagtccccgccccaccgcccgtctggcctctgtgagagtggcgtgcaggctgaccctggaagcagagggacattcgaacgggccggcggccttctccccgctaggctgggctccggggtgggcggagagtggccgccacaggccatcagcgtccggggttctggaagcagggagggcagaggctggcccagcctatgggagaccctgcagaggcgtggcctccaggctaatcctaccccagctgccccagggcgggatttcttttcttttttcctttaatctctttatctacaggcgccgaggcttaatgagctccagatgtctcaacataccaggagaggtttaggatcccctgccaaatacaagggagataagaacgcaccagacttgcacaaaccagagctggtgacccccagttccctttaaatcagcgacatgtcattacaaggcggaagtcctgcccgagaggacagtccccaggccttgctaagcatgcgtggtatcaagaggtgcattgaggcgctcctgcagcctcctcccggcacgggactcctcacaacccccagcctcagcttccctgacagggcaggggctcactcttctccactccgggccaggaacgcagcctgcttgccttttgtccaattgggtgctctttctttgcgactgatacaaagtgggaacaaactccg

SEQ ID NO: 41226 - DNA, 2300 bp, Homo sapien
ttatatcctatatttgatattttccatttagaaagtttgtggtgatttaaatctgttgctcgtcactgtcagctgagtctcacttggaggcttgctttctttagacatgtgctgatttttcattttgaactcatatttgattcagttaaatctgtgggaacctcagtccctaagttggggcttgctttctccagagtattcatcgttggttttgcttttgcaagcagggatgctactgacctgggaccaccctggctccccggagggctctgtgtgggtgccaagtggagggtgcaggagaaagcatccctcggggcagccctcaatcaatgactcttgggtgtcgctgtgaaatacctgttccctcatcccttgggtgagttcacctgaggctcacagtttacaccacttcccagagtacctctctggggtcaggctccatttccccactgcggggggttgctgagtaccacatgcttgccagcctccttccccaccctggaccacttccccactccccagggctgctatccccacctccaaccaaagggcttgctctggaatccctgcctcaggctctgcttccgggacctcagaccccgtgggggtccaggtctgcccaggaccactgtgagtttcacatctgcctcctgctcagtgggcagactttgggagtccattattctatttacttctttctttatggactcagatttcttttactttcttgcgagctctgtatgttttgaaaagaattgtgtttgaaccttgatctagctcttgccctctgcaccttatgaatctcaactcctcattcagttctcggctaaagtatcaggtcctgggagaagctctccctgaccctgaggcaaagcacgctcctgtggtggtctcttgtccatctcgtccttgcctccacccctctggagccacaatggagcggaggtgtgcagtccctgtagcccaagctgcttgggttcccacttcagctgggtcacctgtcacctgcgtcactgtgtgaccccgagcagggagcgccgcctttccgtgtgagtctcctcatctgtgagatggaaatgatactatctgcacagcagggctgtggtgagactataaggagataataaatatgaagtgtctagaacaggtggaatccatagtacatgctcaataaatgttagctctgtcacatcctgcaaagatatgctgcagtaggcatcaccatttgtccaaggggagagtcaggagggcagaaaccaggtctctctcctcatgccctttcccagggctcagggcagggctagggcagcagggagcatgcagtaaacattttcaggtcaaatgaaagggagcaggaccaaaggcacgatggcagatcggggcttccccagtgccccggggaggcggatttcaggcacagggacacgtgcaaaggcacagcttttagggagctggagggcagggcgggaaggccaaggaagccgagaaacgggtccaaggctcggatgctctggccaggatttgtacctttacctccgagtgtgggagtatttggcgacagaagcccctggggctgcggcttctggtgggggtcttcatggatgctcaggggaggagaacggcctggagccactggaaacggggaaacggggaaacgggtatgaggttggggaggggcggggaggagggggagggcggggccccagggcgggagtctgaccccaggggtctgcgaacccggacctgcgcgtggcgccgcgccgggtacctccccctctctgcgtctttgtgcattttgcttcctttcgcagtaaacgttcttccgagaaattccaaggggatctcagccaagcagagggggaagggatcctgcccacgcctgggtagggggccgcggaggctggggaggagcagggggcgccgcgagggagggagcgggaacccgagggagcgcgcgcgccagcaagggggcgcggagggcccgggccagctacctgcgtgggggccgcgagccccgggcgccccccgccccgcgcgtctcccagccgcccccgccccccgcgcggcccccgccccggctccgccccgcccctcgcgcggggtccgcgtctgcggctgcgttccccgaaagacgaggctgcgcccggattccggtccgcagggagaccgaagggcacagctccccgcgccgcgcacgccgcccgagcccggagtgcggacacccccgggatgtgagtgagccccccgaccccgaggcccgcgctccacgccccatccgcggtgagcgccgaggcgcgcgc

SEQ ID NO: 41227 - DNA, 2300 bp, Homo sapien
ggcgtgagagaggcggggcagtgggggaggcggggcgacgggaagtaggggcagtgggggaggcggggcgtggggtagacaggtgtgggggaggcggggcaccagggaagcggggcgtggggggaggcggggcgtgagagaggctgggcagtgggggaggcggggcgtgggggaggcggggcatgagagaggcggggcagtgggggaggcggggcgtgagaggcggggcagtgggggaggcggggcgtgggggaggcggggcgtgagagaggcggggcagtgggggaggcggggcgtgggggaggaggggtgaagatgacgggaggcggtgcacgggggaggcggggcacaggagaggcgggtcgacagggaggtgggacgctggggagaaggggcgaatggggggcggggcgatggggaggcggggcgacgggaagtaggggcagtgggggaggcggggcatggggtagacaggtgtgggggaggcggggcaccagggaagcggggcgtggggggaggcggggcgtgagagaggcggggcagtgggggaggcggggcgtggggggaggcggggcagtgggggaggcggggcagtgggggaggcggggcgtgggggaggcgggccgagggcgagagggcgcagggaggcgggtgggggtggggccacgcgcggaggggcagggaagggcggggcggggcggggcgggacggggctgggggggacaggcatcaggtatgaagagtttggggctggcggggcgtgtccggctgtggcgtgggcaccactatgggagaccctggcttggcaagtgaccttgcagccttggctggggaagggctagatgctgggtgggtgccggtagagtggaaagaatgacaggttcaggtgaattaaggaaggatggttgactcggtggctgggacattagagacaggtattcccagcctcaggcgctgtcctaagcccagcaggtactgacccttgatggtcacctcaccctatgagggagctgaggcctggggaacccaaggggctagtccagaacccacagccgggggaaggaggaaccgggtcttaaacccaggtagctcactccagaaccaactcaacctctgttacaggtggccggccagaaaatgccccaccccacccattgacagtcggggaaactgaggcctcagtaggtgaagtgcctggcccaagcaccaaggcacacagagacgctcaggcttgaccctggctccggacgtccagcccctgccgctgccccacccctctgctgcccttgggagaggggcagctcagagcctcgactctgcactctgcatcagcaccccccaagggcttgggtggggtcttgagaggagggggtggcctcagggagcgacctgggctttccaagcctctcccagagcagcccgtctctcacacaaggccagaaggcaggtgggtgctgatggctttcccagcaagagaccgagggggcgggcccccaagagctccagaaagctctccaccggacaccagcaggaacagcactgcagatggagcagcaggggcaaagacccgaggtgatagtgaggggcagccgggaggccttgggcctagcagtgcattgctgagtgtgggtgaggaggaggtgagcacgcagccttagcttgagggcattgactgtgtttttacttaaatgctcttaaaggggcctgggtgtgatgctgactctaggatgacgatgcttggccagtgaccagcaaatagagggtctgtgaccccaaggtcctgtgactatggagcccagacatggggttgaggggtgtcaggcatggcccattccggggcgaggctccctgccctgcactgcagggctgaggcactgagcggcaagccaggcgagggccagcaccaccttccacctgccgtggcacgggtgcacaggacgttccaaggccaaccacaatgacttctccttcccctctggccccagatgtcctggagggaaacaacagtccctggcctggcgcctggagctggggaccagtgtgaggcccattgtttgaggctggagctggtgggggccactaggaagcccacggcaatgcccttcatcccacttaccgcagctccagagccctgcgggaggactcagagtcagggacacagcagcgtccggcgagatgaaggcgctcggggctgtcctgcttgccctcttgctgtgcgggcggccaggtgcggggcaaagggtaaccctgcggtgagggggcagcaacagcagtcctggagcacagggacctccagggac

SEQ ID NO: 41228 - DNA, 2300 bp, Homo sapien
caggaaagggtctgtcaggcggaggcggagcgggggtgttcaaggcccagggttgaggcatgcagccgatgctgtgtggcagggcaagcacttgctgctgagtctcctggaaggggaaagggtggtgagaggggcggcctgcaagtctgtgcaggcccctttgcagctgctaagggggcccagacctcatcctgcaggacaggcgtgaagctgggagggccactgtgggtttgcccggtaagtcagtccctccagctgctgtaggaggggtggacaggggagcccaaatgaaggcagggagaccccagggcagggcacagaagtaatgctggtgagaggagatggggttgcagccgggacagaggaagcaggctggacaagagtgggtggtttaaaacattgggaggtaaaagcaacaggatgggagaggggggtgggacgaggagggagcagaactgcctggttttcaacaccttgctaagtccaggaggcagttggagagagggctgggtgggggcaggcagttcctagggtgccacgacaccagcagcacctaagatctccactcatgctcactcagtccacacgacacgagggcccagcacacatcaggcacccagaacaagaacaggtggctgccctccaagagctgatttgcatgggagtgtgggagcgggggataattaataataaatataataaggaaatcatatagaaagtggaaatgggaagtgttgggggggcagaatgctgcagatatcctaaggagatgtgccagagccagcccaatgcccatccttcccttggctacaggcggcacttgtgacttgaatctgagtagaactgggccgagggggtggcatgtcacccacaattaggttctgttccacaggactccatctgggggtggggctctcccacggaccctggggaagcggccaccctgtgaaccgcccaccctcccacagtagggactggcaggcagcccccgggagctgagagcagctcctgccggccctcagtcctacaggcaccaggacatgacttctgccagcaatcgcatgaggtgggaagtgatccttccccagtccagcccccagatgagaacacagcggctgaccagagctgaggacccagctaagcctggccttctggcccacagaagccttgagataataggcggatgtcgttttaggacacccaatttgcggtacgtagggaactaacacgcggggctctggcgggcctggcggctcagtgcgatctgggcaggcaggaagtggagtgagcacagccagcggctgggagcacatcccggaggggctgcctgcggcgggaggagcggcaggggccacgtggtgggggacggctcgccagggcgcgcacgcggtggcggcggcggtggaggcgttgcccgcctagctaggggcccgcggcctggagaggcgtcggttctccttccgcgctgaaggcggagacagcgacttcccgtggaggcaagccgtgggcgccgcggaggcgggggctgggggtcggcggaggcgggagctgggggtcggcgggggctgggggttggcggggagcgtcctcagggacaagtctcccagcacgcggccgcgacctccccgttgggggtctggagccaggagcccacgcgcgtcggatccggagagtctggtgggcgcagcctacgtgacagggtcggctcgggaccgagctgctggggactgggccttgcggggcggggccgctgggggcggggcatgagggtgccggttcggggcggggctttttgggggcgggacatggggcggagcctgggggcggagcatgtggggaggtggctggggaggaactttcgggggcgggacacgagggcggagcctgagggggcggggcatgaggggaagccggctcgggaaggagctttcggaggcggggcccgctcggggagggacctgatttcgggggagccttcgggagggcgcctgccatagacgactgtaaaggggcggggtcagctcggggaggaccctgcgggcgtggcggcagttatgggtgaagcctgagggggcggggcctgatcggggcggggtcttcgggggcggagtcggctggggatggagccgctcgggccgagccctccaccgcccaccatcaccgagtccggcccaggctcctagcgcggccgccggaaggggcgggtcagcgggcgggcatttcctgccggtgcctagggccgacggggacgctggcactggtggggagctgttggggggtcccgcatctagggctctcct

SEQ ID NO: 41229 - DNA, 2300 bp, Homo sapien
ggcgggtggatcacctgaggtcaggagttcaagaccagcctggccaacatggcaaaaccccgtctctactaaaaatacaaaattatccgggcatggtggcgcatgcctgtgatcccagctacttgggaggctgaggcaggagaatcacttaaacctgggaggcggagattgcagtgagccgagatcgcaccaattgcactccagcctgggcaacaagagcggcaactccatctcaaaagtaaataaagaacaaaaggggtttgcttggctcacagttcagatcagcgttcagagggtgctgctgtccctggtcatactgtacaagaagaggcttctggggagggctcaggaagcttttactcacagcagaaggcaaagtgggagccagggcatccgtcacttggtaagagccagagcaagagaggggcggaggcgccaggctctttttaacagccagctctcactcatcaccaaggagagggcaccaagctactcatgacccaaatagcctcccaccaggtcccaccgccaccatcaggggccacatttccatgagatgtgcagggggctcacttccaaacagtatcagatatagtactagttccttttttttttttttttttttgagacagagtctcattctgttgcccaggctggagtgaagtggcgcgatctcggcgcaatgcaacctccgcctcccggttcaagtgattctcctgcctcagcctcccaagtagctgggattacaggtgcccgccaccgtgtccgggtagcttttttatatttttagtagagatggggtttctccctgttggtcaggctggtctcaaactccccacctctggtgatccacccacttcagtgtcccaaagtgctgggattacaggcgtgagccactgcgcccggcgctacttataactttttaagaaactaccaagccaatttctagaatggcagcaccactttgccttaccactggcgatgtcccaagctgctccgcgacctcagtgatgcttggcacttgttagcagtttttacctgagccacctggcaagtgtgcagtggcacccaccgcgatgctggccggcccttccctgacagccatcccttcccgagcctattgccatccctgtgccctcttcggtcaaacgtctgttgcggctcttgccaattttctaactggaatgtttgttttcttgcggtagagtttagagatttttacatattatcagcctgggggctcctccacccacacagccctgagcgtccaccctggcagctgttgcccgtctgcaggcccccccgccctctgctccgcgtgcccctccagctcaggggtcccctcgcctcggctctctgcacccctgctcaaaacggtcaaagaaccctccccggccgtttatttttcccagaaagtgacaattttctcttttcaggtcgtaagcacagaactgagggagaaactgtggctgaacaagaggaaaatgaggaaggagtccatgaaggggctttggggaacctgtaacatcctcctcaggctcccggggacgcccctggaaagcaggcagaatcgagggcgctggggcccccgcgaggggagcgggaggtcgcgcgtctcgcagcggttcccggccgccggtgaccatcgctgcggacacatcccgaggagggaacccaagagggcggcgggggggactcgcgagctgaacgtggaagcaactccagccgaggacccccggaggcctggagtgcacggaggggccgcgggcagcgtggggacggcgccgtcatctcccgaagcccggccccgcgctggctccccgggcggtgcagggccggcgtcgggaaggaggctccgaggcgccggcttctgcgccccacgcagcgccgctccccgcgcccgggcgctttgcaggcgcgggcgggatccgggccagcgtgtacgcgaaagccacgcgcgggcgcagcccacgaggggaggggcggggaaaggcctcctcttcgctcccggccccgcccccacacggccaccgaggcgtgcggtcctcccggggcccagagcgtcccggaagtgcgcgccggccgggcggagtggggcggggccggacacttccgtccggcgcgcggcgtcctcctcccgctcggaaggtgagtgggcgcgggcggcggcggcggctccgggtgcctgggaccagcccagtccgagctcgtgcgccgtactccgcggtgcagccctgcccagccgggccgtgcggcccttgcagccgccgctcgccgtgaccttggccttgggccaagcc

SEQ ID NO: 41230 - DNA, 2300 bp, Homo sapien
ccccgcaaaaccacgtaattatagagaccattttcctccccagacgaccagcctgaacaagcacctccaggagctgatggacgggctgacggccaaggtgttccggacctacaacgcctccatcactctgcaggagcagctgcgggccctgacgcgcggtgagcctgccccacacccacactcagcgcggggggagcacggcccctgccccagaccgggctccccggctggcccttgttgagtgagcctcggggtggggccgcttctttgggaaatgggctgaggttgtgggctggctgcttggcagcctaggtggccagagtcctggggaggaggagggaggttctggctctcgggaccccaggcatcccagccacgttctccctgcggggcggcccctactgctgagccctactcaggccccatggcctggtggtgttcctcagctcctcctcagggttctttcttgaaggcccaggaggcctctgcactttccagtggttctgtccctcccaccctcagctgtctgagcaccccgacctctgggcctctgtccacggccctgtctcagcttcagggccctctgctctttgtcccctgccatcaacctggggatgctgtctaagcttggcgagggcctctcctccctctgtccctggcgctgcccctgctccgtgatgtccgggctgctctgtgatgtccgggcagattggacgcacagactgtccagagggtgcctcccaccccggcgcccaccgcactccccaagcagggcttcctggaggaggcgccgaggctgggtgctcaggggcgctgacgctcggcatgtgtttcgcgtgcacccgtgggcctcagaggccggtgctgtgctgccctggggacaaccttggagctggggcagcactggggctgtgggatgcggaggagctagctggcatccaggtgagagccccaggagaggagacgccccctccactgagggaggcagaagattctgggtgagggcataggggccgaggccgggcctgggagaggaaatgaaggtgctgggcccactgtggacgtgcttccagagctgggtgggccatgcaggatgggcgtgaaggagtggccgctccagtaggtgccttggggccagtgcttacgttctctgaacctcattcttgactggaaaatggagacaacgtggtaccttgaggggatgtcgccaggggaagccgggtgctggggacttgtgacaggcagggacccacagactcgccaggggaagccaggtgctggggacttgtgacaggcagggacccacagactcgccaggggaagccgggtgctggggacttgtgacaggcagggacccacagactcgccaggggaagccgggtgctggggacttgtgacaggcagggacccacagactcgccaggggaagccgggtgctggggacttgtgacaggcagactcgcccgtccaggcggctgggcctcctccttgccatggggcctgggaaggcccgggtggtgctacctgtgctgtggccccacgtgaagccttgttgctgtggttaaagacgctgggccctgctctcgaggccaccttggagggtcactgacccttggccctcactctccccatcccagtgggtgcctgtgtgagtggaaggggctgcgctgtgtggcgcgttaaggccggctcagggcagacagggagggtggccggccccgtgggtgctgcctctgacagcccgtgcctctcagccgaggacagcatagcagctaagatcttatcctacaaccgagccaaccgagtcgtggccattctctgcaaccatcagcgagcaacccccagtacgttcgagaagtcgatgcagaatctccagacgaaggtagcagctcccaggagagcccccagcccagccctcaagggacccctccccctccccagagcctcggcacaggcctgggagccagctgcggtgggcacgtagggtgtggaagggtgtgggcacaggggctggtgcgggatggggaggggcagccctgtctggacccttttcctgcagatccaggcaaagaaggagcaggtggctgaggccagggcagagctgaggagggcgagggctgagcacaaagcccaaggggatggcaagtccaggaggtgagtacccgtgccctcagacgccttctcccggggccctgtcccaacccgtagggtccagccccacagggtcggtgggagacgacccttgttgtctccttgtgcggagacgagagattgtagaaataaagacacaagacaaagag

SEQ ID NO: 41231 - DNA, 2300 bp, Homo sapien
ctataataaattattttcttaatttcattttcagtttgcgtatggctactggttagaaatacaactgatgtttgcatattgatcttgtaccctacaattgtgctgaattcatctattagctctactagtttttgtggattcttttttaaattttattttccatagagatagggtctcactatgttgcccaggctggtcttgaactccttggctcaagtgatccacttgctttgacctcccaaagtgcttggattacaggcatgagctacggtgctcggccaatttttgtggattctttgggattttctatatacaagattatgccacctgcaaatagacataatttacttctttctttctgatctgggtgtcttatttcatctgcttgcctgtttgctcagttagagcctctggtaccatgttgagaggcagtggtgagagtggacatcctcgtcttattcttcatttcagcaggagcgtccagtctttcttctggcatatgaggttagctgcggggttttgtagatgctgcttttcaggttaagtttctttctattctgttcttgagtgggttttccattctgtttatcatgaaatggtgctggatttgtctgctgctttttctgcatctattgagaaatcttagggtttttgtcctgccacactccctcttacaaaacctgaggaaccaactgggcatcggctcacacctgaaatcccagcactttgggaggccaaggtacttgagcccaggagttcgagaccagccggggcaacatagggagaccccatctctacaaaaagtaaaaaacaaaaaatcaaaaacccttagaaacctgaactggaaaacacattgacctcaggattccgttgaaggaatggtgggcctgggccaaggccctcttctggtttgtagaaagggttacctgaaaaaatatgcatcactgttccgcagcccctgggaggaggtggcccacctggagagtcagctgctgtgtcctggtgtgtgtgtaccttcagctgctgagctgctcattctgaaatgatgggacacctaccaggtctgcctgggccctaagagcgagcaattgcagccctcggcctctgcccatggcttccagcagctagatgacatggacactgagtcagttggtggcaggggagggtcgctgagggcgtgcggtggcagcccggactcctttcctgcctgtgtccactgcattccccccaacggtcacagtgaaagtgcggaatgcatgtgaattcatctgcttcccacggtcctggtgtcagggttttaccggggaagaccaaggctgcggtgctgccagaggtgagcggtgtggcctgttgtggctcagggcctaccgccaagtgctgatctagaggttttgccccttggccatgctccccagtgaagacactggggttaaaccctggtcagggtcagcagtcacgctggggactgagcgcaggaaggaggctccagctgtgcctggtctctggtctccttgggagtgagaggctggttggcagggatgatttcgcaggacttcctgtgacctttgtccagaggcaccacctctgaggggctgctgtgggctggacagcaggtgcttctgccggtttctgcgtcctggaagtgctgctgtttgtaggggatgaggtagggggccatctgagcctgtgtggtcccttctccagagcagcagagcgtgtacttaggaaggacctgctaggtgcccctgccctcagaggctctgggagagagctgtgtgcaagccctgggcaggagttcactggcctggtcgtgtgacctgtggggcatcctgacagccagccctgtgctgcagaggtcagtgggactgggtttggatctgggtccccgcccagcgtgaaggggcgctggaccacgaaggcagggaaaccagggggaggccggcaggacagtcagtggtcctgctgccgcagccccgtgcaggcttagaccgcccagccttgggatgagcgccgctgggggcggaggccgcgctcgggggcggggctggccgctgggggcggggcggggctggccgctggggcggggcccagcttgtcgctctttcccggaggctggcagatgcgcgtggtgcggctgctgcggctccgggcggctctgacgctgctcggggaggtcccccgccgcccggcctcccggggtgtcccgggctcgcgcaggacgcagaagggcagtggagccaggtaaggtgtcccagtgagcaggcggcgagggccctgagcaccgggcttgggtaggtcca

SEQ ID NO: 41232 - DNA, 2300 bp, Homo sapien
ttccaaggactgttaatcatttgtgacctaatctagattcagtctggatggagtctctgatgtcattactgaataccttgttgtcagacatttttggatacaatttatagtttttgagcccttcccagtcaactgaggccaaggctttttccccaaatctgagaccacctaggcatagctaccctcgaaaatgtacatcatcaggaaatatggatcatctatttaccaagcaaaagagggagcattattcagtggaatcaaaaccttcttctccctgaaaacctgtttctattttccacgtgtgactaatttttaatctcggtgactgagcggtaatggtgttgtcactgatgctgacgatgggctttttaaaaagcatatgatctatgctgccttcatagtatccttttttggttattgtttctgtggctttctgagtaaaataagctcagcgtctgtggctctagcaaccccggcgccattgtagaggagatgccatctgcatgcaaaggttctgcggtgcctgctccacagaaggctgcctctcctggccattactcaccacaacaggaaaacagctatctgcctatgtccatttgttaagaaggcagtaacatggcatctttaataaactcaaataaatgcactaaaacttatcacaaaatagccaagttgtaaagtgaaggagtgtttgtaataacctcttctgtcttccccaagtgtacgttttccaggcagttctccttaccgtgacagggctttagggccagaagacagcgccactcaccggaccacccaaactagaagcctgggcaccatcctcaactcgctcattctcatttccacaccctactaattatcagacacctcccctcaacctctgcaggcctgcggtttaggctcctactgtctctggcctgaccaagccctgtttcctcctgacctgcgagcagtgtgcccactggtgccatcatctctctgcaacatacaggggatcatgtgggggtggtgctccccggtgcccgcaccatcgtgtcaacacgcgccagcccttccccagccccaccacgcacacacatgcagtgcggctgacgctctcagcaccctgcctttcccatgcaccccaacgcccccccgcccccagcacctgcaacttcctgcctgagcgcttttctcagtgcttaggggtgctggcctatgcccggggcttgctggaagtgcagttggcagaggtggggcggcaaggatggcccctcaaaaccagagcaaacccactcggaactgtgtcctgtgctctcccagaggcctccaggaggactagtccaggggccccggctctcacctgctccccaacacgtgtacttccctactcccttacctgtgcttcctgagtccacctcccggataaaatacctgcaggaagagcctgctttggagggagccgtactccacactggccaccggtggccacttgccgtgcccttgtacacagagctccctctcggcctggaggccttcgtccattctgctaccgcggccacatccgctcaattttccagactcagcctctgggatctcacgtcaccccagactcacggaccccgacatggcgcatcctgcaccccacgggtgtggcctggcggccctcctcctcccaagcactatgttcaggctgagtggagactctcgctagcaatgtgcaggctgctaagcagatgcgacccggtgacagcttgcacctcaggccttgctccttgagctccttgctccatgagcttttctcaaaatacgatcctctttatcttcagagtcgcagaagcgctgcagggactggcgagactccaccacgtcgcggaagccaacagcacgtcggcccaggaacgcccctccaccccggccggccgcctcccaccccacctcctgggtgcccgtcagcaccgcggcccacggagcgcgcgagcccaggggcccaaccgagcgcagccaccggacgccccgcgtggccaccgcgtgggcctctcccgcgcctgcgcagcccgcccccttcccggcagcaccggcggcgtcaaggcaggcacgtggcggcggctgcgcatgcgcgggctcgggccttcccggcgtctccgcgcaggcctcggggaagcggggtccgggggagccgtggtgcggtgggaccgcgtgggtcctggaagagctgcagaggaggtgggactcggcctgagggcgcagggccaccaggagggaggggtcaggcggggccctcagtggccctcttcctgtgggtgacccaggtcgcgctg

SEQ ID NO: 41233 - DNA, 2300 bp, Homo sapien
actggataccatttcagtcacacatgcttgctgacagtcactgatatggtaatgcctcctgtacacatagctgactctgaagactgctaagagggtttgggtctctgctgtacaggaccttggcagcctgcaaggagatgactcacatggaagtccccacacaagtgcacccagtgtgaactttggaagcatcggcccatgctcaggcccacaggtaagatggccaggagcccctaaccttgaggaaacttgaaccacagagctgctggcgaagggggtgggtgaaggtctcatgtagcctgtgtgattcaggcagaagtgagaaggacgggtgggaacccaccaagtggacgacaagctgaagggctcccagggagcagacacttcaagggccccaaaaggccaggagaaagaaaaaaaaaagccgggtatggtggctcatccctgtaatccagcacttttgggaggttgaggcagatgaattgcttgagcccagaagtttgagaccagcctgggcctgggcaatgtggcgaaaccctgtctctacaaaatatacaaaaattagccgggtgtggtggtgcaagcctgtagtcccagctattcaggaggctgaggtgggaggatcacatgagcccaggaggtggaggctgcagtgagctgtgatcgtaccactgcactccggcctggggaacagagtgaggccctgtctcaaaaggccaggagtggaagacaggccctagccaggaggtttcgcgtggctggcaggggccttatgagaaggctgttgctgggaggggcctgctgcagatggctgcggcagaccacggagcttagccttcaggatttagatctggggatgacaggctcctgtgtgcttgttgcggagccgggagcacaggcaccagaatgatcccagggctcagctccaaggctccgctgggcctgtggtggggcagtgaacgtggacaagacctgggcttcagaggaacttgatgaccaggagccgtggttaccgcctgtgccctggccttcctgctcttcaaagggtgtgttctgagctgaggcgagacccacacgaaatccgagcgggctccggagtcaccagacacctagggaagtatggaaggcccggaaggacacacacagccgggtgagccccgcagggagctgtgcagtctcaggtcgtccagtcctggggctgcaggccagttctccaagcaggtggtcctggaggcaagctggttttgaaagtaggttctgaaaataggtcagtccaggaaacaagctctggaagtaaagagattcggaaagcaggttcgttctggaaacaagttctacaaacaggtagttctgaaagcacgtgggttccagaggcaggtgctagaaggatgtgggttctgtacggaggttctggagggaggcgggttctggacggaggttctggaaggaggcgggttctggaggccggttttggaagcaggacgacaccgacagaggcgcctcggactggggccaggcctggagcctccgctccgcgggcagagagaagaaagcaggcattgtcggaggactcacacaagcacttgtccctaacaaaaccgtttttaaaaaccccattgtgaacatttttggaacaagcctcttagagggtcccgttgccggggtgacaggacgaaacggcgcgagcgggcagactcctggagtccccgcaaagggagccgaggagctaggcgcgccgagtccaggtccgccctgactctcagcttgggacgttccgtatagtttttttctccgtttcccgaacttctcccgcacgctcagcggccgccgcggcgcatgcgcagtacaacctgccagccagccgcgggcgttccggccgcggttgccaggggttaccgtcccgcgggcgggcggagctggccgtccagagcccgccttcctggaactctggttggctgatatagctgtccgtcgaagcggcattgccgcctattgggcaatggccagcttcgcacgccagacccgtgccccgcccagccgcgccgcgggccgcccccactcaggagggacagtcggggaccggcgcgggcactcaggagcccgcggcccaggtggtgcgggcggccctagcccggctgcggagcgctgcgcgagcggcgggctggctgaccccgagggacccccagcgcagcgggtgcggcgatgatcctggaggagaggccggacggcgcgggcgccggcgaggagagcccgcggctgcaggtgcgcagaactggcgcggcggcgggaggaggggcccg

SEQ ID NO: 41234 - DNA, 2300 bp, Homo sapien
gctgtagcactggccctggcaccaggtaagcgcttgctggaagcctgctctcatcacgcctggggcaaatacaagtcacccagacctgtccacagggcctcaggcccaggtgtggcctctaagtggatgaacgaccgacccctgacccactgaactctgagctttagggccagtttgggggccagcctgatgggggtggaacaggcctcactctagcccggcagcaggcatcggggaagactttccagatggcaggacagcctgagtggtgcgcgtgtgacacagggcctgcctccgccccactgccacctcccacgggcccctccccagtaccctgactgtggggtcatttctggacgctgtgagagacacggcagcctggaaacagcttctccccaactttccaaggtggcagcccagggagggccaggacagggagcccaggcacagcccccagcctgaaaagcgtcacctccggagccctctgggacatcttgtttgtacagcctcccaaacattccacccaaaacaacatgtgccgtcccaggccacctgcaggcatggccgccctgacagagcaagttcatagggggcaggcacaggctgcctctttccctccagtgcccaggaggtgctgcagcctctggcacgcctcggggtgggcaagaagggcgtccttgagggctacggtcagcatcaccagcccagtgacctgaagccaaaccctggctgatagcaccgcctcctcctctaggagacctaaccccaaacaccaaagccgagtagaaccagcccagggacaacacagtctgacgtcccagaggggaggagggccgcgcgctatcaaaggctcacccggggcgaggagcaggagcagcccgcggctgaaagcccgtggcgggcgtgggcgcccagggcctggcaggaggactggggcagcctcgagctggtccgcagggaacaagcaggctctgggctgcagagcaaggcccacagacgtcccctccttcccaggcacagactcagcaggtctccacagccctgcccacccctcccacttgcccagtcagcaccccgggttagggacttcagaagggaaggaggtttgggaagtgagaagaggccagccgggaagacctctctcggtttcccatacccaggaggcttcgctgcccgctgctaccagtgcacccaatgggcatgcagttcctgagcggatgcagagggaggaccgaactagggaaggaggctgtacaggtgccggaaaggaacacgatggcgggtgtggggagggcgctcacagagcccagccccacatccgcccagaagggggacacgaggagggcgtccccccaacccgcttcagcggtgaggatgatccagactttggctgtccgcatttcccggctcacatgagtggcctggaagcacctccaccgagctcagaggaggagggacgcaggctctggcctcagtttccctgcctgcgtccgggccgaatgagacgtaggaggggggcgcccggaacgcgcctcgagggggggcaggaaaaggccgggattccgggcccctcctcccgccgccgcgccagttctgcgcacctgcagccgcgggctctcctcgccggcgcccgcgccgtccggcctctcctccaggatcatcgccgcacccgctgcgctgggggtccctcggggtcagccagcccgccgctcgcgcagcgctccgcagccgggctagggccgcccgcaccacctgggccgcgggctcctgagtgcccgcgccggtccccgactgtccctcctgagtgggggcggcccgcggcgcggctgggcggggcacgggtctggcgtgcgaagctggccattgcccaataggcggcaatgccgcttcgacggacagctatatcagccaaccagagttccaggaaggcgggctctggacggccagctccgcccgcccgcgggacggtaacccctggcaaccgcggccggaacgcccgcggctggctggcaggttgtactgcgcatgcgccgcggcggccgctgagcgtgcgggagaagttcgggaaacggagaaaaaaactatacggaacgtcccaagctgagagtcagggcggacctggactcggcgcgcctagctcctcggctccctttgcggggactccaggagtctgcccgctcgcgccgtttcgtcctgtcaccccggcaacgggaccctctaagaggcttgttccaaaaatgttcacaatggggtttttaaaaacggttttgttagggacaagtgcttgtgtgagtcctccg

SEQ ID NO: 41235 - DNA, 2300 bp, Homo sapien
tgttcttgtcagaactcctgccgtgagcctcacactggcatttttttaaagagcacaaagtggaaagggaggtaacccctcctgctgcacccggtcctgccaggcgggcacgtgatgccagtgtgtccctgcctggagcagatggcgtcgcagtgtcactggcagcctgggcgagagactgggaaccagcagtgccgacagaccgccgcattgccgcgtccctcaccccacaggctggcaggtgtgagggcgtgcccgtgccgtctggactgggccctgctgcccacccggggacaagggtcccggcctgagaacgggggctgccctgagcacccccgcgttggtccctccgcaccaagaccctcatcaccctccctttgcccctggccccccacacgcctcaggtttctgcgttcttcaacgccccctttcctgccccaggtaccatgactagctcctgctcctgccccagccgggctcgctggccactcagctctggagctgcccttttgaaacttgagacgggctgagtggggacagtaggcagggcccctgagggtgaagggcagcagcaccactgaccctagctagggagcactgggctggacgcaaagcacaaagcgaggagtggggggggctccagcctgggggtgcgagggagcggaagccttgggtcctcgggtgggagtctgcggctgctgggccatctgggagagtgaggacgaggctgctctctggtgctcaagagtggggcaggtctggctatttggggctgggcggctttgggacatccctttttaaaccaggatggctttgtcaccacctcaggtccccagaatttctgagtgatgtcacctctgcctcttaactgcagtgtccatttcagcatttgccctgtaggaaattggatctggtctgggaaggatcatgcgcgtatttgaggaacccgggaaagccgccctcagcaggctggtcctgccctgcccaccccgtgatcctgggtgacctctgtctgtaaaaggcaggcagggctgtgtcaccggagcagaccctcctcctccagatggcaccccctccccgcctcatccccttggctctcaggcctggcagcactcggccatgtccagccccaaggtccatttccttcctgccaccaccgcactcccaggccgccctcccaggccgtggtgtgcggtttcagaaaggcgggggtggtgcttatgcttggggttttgaggagcatctgatgaggcacctctaaaatttagagtaacagacactagccaggatctgccagcgccagcccagggcttcagggacaggtgcccttcccccagacctccacagctgcagtgggcagctgggcagatgcctccgccaagcgggctttgcccccacaccttctctgctgcatgtctttagttttatagccctctaaaagtcagaagccattcttgctcccaaaaggccagaccatgtgtgccccatgggccatattcaccccctggtctaagtgaccccgcgggtcctgccagcccaggccctggcagagggaggtgctgctgttagcagctgttctgtttacagggcagcttcctgggtggccagggctgaggagagagccaggagcagtgtccataggccagtcactgccttggcccagggtgggcacccagggacatgaggaagccagcaggggggttccagccagcaaagcgtggccctggggagcctggccagggaggcagcagggacaggcgggcgtctccagcccacgtggccaagccctccgcgggtgctgcctggctttgctggctctgagggcagggacaggagccctgcccggaccctgccctggagaggagctagacacagggcccagcagctccccactctcaggtgctgtgtccccagaggggcctggcagggcccagggcatctgaaccactgtggggaggggagctctgggcagtttcctggaggggaggctgtgcctgagctgagtgttgggacccctgagggcctcgactaagggggtcagcagggaaagggcgtgcgggccaggctgtggcctgctatgacccgtgcctctctcccccacaggccggctggatcctgcaggcagctgtagccgttccctggccaggtaatgcctttgggctgggcagtgggtgggctccctgctcgccctcaggctcacgcacctctctccccgtctgcagccgggcagtgcagcgcagcctggccatcatccggcaggcgcggcagcgcagggagaagaggaaggagtactgcatgta

SEQ ID NO: 41236 - DNA, 2300 bp, Homo sapien
atcagccagttccgtctggctcagtggggggccccgccagaccggcctcaggacccaggcaggcccgggaggcctcgctggttgtgacctgtcgaactaacaagttccggaaaaacaactacaaatgggtggctgcctcctcgaagagtccccgggttgctcggagggccctcagtcccagagtggctgcagagaatgtgtgcaaggcctctgctggcatggcaaacaaggtggagaagccgcagctcatagctgacccagagcccaagcccaggaagccagccacgtcctccaagccagggtctgcccccagcaagtacaagtggaaggcctccagcccctctgcctcctcctcttcctccttccgttggcagtcggaggccagcagcaaggaccatgcctcccagctctccccagtcctgtctaggtccccgtcgggggacagaccagcagtaggacacagtggcttgaagcccctctctggggagaccccgctctcggcttacaaagtgaagagccgcaccaagatcatccggagacgcagcagcacaaggtgggcatcccggccggctgcggtagagtgtgaggggctgtgaggagggtttgtttggcacccctaatggatctgctgagctcggagctttgcctgcagttgcgttcacatttccagcaagaaatgaggcaggaagtgctgctgtggtggtttgggcttgcctggggccggggccctggccggcataaacttaggggacaggtttcccgtccctcacactgctggcaagcccatcctttctcctgccggtgagagacaagcagctcgctgggggcagcttccgttccagttgcacagggttcacagagggaaggctttgtgccaggccaggcgcagggggagtagctcccagggaccagtccagggtccatgtgtccccagggggatggtgagacagagagcagtgtgtctgcccctggcctggacctgccggccacgggtctgtgctgggaggtggaccagagctctgggccctgccaggggtgcctggtctttcctgcatgccccgtgtctagggcttgggctccaggaggcctggcctttgctggccctcaggctgagggctgctccagctggtctgagtgggcaggggccgggggctgctggtaggcgggagcctccttaggcattcctggctttgggctctgtggcctcccttgcggagtgttgaggctgcagttggcctttggtcccagggcgagcagattggtgttaggtcccagcccccttggccaggcagccaggcagagtcactcacttgcttggcgcacatctctcccggcctccacccttgcggacttgtgatgagactcagagatggtgtcatggcacagtgcttggtctgggctcagggactccatgaggttggcagctaaggtggtggctgcacctgctgggcagagggcgggggtcctgcctctgtcatcagacacagtggtgccctgccgtctggtctaggttgctggctcgtgtagctcattctctctggccctcgtcccccagataggtgccgtgttgaggcgcatgggcacccggctcccactcctggctgtttctcggtggcaactctgctctaaaccatgctggcagctccctctgtccaggaagtgtggagagggagcgtggagaagctgcccccttactgaggggcttggcaggccacttggggccggtggccgctctcctcagggatgtcggcccttctctttgccccacgtagaggctcctttttcctgggcagatggggagggggtggacatgcgggtggggacggagcactgaggcccctctgctctccctgggagcatggcagcctgccctagttctggggtcatctgggattgtggatccaagcctgccgcctcagcctggctgtggagggtgggcagggccgccatgggctgagggaggcagggtccagaaaggacccgctgtggcctggtcctggccttcaggagctgctcccacgctcctcgggtcctggtgaggaagggtgggtgggcagaacccccagggcttgttgagagctgcctgtattttgtctccacagccttcctggagacaagaaaagcggcacctcacctgccgccaccgccaagagccacctcagcctccggcggagacaggccctcagggggaagagcagccctgtcctgaagaagacccccaacaagggcctggtacaggtcaccacgcaccgactatgtcgcctgccaccgagccgggcccacctccccaccaaggaagg

SEQ ID NO: 41237 - DNA, 2300 bp, Homo sapien
acctcagcctcccaaagtgctggtacagaaccttaagaagggctttgcagtctcaaaaaaaaaaaaaaagggtctcgctccgccagtctcctgtctcagcctcccgagtaactgggactacaggcacccaccacaatgcccagctaatttttgtatttttagtagcggcggggtttcaccgtgttagccaggatggtctcgatctcccgaccttgtgatccgcccgcctcgtcctcccaaagtgctgggattacaggcataagccactgcgcccagcccagcctagccattttaacgtgtacaattcagtggcattattaccgtcataattttgtgtaaccatcaccactacttccaaaactttttcatcactccaaacagaaagcctacacccattaagcaacatttctccattcctccttatcccagccactgaaactctaatctaccttctgtctctaggaatctgtattctagatacttcatggaagtggaatcacacaagatttgtcttttagtgactggcttattttacaaagcacagtgttttcaaggtttatccatggtgtatcctgtgttagaatttccttctttttttccttttattttttttttgaggcaaagtctagctctgtcgcccaggctggagtgcagtggcttgatcttggctcattgcaacctccgcctcctgggttcaagcgattcttctgcctcagcctcctgagtagctgggaccacaggtgtgcgccaccacgcctggctaattttttatatttttagcagagacggggtttcaccatgttgaccacgcttgtctcaaaactcctgacctcgtgatccgcccgcctcagcctcccaaagtgctaggattacaggcgtgagccactgcgcccggccgaatttccttccattttaaggctgaaaaatatttcattgtttgtatggatcacattttgtttatccttccatccacccgtggacacttgggttgtttccgtcttttggctattgggaaaaatgctgcagtgaacatgggggcacaaatatgtttgagtctctggtttccattcttttgggaatatagccagaagtagggttgctggatcataccgtagttccatttttgttttctcctagaaaggcagattgccacatgcagcgcctcatttggatgtgtctggaatcttgactaccctaccttctcctacaaatggaccttgagagcttgtttggaggttctaccagggaagcccagctcttctattgggtatggtcgttctcttcgactgagctgcagcttcgggagggacgcacatgaagcagtgaggaaggaaggggacacccgcctagccagccagatcagccgaatcaaccctggcgatcaatgggatgacaggtgtcgcagccagatcgccctcatatccggtagttctacttttaaccttttgtggaatctccatagttttctgcggtgctgcgccatttacattcccaccaacagcgcacagaggtttacacttgtacatgtttccaatgacgaactaaaaactttcatgttttcagaggttcaacatgtctatccagggaaccttgctctccgatgtcttctcctctggccacagtaagaggtttcacagaccctcctgggtcaagagtaattgttaactggcccttctcccatgggtccccgcgtagacccccccccccccaacactcaactggggcgaaatgaaacgcagggactgtgggaaggaactgcggtatgggctgggtgggccccaggtctcgcccctcgccaagtctcccaaggggacgcgatcccggactgcacaagctgggcccgcgcggcctcccagagcccaagcagtcccttcccagccgttaccaggccacttcccggcgctcactagtgacgtccccgcctcgttctgcgcgtgcgcggctctgcctctccgctgccgttgtcagcgcgacggcgggtcctcggcggtcggcagacatccgggcctgctcctggcagctccgccctggcccgctccgccccgcccgcgggaaaaaggtcgcgtagcgatgacgtcgtgggggcctggccggccgtcgcggactcgggagatggaggaaaaggagatattacggcggcagatccgcctactgcagggtaggtccggccggggccgggacgcgagtccccttctttccccctcacctcgcggcgggtcccctgcccccttgtcgaaggggtcgctcaccgcccgcgtgttctgggtggcggctggggtgggggacggtagggtccgcca

SEQ ID NO: 41238 - DNA, 2300 bp, Homo sapien
gaatcccagcactttgggaggctgaggcgggaggatcacttgagctcagaagttcaagaccagcctgggcaacatagtgagacctttctactgaaaattaaataattttaaaaacttacagccaggtgcggtgactcacgcctgtaatcccagcactttggaaggccaaggcgggtggatagcaaggtcaagagatcgagaccagcctggccaacatggtaaaaccctgtctctactaaaaatacaaaattagctgggcgtggtggcgggcacctgtaatccaagatactcgggagggtgagacaggagaattgcttgagcccgggaggcagagattgcaatgagctgaggttgtgccattgcactccagtctgggcaaaaaagagcaacactccgtctctcacacacagacacaaaattagccgggtgtggtggtacatgcctgtagtcccaactactcgggaggctgaggcaggagaatcgcttgaacctgggaggcagaggttgcaatgagctgagatcacgccactgcactccatcctggtgacagagcaagactcagtctcaaaacaaaaacgaaaactttgccaggtgtggtgctgagcacctgtagtcccagctactcaggagactgacaggaggggatcacttgagcccaggaggtcgaggctgcagtgagtggtgattgtgccactgcactccagcctgggcgacagagagatcttgcctcacacaaaacaaaacaaacaacaaaaaatacacaaaacagccaggagacagcaccagcagggacccgcagggcaccactgtgtccccactgtggtcaggcctaggagtggggccgaagcccaagtagccccatccacaaccgcggagcggctgggagggccgggtgggaggactaccgtgtgcaggggtgggcccatggccctgggcccaccatgacttaggtcagtagggcactgagggagcctgtgccgagactaggtgttgctactgggcactagatttttaaaataactgctttaatgagacataattgtgtaattcccataccatacaattcatccatttaaagtgtgcaattctgtgggtcttagcatattcagaggtatgcaaacatcaccaacggccaatatcaaaacacttcctcaccccagaaagaaaccccaaaccagcaaccgtcgctcccaacccccgtcccgggcaccggcagcgccatctcccttcttccctctggacgtgcccattcgggacacatcacgtgagcaggatcacgccgtccgctccgtgtgcctggcttttcacttagcatgatgtctccaagtctgtgtcgcccgtctgtgtcgcccagtgcatcagggtctcattccttttgaccgtgggcgccgttctacggcctggattccagtgcctggactggccatgtttagtctatgcacgcctcagtggatggacagggtttccaccttgccgctatggcgaaggatgctgccgctatggcgaaggatgctgccgctatggtgaaggatgctgccgctttggcgaaggatgctgccgctatggcgaaggatgatgccgctgtgacgacagctgctgccgctgtggcgaaggatgctgccgctgtgacgacggatgctgccgctatgatgaaggatgatgccgctgtgacgacggatgctgccactatggcgaaggatgctgccgtgaactttggtgcacaggcatctgtttgcgtctttgctttcaattcctgtgggtggagctaggagtggaattgctgggtcacacggtaactcttggaggagctgccaggcttattccagagggccgcacgggttgacattcccaccagcattgcacaaatgttccagtgactccacgtgccccccgcgctggttattcacctttagtaatacgaccatctttgtcagtgtgcagtatctctctgtggattccatttgcatttccttgatgactaagggtgttgagcatctttgcatttgcttgagggcaatttctacattttgtacatctttggaagatctgcccagacccttcggcacaggcccaaagttgtttgtttgcttgtttgtttttgagacggagtctcactctgtcgcccaggctggagtacaatggcatgatctcggctcactgcaacctacacctcccaggttcaagcgattctcttgcctcagcctcccaggtagctgggatcacaggcatgcgccaccacgccgggctaattttgtatttttagtagagacggggtttcaccatgttggtcagtctggtct

SEQ ID NO: 41239 - DNA, 2300 bp, Homo sapien
ggctgggagggccgggtgggaggactaccgtgtgcaggggtgggcccatggccctgggcccaccatgacttaggtcagtagggcactgagggagcctgtgccgagactaggtgttgctactgggcactagatttttaaaataactgctttaatgagacataattgtgtaattcccataccatacaattcatccatttaaagtgtgcaattctgtgggtcttagcatattcagaggtatgcaaacatcaccaacggccaatatcaaaacacttcctcaccccagaaagaaaccccaaaccagcaaccgtcgctcccaacccccgtcccgggcaccggcagcgccatctcccttcttccctctggacgtgcccattcgggacacatcacgtgagcaggatcacgccgtccgctccgtgtgcctggcttttcacttagcatgatgtctccaagtctgtgtcgcccgtctgtgtcgcccagtgcatcagggtctcattccttttgaccgtgggcgccgttctacggcctggattccagtgcctggactggccatgtttagtctatgcacgcctcagtggatggacagggtttccaccttgccgctatggcgaaggatgctgccgctatggcgaaggatgctgccgctatggtgaaggatgctgccgctttggcgaaggatgctgccgctatggcgaaggatgatgccgctgtgacgacagctgctgccgctgtggcgaaggatgctgccgctgtgacgacggatgctgccgctatgatgaaggatgatgccgctgtgacgacggatgctgccactatggcgaaggatgctgccgtgaactttggtgcacaggcatctgtttgcgtctttgctttcaattcctgtgggtggagctaggagtggaattgctgggtcacacggtaactcttggaggagctgccaggcttattccagagggccgcacgggttgacattcccaccagcattgcacaaatgttccagtgactccacgtgccccccgcgctggttattcacctttagtaatacgaccatctttgtcagtgtgcagtatctctctgtggattccatttgcatttccttgatgactaagggtgttgagcatctttgcatttgcttgagggcaatttctacattttgtacatctttggaagatctgcccagacccttcggcacaggcccaaagttgtttgtttgcttgtttgtttttgagacggagtctcactctgtcgcccaggctggagtacaatggcatgatctcggctcactgcaacctacacctcccaggttcaagcgattctcttgcctcagcctcccaggtagctgggatcacaggcatgcgccaccacgccgggctaattttgtatttttagtagagacggggtttcaccatgttggtcagtctggtcttgaactcccgacctcaggtgatccgcccgggcacaggctcagagttttaagaaaaaccacaaagtgctatgaagtttgaggctaccaggatggggcgccaagccaaggttcctccggacgcgcgaggctggtgctccaggcgggctggcgggaagagggggcaggaagggggccggggcgggctctccgggacggttccgggagggcgtcctgggcgggccctgcgtcaggttgcagtttcacttttagctctgggcacctccagctcctgctcgccggacggctcccagggagagcagacgcgccagacgcgccaccctcggggcgccgacggtcacggtgagctgcgccccgccccctcccccggcctggctggagctcccgagtggggccggccgctggctcccgggtgggggatgctggccctgctgccccagcgttcgcccagaaggccccgcgccgcacacgggggcggaagctccaggcttcgggaaaggctgcccctggccagcccaggggcccggcctttggacctgggcttgggcttgactcccaggtccgccatccaggttcccgggccggtgctgttcccgcccccagctgccttctgggcccagcctccactttcagcagacccagcactcagaggcttcctggggcagctgcagcccctccacagtggcccaggtgccccctatcccagcggaggcccgctatggcctctgacccccaaagcctcagccttggacaggtggctcatggagctccaggcacagagaaggccctggaggacgcagctggggtggggcgacactctggctgggttttgcagtgggtccctggtgacactctggctgggttttgcagtgggtccctg

SEQ ID NO: 41240 - DNA, 2300 bp, Homo sapien
gctggagtacaatggcatgatctcggctcactgcaacctacacctcccaggttcaagcgattctcttgcctcagcctcccaggtagctgggatcacaggcatgcgccaccacgccgggctaattttgtatttttagtagagacggggtttcaccatgttggtcagtctggtcttgaactcccgacctcaggtgatccgcccgggcacaggctcagagttttaagaaaaaccacaaagtgctatgaagtttgaggctaccaggatggggcgccaagccaaggttcctccggacgcgcgaggctggtgctccaggcgggctggcgggaagagggggcaggaagggggccggggcgggctctccgggacggttccgggagggcgtcctgggcgggccctgcgtcaggttgcagtttcacttttagctctgggcacctccagctcctgctcgccggacggctcccagggagagcagacgcgccagacgcgccaccctcggggcgccgacggtcacggtgagctgcgccccgccccctcccccggcctggctggagctcccgagtggggccggccgctggctcccgggtgggggatgctggccctgctgccccagcgttcgcccagaaggccccgcgccgcacacgggggcggaagctccaggcttcgggaaaggctgcccctggccagcccaggggcccggcctttggacctgggcttgggcttgactcccaggtccgccatccaggttcccgggccggtgctgttcccgcccccagctgccttctgggcccagcctccactttcagcagacccagcactcagaggcttcctggggcagctgcagcccctccacagtggcccaggtgccccctatcccagcggaggcccgctatggcctctgacccccaaagcctcagccttggacaggtggctcatggagctccaggcacagagaaggccctggaggacgcagctggggtggggcgacactctggctgggttttgcagtgggtccctggtgacactctggctgggttttgcagtgggtccctgcaccacgctcaggaggtgacagcttgtttcctcccagccagaggcagccattctagtggacagagccctctgtgttagagcaggtctgggcgtcaggcctcactgtccctggctggaggtgctcatggtaccgtagacaacagggagaacactgtaattctgtgttggggagggccggggacagaagctttctgctagtgggagcatcccaggatgagctgggcagggctgttctggagggaaggagtcccccatcatgggagacatccaagtactgacccttctcccactccctcccgcccgccccgagagcacaatgcctgacccatttcccctcctcaggagcatggggtcggcctttgagcgggtagtccggagagtggtccaggagctggaccatggtggggagttcatccctgtgaccagcctgcagagctccactggcttccagccctactgcctggtggttaggaagccctcaagctcatggttctggaaaccccgttataagtgtgtcaacctgtctatcaaggacatcctggagccggatgccgcggaaccaggtgcctgatgtggtgctgaggcagagccccagggaggctggatgggagaggggagcgggctggggccaaccatccactgggctctgcagcctctagctctgggcctctcttccagaggccggggcctttccaaaggtccctctgccctggggctgggacagggctggtgggggcgggggagaggcggggcgctgggcacagcctcaggtctggccttgctttagacgtgcagcgtggcaggagcttccacttctacgatgccatggatgggcagatacagggcagcgtggagctggcagccccaggacaggcaaagatcgcaggcggggccgcggtgtctgacagctccagcacctcaatgaatgtgtactcgctgagtgtggaccctaacacctggcagactctgctccatgagaggtgggcccgaagagggcagggcagggcagggccccacctaccccaagcaaccctgcttttatttatttatttatttaaattattttttgaggtgaggttttgctatctcggccagggtggtcttgaactcctggcctcaagcagtcctcctgcctcggcctcccaaagtgctgggattacaggggtgagccactgtgccaggtcccagccttgctcttgggaaggtcacaaccttggggcatcaggaaagtcccagaggcaaaagagcgc

SEQ ID NO: 41241 - DNA, 2300 bp, Homo sapien
cgtgttcacaccaccccttgtcctcacagcagcctggggctcagtccggtccttaggatccagtcctggcagcggaggccccagatgacccctgcagcttccttcctgcaagctggttccggccacagcgctcttttgcctctgggactttcctgatgccccaaggttgtgaccttcccaagagcaaggctgggacctggcacagtggctcacccctgtaatcccagcactttgggaggccgaggcaggaggactgcttgaggccaggagttcaagaccaccctggccgagatagcaaaacctcacctcaaaaaataatttaaataaataaataaataaaagcagggttgcttggggtaggtggggccctgccctgccctgccctcttcgggcccacctctcatggagcagagtctgccaggtgttagggtccacactcagcgagtacacattcattgaggtgctggagctgtcagacaccgcggccccgcctgcgatctttgcctgtcctggggctgccagctccacgctgccctgtatctgcccatccatggcatcgtagaagtggaagctcctgccacgctgcacgtctaaagcaaggccagacctgaggctgtgcccagcgccccgcctctcccccgcccccaccagccctgtcccagccccagggcagagggacctttggaaaggccccggcctctggaagagaggcccagagctagaggctgcagagcccagtggatggttggccccagcccgctcccctctcccatccagcctccctggggctctgcctcagcaccacatcaggcacctggttccgcggcatccggctccaggatgtccttgatagacaggttgacacacttataacggggtttccagaaccatgagcttgagggcttcctaaccaccaggcagtagggctggaagccagtggagctctgcaggctggtcacagggatgaactccccaccatggtccagctcctggaccactctccggactacccgctcaaaggccgaccccatgctcctgaggaggggaaatgggtcaggcattgtgctctcggggcgggcgggagggagtgggagaagggtcagtacttggatgtctcccatgatgggggactccttccctccagaacagccctgcccagctcatcctgggatgctcccactagcagaaagcttctgtccccggccctccccaacacagaattacagtgttctccctgttgtctacggtaccatgagcacctccagccagggacagtgaggcctgacgcccagacctgctctaacacagagggctctgtccactagaatggctgcctctggctgggaggaaacaagctgtcacctcctgagcgtggtgcagggacccactgcaaaacccagccagagtgtcaccagggacccactgcaaaacccagccagagtgtcgccccaccccagctgcgtcctccagggccttctctgtgcctggagctccatgagccacctgtccaaggctgaggctttgggggtcagaggccatagcgggcctccgctgggatagggggcacctgggccactgtggaggggctgcagctgccccaggaagcctctgagtgctgggtctgctgaaagtggaggctgggcccagaaggcagctgggggcgggaacagcaccggcccgggaacctggatggcggacctgggagtcaagcccaagcccaggtccaaaggccgggcccctgggctggccaggggcagcctttcccgaagcctggagcttccgcccccgtgtgcggcgcggggccttctgggcgaacgctggggcagcagggccagcatcccccacccgggagccagcggccggccccactcgggagctccagccaggccgggggagggggcggggcgcagctcaccgtgaccgtcggcgccccgagggtggcgcgtctggcgcgtctgctctccctgggagccgtccggcgagcaggagctggaggtgcccagagctaaaagtgaaactgcaacctgacgcagggcccgcccaggacgccctcccggaaccgtcccggagagcccgccccggcccccttcctgccccctcttcccgccagcccgcctggagcaccagcctcgcgcgtccggaggaaccttggcttggcgccccatcctggtagcctcaaacttcatagcactttgtggtttttcttaaaactctgagcctgtgcccgggcggatcacctgaggtcgggagttcaagaccagactgaccaacatggtgaaaccccgtctctactaaaaata

SEQ ID NO: 41242 - DNA, 2300 bp, Homo sapien
ctgctgaagtctgcccccttccccaccaggtgcatgctctggtgcgtgggctgctggcgcaggtgcccagcctagcggaggggaggccctggagggcggccctgcgagtgctgagcgcactggccctggagcatgcgcgggacgtggtgtgtgcgctgctaccccgctctctgcccgccgatcggtaacccaaccgtcctggccctgcggtccccacgcggcttccttccctcttcccgcttggcggtggagtctggccccagaagagggagctgaaaaggggcagggcctccttattccagccccgcgatgactcatgccccgtatccattcccgctcccctcatttttagctccgcaaactccccccacactcctgccacagagtttctgatgctgggctcctctcttggagccaccttctatcttcgggtggcctcccctggagaccgtcctggggttggctccggagtggggtgaatgaggctggggggctaacgtgcctggacacccctggctctttggttaattggccccagaagttatctttggttttattctctgtggcaatttttttctttttaataatgccaggtttgtttcactgtcgctgacccaacgggactcccagtgggtccccaccctgcagctcagcttgagataggctatgttgtggtctgcacaattaacccttcatttgtttctctgagatttggggatggggggagatgggaggggtttcctgcccctcccctgctggagtcctactggctgcctccaccctggctggggactccctacattccctggacacccacccatctcttgtctcacaccagccccctccaaaccctcagggtagcagccgagctctggcgcagcctaagccgtaaccagcgtgtaaatgggcaggtgctggtgcaactgctgtgggcgctgaagggtgcttcggggccggagccccaggcactggcggtaggtggctccagccattaccagggggtgggggcgggggtggggggtggcgaggagcggggaggatgggcatagggagtttgcacctaggtaactgctcctggaatgtcccatgcgtgtctgaggctgtccccatcctgttgacagcacgcctgtccctctgctgcccagtgcagctccaggcgtgccccaggcctgagtgggccacttgctccacaggccacacgtgctcttggggagatgctggctgtttcgggctgcgtgggagccacgaggggcttctacccacatctgctgcttgcgctggtcacacagctgcacaagctggcccgcagcccgtgctcccccgacatgcccaagatttgggttctgtcccaccgagggccaccacatagccatgccaggtgagaggcaacaccaggttacgtggggcgggccagcatgctgtcaccctctcagctcccactgcccacctgctcactgtccccaccaccagctgtgctgtggaggccttgaaggcgctgctcaccggggatggaggccgcatggtggtcacgtgcatggagcaggcaggaggctggaggaggctggtgggagcccacacccacctggagggcgtcctgctgctggccaggtgaggagggtgaggaggggccccagggtgtcacaccaggaagagagtcgttgctggccaggtgctgggcagggggacagggaaaaggcaggggcatgagggtggtgttgggatggggtcttctcgaggagaaaggccgccaaacggagcgagagctcccatttccacccaccccagtgctatggtggcacatgccgaccaccacctgcgaggcctcttcgcagacttgctccctcggcttcgcagcgcggacgacccgcagcgtctcacggctatggccttcttcacaggggtgagcctgcttcccggatgggtggtgaagggtgaccctggacttgatccctgaatcgcagcggcctgcacggggaccgcgggcgtgctgaccccatgtgcctcgcctagctgttgcagagccggcccaccgcacggctcctgcgggaggaggtcatcctggagcgactcctcacctggcagggagaccccgaacccactgtgcgctggttgggcctgctgggcctgggccacctcgcgctgaatcgcaggaaggtgtgagagaaggggaggggtggagaggggcttggcccggtcgcggcgaggtctgcaagaggctgaccccgagtcccagcaggtgcggcacgtgagcacgctgctgccggcgctcctgggcgcactgggcgaaggcgacgcgcggc

SEQ ID NO: 41243 - DNA, 2300 bp, Homo sapien
gagggacactgggccttcatagccacaaaaggtcttttggtgccagccgacagtgggcatgcgcccccctgccccacgccgccctttcctgggtgccaagctctttccaagcgacatttgcgtccatctgggctgcctcgtcctagcctggctgctcaagctctaactaaggcagcctctggcctccctccccaggcccagggcaggagctggctgctggccagcggttgtcttctgggtcggtgggggtggagtctggctggtctgtcctccaccctttccgccgcctggcaagtcctgagctgcacctcattgcccggccaaagggcagagacacgagcgactgggggcacctctggtgaccaagaccgggctgcgctccaaagaggccgttgggcctggagtggggttggggggtccgagaggagttgggtgacatcccccaccccatcccgggtccagctgtttcagcccctctcggcgcgccgatactattagccccacccgtcctccatcgagtcccgtgccgctcccaaacggcacgataagccccacagggagtgcgccataggccggggcgcgtcacggggtcggggcggggcggagtccggacgtcgggagcaggatggcggcggagcaggaccccgaggcgcgcgcggcggcgcggccgctgctcactgacctctaccaggccaccatggcgttgggctattggcgcgcgggccgggcgcgggacgccgccgagttcgagctcttcttccgccgctgcccgttcggcggcgccttcgccttggccgccggcttgcgcgactgtgtgcgcttcctgcgcgccttccgcctgcgggacgccggtagtcccccgtccgcgcgacgagccccccacgcccggcagaaacccccacctatggccggtggaagtccttgtccccccgtggaaccccccatgtcccacgaccggtctgtccccgcgctggtctcagcgcagttacctcgtttccagacgtgcagttcctggcctcggtgctgcccccagacacggatcctgcgttcttcgagcaccttcgggccctcgactgctccgaggtgacggtgcgagccctgcccgagggctccctcgccttccccggagtgagtaggggtaagcgggcggcgcggcggccacggggtgctgggccgagcgcggagctgacttctctccccgcaggtgccgctcctgcaggtgtccgggccgctcctggtggtgcagctgctggagacaccgctgctctgcctggtcagctacgccaggtgggctgcgggccactggcagggagcgtgggcatgggatgggcccccagcgccggggctccgtgctggactgtggcggcggggctggctgcccaggggtcccaggactggcctcccgcccccactcttcagggtgtaaggaggggctgggtgagggtggagctcccaggttggaagttccaggccccaggtaaccgccgtcttgggtggcctagtgatcctcaccctgggaccccctgactcttggctccccacagcctggtggccaccaacgcagcgcggcttcgcttgatcgcagggccagagaagcggctgctagagatgggcctgaggcgggctcagggccccgatgggggcctgacagcctccacctacagctacctgggcggtgagtgtctggtgcggggcaaggcaagggccgggaaggaggagccccatcttggcccgaggtcccccaatcccaccgccttcctccccaggcttcgacagcagcagcaacgtgctagcgggccagctgcgaggtgtgccggtggccgggaccctggcccactccttcgtcacttccttttcaggcagcgaggtgccccctgacccggtcagtccctcctctaaaccctgctgtctccaggcgacaggccccaagccagcccttgccctggcgagaggtgtgccacccaggcaggtcaccccagtgctgtcccaggaagctggcacgggctgcattacctttgctctcaaactagggtgtccctggctgctcccaggcctcatcctgcattcctggcccccattcttcaccgactctgttccacagatgttggcgccagcagctggtgagggccctggggtggacctggcggccaaagcccaggtgtggctggagcaggtgtgtgcccacctggggctgggggtgcaggagccgcatccaggcgagcgggcagcctttgtggcctatgccttggcttttccccgggccttccagggcctcctggacacctacagcgtgtggaggt

SEQ ID NO: 41244 - DNA, 2300 bp, Homo sapien
cagcctgtgaccctccccctgccctctgggttctggggagactttaaagccgagtttagaagtcttgggataaacacaaacttggaggcaggaaggtgtgaatttggattgttttctgtgggccctttaaggaaacagaattgtggacacacagtggttgagggtagggtgcatgcaggtacttcctgggtgttctgagggtggctgaccccagcttttcctcccctttccccacagtgggatgatgagacggacatggcccagctggaggcctgtgtgcgctctatccagctggacgggctggtctggggggcttccaagctggtgcccgtgggctacggtatccggaagctacagattcagtgtgtggtggaggacgacaaggtggggacagacttgctggaggaggagatcaccaagtttgaggagcacgtgagtgagccggccggggagaggaggggagaggagactggggaccctggcccataccctgcactccaccccacggcagtggggagcgagtcccagagtgaaccccacctcagaggaggctcctggctccgagtgggctgtaggggaacagccctgaccgtcaccctccgcctctcctcaggtgcagagtgtcgatatcgcagctttcaacaagatctgaagcctgagtgtgtgtacgtgcgcgcgtgcgtgaggccctgccacgattaaagactgagaccggccctctggctccgtcctggtcatttcctgctcgtacctggcctgtctccctccctgtctcagccccatctctgccctgctgttcccacacagtcatcctggctgctgccaccctctgtggccatgtcaccttgcccccagcagacctccgcctgtccctccatctcctggccactccctcccaaagctctggccctccctcttctttccattgcaaaagcaagtccagttcagggggtttaaaaagccagaaacagaaactgttaggtcactatctggagaggccaccaccccaccactctgcctcctgttggcattgtccccatgggagcaagcgtgcaagcctggaattgtccaggaaagaagtcccagtagcacccggccctgctgccatgccctttgtcatgtgctgtcccggccctcccctcacctcattcattcctggaatccctgccccttgctccagggactgtgcccctcccatgatgttctggggtggccagaacgtggctgcctgggctctgtggagctgtgcctcagcatcctgacagccgtatgtggtcagcatgggtggccacactccctcccctggaccacccgtgtttgcattggggtgaaagaggatggggtgtaattacttgattacttctggtcagactctgtcctcggggccccaagccacaggggaatggattctccctgggtagtggcccctgactttgccctcaaacctttagaaagtttcctgtggggcttggactgcaggaccccataaaagccaccactgagggacactgggccttcatagccacaaaaggtcttttggtgccagccgacagtgggcatgcgcccccctgccccacgccgccctttcctgggtgccaagctctttccaagcgacatttgcgtccatctgggctgcctcgtcctagcctggctgctcaagctctaactaaggcagcctctggcctccctccccaggcccagggcaggagctggctgctggccagcggttgtcttctgggtcggtgggggtggagtctggctggtctgtcctccaccctttccgccgcctggcaagtcctgagctgcacctcattgcccggccaaagggcagagacacgagcgactgggggcacctctggtgaccaagaccgggctgcgctccaaagaggccgttgggcctggagtggggttggggggtccgagaggagttgggtgacatcccccaccccatcccgggtccagctgtttcagcccctctcggcgcgccgatactattagccccacccgtcctccatcgagtcccgtgccgctcccaaacggcacgataagccccacagggagtgcgccataggccggggcgcgtcacggggtcggggcggggcggagtccggacgtcgggagcaggatggcggcggagcaggaccccgaggcgcgcgcggcggcgcggccgctgctcactgacctctaccaggccaccatggcgttgggctattggcgcgcgggccgggcgcgggacgccgccgagttcgagctcttcttccgccgctgcccgttcggcggcgccttcgccttggccgccg

SEQ ID NO: 41245 - DNA, 2300 bp, Homo sapien
gggattcgggccacatgcccgcaaagaactccatgttccacttagaggctgcagagtgcagtgccaggggtgccttcccaaaagtcctccctgcctgggtggagcgtagacagctcagcaccccacggggggcgttggagccagccttggttttgttgggtaaggatgttagaagaggggcgaagacccatagccactggtgtgaagggtctgctcttgaccgaaggctgcctccctctgggtgcagaccaggcaggtggtcccagtcacggtgccctggggccactgggtctgtctgccctcaggctccactagacacacctgcggaggcagcagactagcagcggtgtctgtgaggggcagctgcacagccccctcttgagggtgctcctaggcgttggttaggcccaggcgtttctgcttttggggagcagagcctggagtcgggcatggctggggaggaagctatcgcaggctgagcgcgggctggggtgctgacctgcatcccaagagcagatttgcccctggccttctgggcctgtcctttctgtaacaccacactggacacctgggagcagagcgtgcccccggcaggatcccacatggctgctggagcactggggcagcaggtgactgaggtcgcccagagcttgagggaacacctcatccagggaggaggctgaggctcccaggccacagtagcaagtggggagtggagcctcacaacctgcctcccaccaagatggtccctcttaacattacacagaagcaaaaccttagagggggccctgatgtcctgggactgtgagagccccatgattcccctttagcttggatggacccaaaggtatggactccagctgggaggcgggggcagctgatagagagcctagagccgtctcagtgctccaggcgcttggcccctcctttctacacagtggtcaccagcatcctccctggcgtctccttcatgagtgggcactccaccctctgcccggccacctggccccctcctggggaggacagtcaggcccacaaagaagctccctctttttttttcttttcccctgctctgttgtccaggctggagtgcagtggcgccatctcggttcactgcaagctccgcctcccggcttcacgccattctcctgcctcagcctccctaggagctgggactacaggcgcctgccaccacgcccggctaatttttatttttatttttagtagagacagggtttcaacgtgttagccaggatggtctcagtctccagaccctgtgatccgcccgcctcggcctcccaaagtgttgggattacaggtgtgagccaccgtgcctggccgaggctccttcttttgtaagaactttgagggtgctctgggtgtggcagtggtgtggccaggacagccacagagaccgttctgtagaatgggaacaccagccaccatggtggggtggccaggcctggcctgtggaaaaatgcagggaaagctagttagccagttaaagcttatttcagataaatgacgaaaaatttttagtgtaagtatgtctcagatacttcatgggccatacattcactaacaaaattatatattgttcatgtattgggaggcacttggcctcccagagtactgagattacaggcatgagccactgcgcccggcctgttttctcttcacaacaaaacgtccccacatgggcttgacttcgaagtcctcgaatgtcatctcatggaagccccactggggagcatcctcagcccctgcccagggagggcagccacggggagggcgggcacggggagggtgggcacggggctgcggccacccgctgtgttgcaactctgccctctgcttgctttttatcgctgtgtccggaagatgaggagcgggaaggcctcctgcaccctggagaccgtgtgggaagacaagcacaagtatgaggaggccgagcggcgcttctacgaacacgaggccacacaggcggccgcctccgcccagcagctgccagccgaggggccagccatgaatgggcccggccaggacgaccctgaggacgctgatgaggcggaagcccctgacggcggcagcaggcgtgatcccaggaagagccaggacagcaggaagcccctgcagaaaaagaggaagcgctcccccaagagcgggctcggccccgcggacctggccctcctgggcctctcggccgaacgcgtgtggctggacaagtcacttttcgaccaggcagagagctcctaccgccagaagctggcagatgtggctgcccaggcagcctggcctcc

SEQ ID NO: 41246 - DNA, 2300 bp, Homo sapien
ccacctgcgcatggcccagtctgcccagagggcctcagtttcccatctggaaagtggaggaattgggttttctggatggggcagcagcaggtgggcaccctgtgtggccgtgagcagggtcctgtcctgggctggcgggtcagcagctgacatgcggctccctgcagggaacaggtggcagtgccaggtctcggtaggagccttgaagtggcttcccctccctgagcggcggcttctgcccggagcccccaagaacatagtctgaggccactttggccaataaagtctggtagggcatcaacactgggggccagctcagtggcactgctgatgggacctgcacggctccatgggagcagagagactggtgggggtaccaccgcacgatgtcacaatgccctgtctcctgggctcttgctcccaccccacccccaacccacaacccctgcctctgcccatcagcctggccttggtaagtgctgccccagcctggggaaggaatgagcaggggagcctagggagcgtcttcatgggccctgtggcctcccatgggccccggttcctcgttggtgccattagaacttgttgctgggactgcgggattcgggccacatgcccgcaaagaactccatgttccacttagaggctgcagagtgcagtgccaggggtgccttcccaaaagtcctccctgcctgggtggagcgtagacagctcagcaccccacggggggcgttggagccagccttggttttgttgggtaaggatgttagaagaggggcgaagacccatagccactggtgtgaagggtctgctcttgaccgaaggctgcctccctctgggtgcagaccaggcaggtggtcccagtcacggtgccctggggccactgggtctgtctgccctcaggctccactagacacacctgcggaggcagcagactagcagcggtgtctgtgaggggcagctgcacagccccctcttgagggtgctcctaggcgttggttaggcccaggcgtttctgcttttggggagcagagcctggagtcgggcatggctggggaggaagctatcgcaggctgagcgcgggctggggtgctgacctgcatcccaagagcagatttgcccctggccttctgggcctgtcctttctgtaacaccacactggacacctgggagcagagcgtgcccccggcaggatcccacatggctgctggagcactggggcagcaggtgactgaggtcgcccagagcttgagggaacacctcatccagggaggaggctgaggctcccaggccacagtagcaagtggggagtggagcctcacaacctgcctcccaccaagatggtccctcttaacattacacagaagcaaaaccttagagggggccctgatgtcctgggactgtgagagccccatgattcccctttagcttggatggacccaaaggtatggactccagctgggaggcgggggcagctgatagagagcctagagccgtctcagtgctccaggcgcttggcccctcctttctacacagtggtcaccagcatcctccctggcgtctccttcatgagtgggcactccaccctctgcccggccacctggccccctcctggggaggacagtcaggcccacaaagaagctccctctttttttttcttttcccctgctctgttgtccaggctggagtgcagtggcgccatctcggttcactgcaagctccgcctcccggcttcacgccattctcctgcctcagcctccctaggagctgggactacaggcgcctgccaccacgcccggctaatttttatttttatttttagtagagacagggtttcaacgtgttagccaggatggtctcagtctccagaccctgtgatccgcccgcctcggcctcccaaagtgttgggattacaggtgtgagccaccgtgcctggccgaggctccttcttttgtaagaactttgagggtgctctgggtgtggcagtggtgtggccaggacagccacagagaccgttctgtagaatgggaacaccagccaccatggtggggtggccaggcctggcctgtggaaaaatgcagggaaagctagttagccagttaaagcttatttcagataaatgacgaaaaatttttagtgtaagtatgtctcagatacttcatgggccatacattcactaacaaaattatatattgttcatgtattgggaggcacttggcctcccagagtactgagattacaggcatgagccactgcgcccggcctgttttctcttcacaacaaaacgtccccacatgggc

SEQ ID NO: 41247 - DNA, 2300 bp, Homo sapien
tttctggaaccccagacaatacccacgccacacctcacacggcacccttggctgtcagcgaggtgggagagctggagacctgtggcaggctcctacaccagcacttagcataactcactgccaccagcttccaacacgctgatgtcaccttaacacactggcacaggatgatgacccacaaatcctcaatgccacatttcctgtcctcagcccccagaaggctgacgccagtgcacggcacagcccaggtactctttgtccatcatcaagcacgtgtgcccacctgtgctaaaccttgcagcctcacccagcaacccgggagcaaagcccagagggcctagtcctccagaggaggcgggaggcagcgggggctctgtcggctgggcgctcactctgccagcactgactgcgtgtgaaccctgcagcagcccaggggagatgctgctgtctcacaggattggcactgcgcccagaaagcctctacagaggcaggtctaggagcctggctgggcctgaggcatgtggtgagaaggcgaaggtgagcgtctacttcctcagaggacgctcgggggctccttccacacctgcccagcccctcagctgcatcccccacccccagaacggggctgggcacacacgggctccggaagtaaccaactgcctgcgagccagctgcttaaggctcatggggtccagatgacggggtgggcggagctgtagaaggaggctgctcaggtgagatggcctggcctgcctccctgggaggtgagccgcaggcagtgtcaacttaagaagcaccccgccctgtcgggcagggacaaccccaagtttagctacacagttcttctgctgccaggcggtccttcattctggaaaccaatcctgacgtctcatcaggtccccaacccactccgccccctttgccttcttccttccacttaaagcctctgaaagtactacttcttagcaacagcatccccgcccccttcagagactgcccgaccaccctatccaaatcaagagacagaaattttgacccagtcacagtacaggcttattcctttccgtgctcactagcgtctaagttccaaaagtgttgcgtccgtgcctatcccctccgtgctcagctgatgcgtgcagtaactggtgcttgacaaagacgtggtgtacgaaggtctgcaggccagagaaacagctggggcagatgtctggtctcccacggagacggcagcaaacacaggccttaggccccagcagcctggccgaggggcttccacgaccgggatgcgccgtgagacagtgctcccggcgcccccgtcccgcggacgccctccaagccggccacgtggcctccgtcgccccgcctctctgcgctcgccccaagtgccgcacttggcccacggcccctaagcccgcgctggcgcacttgtgcctcagtccctaacggcgcgagcttctggcgcagcccgggccgcccgccctcccggcccctcgggcgtctctgtcgcgcccgactccttccggcgggggccgcggtactcacacgccagccaaggacgcggcgaccaaggaggaggaatcggcggacgcgggaagactgatgaaagggagggccgcccgggccgcgcacgggaaatgaagcactgggctctaccaagagccacgggccgggggcccgggggggggacgcgacccttgcacacgccccgcctggccgccaggaccctcgacgcgccgtgccccgacacttcaaaggcagaattccgttggagatgaccgcggaggccgctcttccccggaggagtctgcacaagtgctgggaacgggcggcagcgcgcgcgccccccctgcgcttcgcggccagtggtgtcgccggtgggggcgggtccggcagccggcaagcgccgagtgacgcacgaggcggccagcgcgcaggcgcggggcggggccgggccgggctaggtcagcgcgcgtgcgcccgccaagctgcgggacaaaggggagggacccgtgcggccccgcccccgagtgccccgccccgagcggctgggcgtgtggctcccgcgacccgcgcggcccgggtcccccccgccgcagccatgtaccccgcgggccccccggccggcccggtaccgcgccgcggccgccgtcccctgcccgggccccccgcgcccgccccagcccccgtccccgctgcacggccgccgccccccgcgcccgggccgcggccccgcgtggccgtgaagatggccttccgcaaggcctactccatcaaggacaagctgcaggccatcgagcgc

SEQ ID NO: 41248 - DNA, 2300 bp, Homo sapien
tcgtccaggtgcagccactccgcaacctcctccggagccaggcacttgtaggccagagccgccaggtgggtgaggtcgctgagcaccctgctgtgctcggcggcttcctcggcctgggccggctgcccagcactgtcctcgccgggccggggctcgaaggcagcccgcaggcccagcagccagcagcgctcaatgctgcccgcctgcaccaggtcccaggagaggccagccaggtagagcatgtccttgagcatgaagctgcgcatgaagtccagcggggagccgctggcgcaggacacagccagtcgcagcagctcgcgcttgtacagctgtttgaaggcggccaccacgccctgctccagcggtgcggggatatgtgcccggctgctgcctttggacaggaacagcacccgcacagcgccatccggtgtctgcagctcctccgggggaccgaggggctccggcctgcaccgcacgggggcatcctcgctgtccagggcgggcatactggcagctgggcttgggcagggcgggtgggccaccagcagcacggccttctgctgcaggcagcttcggcgcaggtagcgtttgacgcctgggacaaattcctcaaagaaccagccccgcagcagcgggcggctgagccaggcgtcggggctgtagcggtaggaggccgggaacttgtcctggttgtggtggcgcaggctgggcgggtccggcagccgcccgatgaccagcggcttcagcttgtggctgccggtcaggtttgcggccagcagcaccgttacgcggtcgccccgccagcgccggccacagccccccgccccggggtcccctgcgcccgggggcgcagcctgctccggaagcagcttccagtagaggccggtgacgctggcgctgtaaatctgctcgtccccgtagccgccctcggccgggggcggcggggccggggcgcggtcgggcagggggccggcgccggagggcagcgcgggctcctccttgacgggcgggccgggcgcggggctcggggctgggggcccggcctcgccgtagaagcgctggctggagatgccgtggcgcttctgccagcgccagaaccagccgtggctggccttgaaggtgcactcgggcccgtagatctggcgcgcgaaggcctcggcctgcgcctggatgagcgggccagacagcggcaccccgtgctggcgcagcgccaggaaccaggcgtacacggcgcggtcgatctcctcctcgttggccagccgcatcttcttgcgctgagtgcccacctcaccgcccagctgctccaggaaccagcgcagcttgggctcgtccttgagccagccgcgcagcgtcccgcccggcacgccgaagtcgcggcacacactggcctgccgctcgccgcccttgacgcgctcgatggcctgcagcttgtccttgatggagtaggccttgcggaaggccatcttcacggccacgcggggccgcggcccgggcgcggggggcggcggccgtgcagcggggacgggggctggggcgggcgcggggggcccgggcaggggacggcggccgcggcgcggtaccgggccggccggggggcccgcggggtacatggctgcggcgggggggacccgggccgcgcgggtcgcgggagccacacgcccagccgctcggggcggggcactcgggggcggggccgcacgggtccctcccctttgtcccgcagcttggcgggcgcacgcgcgctgacctagcccggcccggccccgccccgcgcctgcgcgctggccgcctcgtgcgtcactcggcgcttgccggctgccggacccgcccccaccggcgacaccactggccgcgaagcgcagggggggcgcgcgcgctgccgcccgttcccagcacttgtgcagactcctccggggaagagcggcctccgcggtcatctccaacggaattctgcctttgaagtgtcggggcacggcgcgtcgagggtcctggcggccaggcggggcgtgtgcaagggtcgcgtcccccccccgggcccccggcccgtggctcttggtagagcccagtgcttcatttcccgtgcgcggcccgggcggccctccctttcatcagtcttcccgcgtccgccgattcctcctccttggtcgccgcgtccttggctggcgtgtgagtaccgcggcccccgccggaaggagtcgggcgcgacagagacgcccgaggggccgggagggcgggcggcccgggctgcgccagaagctcgcgccgttagggactgaggcacaagtgcgccagcgcgggct

SEQ ID NO: 41249 - DNA, 2300 bp, Homo sapien
ggccaggcacgttggctcacacctgtcatcccagcactttgggaggctgaggcgggtggatcacctgagattgggagttcgagaccagcctggccaacatggtgaaaaccccgtctctactaaaaatacaaaaattagctgggcgtggtggcaggtgcctgtaaccctagctactcaggaggctgaggcacgagaaatgcttgaagccagaaggcagagattgcagtgagccaagatcacaacaccgcgctccagtctgcgcgacagagcgagactctgtctcaaaaaaaaaaaaaaaaaagtgcaggtgcacgctggtggggacattaggagcctgtcaagagtgggtctgcctgctggcacttactagacgggaaataccccctaaagagggcttaaaaagcatcttctccctagcacggggcatgctggcacagggtgctgtgtgacagaggcttggccgctgggccccgctgctgagaaggctgctctgcccatgcctggccctgtgggcagtgccagccatggatccctgagaccctgggctggaacctggggccccgtcccagccctacctgcagctcactaaccctctctgggttctgctcagtgtctgaagtgatggaaagaccccagggttggtggctgtagcggcccccaggggtggcagaaccctttgggaggccaagtgttctttcccaaagctgcgcgggtgccatcgcctgccaggccctggctgtggtgacagacgtgggctggggtgaggctgcatctgcttcctctaacagccgtggctgcctgcgggctctggcctccgctctggcagattctgcacattccctgcaggcgcaggggtgggtgggggtgcctgtggcctcggaggtacagccagctgtcctcagctcagatggcccccaagagcccccagctcctgttcactgctcttccagttagtgacccccgtgtcagcatcattgtcagagttcctgggcttgtgggggctggagaagggaaggcgctgaggagggaaagatgagtgcaggttttgttgaaaccacccgacccgcgttttcagggggacgaggccactgccttggcccaaggacctgcaggcttgggggaccccctcgatgtccactgggctgcggatgaaacatcacactgtggtaggaaaggaaggggagcacccccagacgggggggtcctgcagagaccccaaccccttacctacctagttgagacacccatggggagcagccccaacagcatgtcggagtccctaggcttgtggggtcatgctctgttgagggcccttcctctaactggcgagcttgtttacagctgagctcgcctggtcagatgggcccagtggctttatctaataaaggctggacatgtccacttcatgagcatccctgttttgaagtcttatttttaaactcttgatccaacgcttggatcaggaataccccctagattaacagttggggcatagggcataaaagtggaacattgatcaaagataccgtaatcatatccatcgttttctgtcttgaagaacagttttcacctggaagtagaaggcacaggggaggcctggctcaccacaacgctccctgccgtgccgagaactgagcccgtgtctttgtcacaggccctcaccagctgggccaggagtggctggcttgggatctccacctcccgagctgagctcacctagtgcccagggcttgtcagaggtcccagggggagacaggtgttggtgcaaagtcaatgatttctccttgcagatgggcttggtgtgaatgcaggtggccgtcagaagggctgtccaccttccttcagggggccgcctgcaccagaccccaggctcccaggcctgcccaggcttggcatacagtcccctggggtgacagcgtgcaggggaaactgcaattccatgccctacaaagcccccaggtgatgtagaggcctgtagcaggcatggggagacctctgctgtccacagtgccagcacccccttcggctgacacctgtgcttgaccaaggttccaggcctcaacttatggggcaggcattggaccttctttttttttttttccaagacagagtcttgctgtcacccaggctggagtgcagtggcatgatcttggctctctgcaatctccgcctcctggattcaagcaattctcctgcctcagcctcccaagtagctgggattacaggcacgcaccaccacatccagctaattttgtatttttagtagagatggggtttctccatgttggtcaggttggtct

SEQ ID NO: 41250 - DNA, 2300 bp, Homo sapien
cctgtcccggcactgagtccagaccggtgtgtcctgcacccagccaaccgctcacctcatctctcactgtccctttgtgtccagcaagccgaggtgtcctccaggcctcccctgagactggccccctcttgggtcaaggcctccctaccttttaggcctcagctgaggtggcccagcctccaaaacaccttccctgatggcaccttcacagcgcctctcggagcatccaccctgccctgctgggattgtttgtctggaaacctctgggagccccgcctcaacccctaaccctcccgctgacaccccaggacctcgagctccaggagacgggttggcctcgttcacagtgtatcccctggccccagccctttgtggataaaggctctgcccatgtgggggttcaggaaaggcctcctggagagggtggcgcctatgtggctgcttggatccaccaggtgaacagtgggaagaagcccagccaagagcagagaggtgccctggacacaagccttggctggctgggtgtccacgtcagctgagggctcccagctgatgctcagaagcccagcccggcatgggacggagaagctgaacggggctgggcccctgggcctccttttacccactgtggccctgggcactcagccagcaatcctccttcacctcgcctcagtccacttgtttatgatgagctttgtccttatgtatgatggcatggcactggatgcctctggcccctctcacctccccacagccttggtcctgagccatcactggcccagggggcctgggagaaaatccagggagtctgtgggaaggggctgggaggatccgaggtggcaggagatacagctgctgacgctgtgtgctggtgcaaagtgtccaccacccacgtttctcggctgcagtggccgaagcagcctcctggtggctttctgtccctttccacctcatttgcttcagagccttgacacactggctgtcctgcgtgtgtgctgactgtagtctgtctacactgccaccaagcagggctgcagggtggggtccagcctgtcccatctgctgccgtggggtgatcttgcccaggcccagagcagggcccagaggctgcagctgcacagtgaatgttgaatcaatgagaggatttcattactgaagagcttagaaaatgtcaaaggcttgggccggcacggtggctcacgcctgtaatcccagcactttgggaggccgaggcaggtggatcacgaggtcaggagattgagaccatcctggctaacaaggtgaaaccccatctctactaaaaatacaaaaaaataagccgggcgtggtggcggtcgcctatagtcccagctacttgggaggctgaggcaggagaatggcgtgaacccgggagacggagcttgcagcgagcccagatggcgccactgcactccagcctgggcgacagagcgagactccgtctcaaaaaaaagaaaaaagaaaatgtcaaaggcttcaaaagaaaataacatatgtaacatgcagctttagattggatgatgaaaaaaccgcactcagatcttcaagccttgttttccttgtgtcattaaaagtgacgagtaccccctccccgactgtcccctccgtcggtctcaggcccctggccctggcctgctctccgtgacctgggtctccgcccctagtgcttccccgcagctccaccgtctgtggtcggcggggcctcagtgaccgcacgctctggaccagccccgcaacccgcttcgctacccctcccctccggaaaaccaacatgtgctcctcgcacgcgcgaccgggacccctccccgctcctccggcctctccgagcgcgagtaccccgccggccccgccccttacggccccgcccccagtttctctcagccaatgggcagtgaggggcggcatagccctttcgggccaataagcagcgagaggcggggttcccgcgccttgcgaacttgtagagtgcggacaaaaagccggccggagtgtgccgtcccagtaaccaatcggcgagggtggggacggggaggcgagtcctattggagggcgggggtggggcctagatctgtgggcggggcgcggcctgtggatgggcggtgagcgcagcggcgtccgaggcaacaagatggcagctgcggagccgtctccgcggcgcgtgggcttcgtgggcgcgggccgcatggcgggggccatcgcgcagggcctcatcagagcaggtggggcggcgcggggctaggcctgcggtctggagtgggagcagccccgtgggaggtgtcctg

SEQ ID NO: 41251 - DNA, 2300 bp, Homo sapien
ccatcaccagagcaggtggacatacccagcagcgactcacttcagtcatctctaatgttttgctaacttccagtcagataaaagccatcgccttacggatgtctttaaacgttatcatcatgaaacgtcctttcatagcaagatgttaaggtggtgggggcggaccacatttcccttacccttgtcagcctgagtgactgtttttattttatttatttgagatggagtctcgctctgtcgtccaggctggggtgcggtggcgccacctgggctcactgcaacctctgcctcctggggtcaagcgattctcctgcctcagcctcccaagtagctgggattacaggcgcgcgcaactacccccgactaatttttcatttttattagataccggatttcaccatgttttgccaggctggtctcgaactcctgacctcaaatgatccgcccgcctcggcctcccaaagtgctgggatcacaggcctgagccaccgcgcatggccgtgactgcttttaaacgcctttcgatggaagacgatgacggtggcctctcgatgtcagggccgcgctgccaccccctcccgccccaggcagcaggactgggctctgagctgagggcaggagcagctggcggctcgcagcgcgaccgtgggaaccactgtgagccgccgcgaccctccttgactcgccgtgacccatcgtgatccgatgtgatccttcttaacccgccgtgacccgctgtcacccacagtcacccaacgtgattcgccgtaactctggtgttgtttgctgcttgctgcccgagcctgggcgtacccatgggcgcgggtgacagtgcaagtgcttgggacgacaacccgggctcctcatcgcggccggaatccaagaggctgcggcgcgaggtctgcgtattcgggggcggaaccctgggagggaaggggagcaaagggagacgccgcagcgtaagcccgcctggccccagcgccggcgaggctccttccgacgccgcgggcatcccgcgcggcgctgccggctggccctcgtctcgtgtccttccgccgtcccaagcagggcctgggcccagcgccccgcgggctaaagaggttgcggcccgggacttcgtccggggacccgcccgcgcgcggccggcggacgagactgcgcttcccaagcggctttgcggccgcggactccaagtcccagctgtgcccgggacgctgcgcgcccccgggactccatttcccagagtgccccgccccagcctcccggccccgccccccacctggctccgcgggcagccggagcgcacccggccggaagccgctgtcggggagccggcggtggggctggacgcaggtgaggtggcaccggactcagccgcgccctgggccctggatgctccgtgagagtcagggagcgctgtgggggtctgggatcgaggggcatgggggcagcctggggctgtggtagagggtctggctgcggtgaggtctccccgcgtgcttgggagccgcgcgacgcctgcgcagggccccctcccctaagggctggccctggggccctgccgggggagcccgagcaggtttccggctcccaggatgggatccttgagggtggctgcgccccgaggcctgtcctgccctggaggaatctggctcgccagggctctccaggaccagccagcctcgagtgggcgtgggctgcacacaggcgccgtctcgtgcctgtccctagcatgcgggctttagctgcgaaccgtgttaacgacctgtgccaggagcccccgtcccaaggttgtctgcctcccctcttgtcagtcagaggggagtagaatgtaccttttctcggcctagtggggagtcgtgggttgggaccagctgctctgggctgggtggtagctcaggacccctgcggcgctgtaggctgagagctcccaggggaacagggctgcgacgagggagtgcctcggtccagctgggtctttctggttgccagtggactatgccccactctgagggcctcactctgtgccagttgccacagaagagtggggctccaaaggatgagagcgtgatgacctcagcctcccactgtttgacattacaggtgcaactgacatgggtgaaccccagggatccatgcggattctagtgacagggggctctgggctggtaggcaaagccatccagaaggtggtagcagatggagctggacttcctggagaggactgggtgtttgtctcctctaaagacgccgatctcacgtgagtgagcccatccccagatcagcccttcctctccatc

SEQ ID NO: 41252 - DNA, 2300 bp, Homo sapien
ggcatgcaccaccacacccagctaattttgtatttttagtagagacggggtttctccatgttggtcaggctggtctcgaactcccgacctcaggtgatctgcccacctcggcctcccaaagtgctgggattacaggtgtgagccaccacacccagccgaaccaatttttaaaaagaagagtacaagccgagtgcaatggctcatgcctgtaatctcagaggtttgggaggccaaggcaggaggaatgcttgaatttgagtgatcaggacaggaatttgagaccagcctgggcaacacagcaagactccatctctgaaaacaaaaaagaagtacaatgacttaagaaagattgtgtagttcgacactatggtcaacagaatacaaattatgtgactttaatatcataattagtaactgctgaaatgaagaaaactaaatttttatggaagaaatatataacaatttagaaactgtgaagtcttttttttttttgagatggagtctcgctctgtcgcccaggctggagtgcagtggcgcgatctcggctcactgcaagctccgcctcccgggttcaggccattctcctgcctcagcctccggagtagctgggactacgggcgccccccaccatgccgggctaatttttttgtttttttttagtagagacagggtttcaccgtgttagccaggatggtctcgatctcctgacctcgtgatccgcctgcctcggcctcccaaagtgctgggattacaggcgtgagccactgcgcccggcctaaaattgtgaaatctttattaagcaacgctgcctgcccatcaccagagcaggtggacatacccagcagcgactcacttcagtcatctctaatgttttgctaacttccagtcagataaaagccatcgccttacggatgtctttaaacgttatcatcatgaaacgtcctttcatagcaagatgttaaggtggtgggggcggaccacatttcccttacccttgtcagcctgagtgactgtttttattttatttatttgagatggagtctcgctctgtcgtccaggctggggtgcggtggcgccacctgggctcactgcaacctctgcctcctggggtcaagcgattctcctgcctcagcctcccaagtagctgggattacaggcgcgcgcaactacccccgactaatttttcatttttattagataccggatttcaccatgttttgccaggctggtctcgaactcctgacctcaaatgatccgcccgcctcggcctcccaaagtgctgggatcacaggcctgagccaccgcgcatggccgtgactgcttttaaacgcctttcgatggaagacgatgacggtggcctctcgatgtcagggccgcgctgccaccccctcccgccccaggcagcaggactgggctctgagctgagggcaggagcagctggcggctcgcagcgcgaccgtgggaaccactgtgagccgccgcgaccctccttgactcgccgtgacccatcgtgatccgatgtgatccttcttaacccgccgtgacccgctgtcacccacagtcacccaacgtgattcgccgtaactctggtgttgtttgctgcttgctgcccgagcctgggcgtacccatgggcgcgggtgacagtgcaagtgcttgggacgacaacccgggctcctcatcgcggccggaatccaagaggctgcggcgcgaggtctgcgtattcgggggcggaaccctgggagggaaggggagcaaagggagacgccgcagcgtaagcccgcctggccccagcgccggcgaggctccttccgacgccgcgggcatcccgcgcggcgctgccggctggccctcgtctcgtgtccttccgccgtcccaagcagggcctgggcccagcgccccgcgggctaaagaggttgcggcccgggacttcgtccggggacccgcccgcgcgcggccggcggacgagactgcgcttcccaagcggctttgcggccgcggactccaagtcccagctgtgcccgggacgctgcgcgcccccgggactccatttcccagagtgccccgccccagcctcccggccccgccccccacctggctccgcgggcagccggagcgcacccggccggaagccgctgtcggggagccggcggtggggctggacgcaggtgaggtggcaccggactcagccgcgccctgggccctggatgctccgtgagagtcagggagcgctgtgggggtctgggatcgaggggcatgggggcagcctggggctgtggtagagggtctggctgcggtgagg

SEQ ID NO: 41253 - DNA, 2300 bp, Homo sapien
ttggagtctttctacgaaagtgcaaaggctccgagggggcagggactgcaggggccagtgtgaccaaagaagagggaaggggagggcagggtgagcagcaggagtccaggcccagtggcccttgtggggccagagtaggggatgggaaacctttgtcagttttgagtagaaaagtgacatctgatttatgattttaaagcgtaattctgctggctgtgtagaaaagagctggagaaggggagaagtaagcaggtgggaggtggtcacgcttcatggtgaaaggcgatggtgcagatggcagccctgtaggctgtgggcgtctggcgctgggcatggttttgaacagatgtggagtgtgaacaaagggaagaggattcaagggttattgcagtgtctgtggcctgaacaaatgagataatggagaaaactatagaaggaggaaaatcagaagtgaggctggacgcattagggttgaaaaacttctgagagcatccaaatgaaggtgttgggtgaggagctggtcaggtgttggggctggaaagaaggccaggttggaggcaggcatgtgagtgttcagcatagatggcgttggtgtctgataatgagtgcactcccctctgtaatggacagagatgagggctgagccctagacacgccagggctttgaggcgtcaggggacactgggaggagctatcagtgaggcgggtagggaacagagaaaggctgtcccagattcacataaggagagtgacttctgaaggagcggggctgtgtcagtgccaccgcaggttgagttggaagtgtggccatagctgacccctgatatggtgacgtggatgtttggggtgagagccctactgtagtaggctcaggggaaggaggaaatggagaaatcgagcgtggggtgggggctctttgaatggggctgcggaggaggagagtcatggggtagtaattggtgggacatggggcccatgacgtgcatttttcaggtcgctgggaactggcgcacttcttcatgctgaggggagtggtgggcttggagggcaaggacttcaggatggaggagagggatgggtgctcaggtgctgtccctgcatgtgtgagagggaaagggagctcacacacaagtggaagtgttgcctttaagtcagaacaagggcagtttaacccaggtaacaagcctggcagaggatgggtggagatacaggctggcaggagacgtgggaggcagtggatgtccttgcctgatttcttctgttttctcattgaaacaagaagcaaggtcaccagtggggagggaggagggagtgctgagtttgtaagaagataggagaagtggaaggtcctgtggggagtgggaagggtaggagttgctggcagctctcaggccccattaggcaagcagctctgaatttaaagagctcagtcagctggctggatgtggtggctcacgtctgtaatcccagcagtttgggaggccgaggcgggcagatcacgaggtcaggagatcgagaccatcctggctaacacggtaaaaccccgtctctactaaaaatacaaaaaaattagccgggcgtggtggcgggcgcctgtagtcccagctgcttgggaggctgaggcaggagaatggtgtgaacccaggaggcagaacttgcagtgagccgagattgcaccactgcactccagcctgggtgacagagcgagactccatctaaaaaaaaaaaaaacaaaaacaaacaaaaaaacagcaagagtgcaggcacaaatcaaaacacaacctcgttttaaccaaaggttgggctttcccatccaagtatcatggagggaggaaagggcaggggagcccgattctgtgcaggagggtgattctcatgcaacttacagtgaacacagtgccccagatcatgggctctaagctaggtatggaggggagaagaggacatgaaggaaggaatgaggaacagtgaagaggtggcagggctgatgtgtttatacgtttgtttaaagtatctgtctcggttttttaatggagttcaagcatatccccacccctctgcaactcatccaggattcactaatggtcagaggagtgttgtgcaccacagaccagtctgtcctggtgttggatgttaaaagtggagccacaaagaagccatcttatgtgggacaggcttgggtgtgagaccagagctgtgggtagcagcatgttgggtcaggatgaggggcagaggaaacactttccacctcttggatatggattttatcctgccctgattcaggagatccccatctgtta

SEQ ID NO: 41254 - DNA, 2300 bp, Homo sapien
tgttttcagcgtcgaggtggaggtttcactggggacctgcccccatttggctgggcatttggctgcctgcctcctgtcgctatcactcctttactagtgaggactaaactgatctttttctctcttgctcaagttcttatctaaagggcctggggagtctgccctacaaaccataaaatgtcatcagataggttttatttaaccctatataattggcttagtttccaacctgactctagcataacgtcacatgacagataaaggaaatcaaaatattttactctttttttttttttttttttgagacggagtctcactctgtcgcccaggctggaatggagtggcgcgatctcggctcactgcaagctccgcctctgggtttcacaccgttctcctgcctcagcctcccgagtagctgggactacaggcgcccgccaccatgcccggctaatttgttgtatttttagtagagacgggtttcaccatgttagccaggatggtctcgatctcctgacctcgtgatccacccgcctcggcctcccaaagtgctgagattacaggcgggagccaccgtgcccggcctattttacttttaaatatatttcttggctatactttggatgctttcaggtcataggtggattcaaagattttctgattggcaattggttgaataagttaagtgattacctaagacctggaatctatagaaaggcgtgtctaggtttgaacagttggccacccttgtgtgggtggagtattacataggtgcctaggcaagagactgaaggcacaaactgtttcagtataataaagaaaatagttagaataagaatagtcataatacaaattagatatagagatgaccatgaacaattatcaatcattattataaacattattaatcattagcttttaccattactctttgttgcattactaatataacctaggaataaccggcggatatagggtcgggtgctgaagggacatggtgagaagtgacctagaaggcaagaggtgagccttctgtcactcccacatcagggctgcttgagggctccttggtcaagccctaacgccagtgtctgggaagtcacccgttgcttagtagactgcgaaagggagtctcctttccttggaggagtcagggaacactctgctccaccagcttcttgtgggaggttggatattacccaggcctggccgcagtcatccggaggcctaaacccctccctgtggtgcttcaatgttcacgctccttgtccactttcgtgttcctcctgtactcctggttcctctttgaagttcgtagtcgatagcggtagaagaaatagtgaaagtcttaaagtctttgattaatgctaacttatgctgccttctctctctgcttccgctacctaagagggaagggccccctgtcctgtaatcatgtgacttgcttcaccttgtcaatcacttagaagattcaccctccttaccctggccccttgtcttgtatgcaataaatatcagcgcgcccagccgtttggggccactaccggtctctgcgtcttgatggtagtggtcgcccgggcccagctgttttctctttatctctttgtcttgtgtctttatttattacaatctctcatctccgcacacggggacaacacccgcttagccccgcagggctggaccctacacccttgattggctggaactgggtgactggcaggagagcaagtgacagtctgttcacacctccagttaggttacagttcactttgtaggataaacctttaggccgactttaggttatgagggccgggatcggtggttcacgcctgtaaccccagcactttgggaggccaagtcaggcggatcacctgaggtcaggagttcaaaaccagcctgaccaacatgatgaaacccccgtctctactaaaattacaaaaaaatcagccgggcgtcgtggcgcttggctgtgaccggggcggggcctgccggctgcggcggaaccacaagcggtgcggggcgaggcgggcggcctggacggcctggaaggccagcgcgcaccaccgagacgtgggctcctagaggggccggaagctttcggataacaacttccgctcgggaagtttgtaaaagtctgggctaccggcgcggcgtagtggatgcagcatcctagtggaggacgcccctgtggtgagtgcgcccgtgtcccccgccgcccctccgtccctgggtcgtgggctgtcaaaccttctaattctgcggccgccccagggctgtgagacccagcgtcgcggctgctggga

SEQ ID NO: 41255 - DNA, 2300 bp, Homo sapien
caaagaccctcctgcagcctctgcgctgggccgtagaaacaagagcctttgtaatactgaacctcattcaaggattaggagtggtggttaggtcagggccacccccagtgctgcaggaacggcctccacccagctctgttggtcagagcctgggtcatgcacctggagttgggagatcaagttgggtctcagggcagtgaggtggccatatccaccacatcgcatttcgtgggggaagaggtgacctctttgttttaaacttaaggtgtctgcttatccagccagaaataaaaatctgccagtggtgttcccaagggaagacccccgtgggaatgggtcgggacactgccgtgtttcaggttagccaattatttttgcttttgcctgtttttctttaagaattgcagccaggccaggcgtggtggctcacgcctgaaatcccagctactcgggaggctgaggcaggagaatcgtttgaatccgggaggtggaggttgtggtgagccaaggttgcgccattgcactccagcctgggcagtaagagtgaaactccgtctcaaaaaaaaaattccagccaacagatgcatatgtaatgttggaatcagaaacgagtttacaagaaatagggggatgaggagaaggttgaacacaccgagaggaagccctgagccagatccggctggagatgccaccagacggcgacgtttctgtgggaagacgggcacgcagaaaggccgagggggctgtgtgtgaccctggtaggagcaaaccgagtgcgaagtcacttttgagacaatcatggaaatgtgggcacgggccgtgagtcgggtgggtaggccgtgagtcgggtggatggactgagtcgggtgggtgggccgtgagtcgggtggatggactgagtcgggtgggtgggccgtgagtcgggtggatggactgagtcgggtgggtgggccgtgagtcgggtggatggactgagtcgggtgggtgggccgtgagtcgggtggatggactgagtcgggtgggtgggccgtgagtcgggtggatggactgagtcgggtgggtgggccgtgagtcgggtggatggactgagtcgggtgggtgggccgtgagtcgggtggatggactgagtcgtgtgggtggccgtgagtcgggtgggtgggctgtgagtcgggtgggtggccgtgagttgcgtggtgggccgtgagttgcgtgggtgggccgtgagtcgggtgggtgggccgtgagtcgggtgggggtgcggaattggctgctagcggtgatggtgacacagggttacggaggaatcctcactcagatgcatttggacgtctttgtggggaaatgacgtggcgcctgggatgtactttacgattctaataaagaggagaaagacacaacagtattggctgaatgttgacagctgttgaagccgggaggttggtgtgcttaaaagttccccaaatcttttatttgcagcatgagtatgagtttcttcgtgctcacggaagattgtagagagcagctgtcggtcatggagtcacagggctgccttaccaggacaccaccggcagccccacagacaacacaggtttattctctccagctctgcaggctggaagtccgaggtagaggtgccaacagggtccgtttccggcgagcgcctcctggttcagaggcatcctcatgtcaggaggggctttggtgtcaccttttccttgtgagggcccggatcccatgacccctatcaccccatcgaagccaaatcacctcccagagacctcctcataccatcacgtcgggcctagggcttccacatgggaatttcagagtgaccattcagcccgtagcagaagctcctctgggtctgtcctggcccacagaccctgtgtaggaaaagcacttgcccctgcggggcaggccctggcagagcccggtgaggcagtgagggccctgcaggataagtggaaatctccccaggggggatatgggggtgcctttctcttacagagtccaggctggtaaaagcgcatgtgtgtttcgtgtctggtttgtcccctgcccagcgggcgccgttggaagggccttcaggtgcttgagcacaggtggggacggagcagctggtgtctcggcagtagatgcggcggatcataaggacttgggttttgagcgccctgcaggaagccactggccgcgtccagggtcacctgtgcctggtcgttagtccctcacaatgctgtcactttgtgacgctcttgtgcaggattaaatgtgaacagcagagacgtgggtgatgcgctgcc

SEQ ID NO: 41256 - DNA, 2300 bp, Homo sapien
ggacgggtgacaaagttgtgatgtgagcgacgatggggataatattcctccacagtaaatgtcctggttctgatcactgcactaaagcatcgtaggagaacatccctctgttcaggaaatacacacgaaagtacttcggggctccggggccagcgtctccaaccgcatctcaaacggttccgaagcaacgctcgtgcacagcgatacacacggaccaaattcacgggcagcgtcagcggccgggcatccggataaagggtccatggcggtccctgtgctatttttgcaactttctctaagttggaaagtatatcaaagttttaaaattactgaaaaactcccagtaggttgaacataagacatccccttggcgcggagaacaaagtctacgcttttcccccgggcctcaccgtagcggcccagctgccagctgccgcttcgtcgcacgtccgcgcccgccagtgcccgggcttgctctgagcctgccggctcgcggtagggccccactgagggcagggatgcggggtcccaaagggcattcagggaaagcaggcgctgagctctcttgcagcttggaaattggacgcacgaatgagtggccggccggaaatgctagagcatgcacgcgggtgtcagagccgcctgggggccacgcctttattaaccattgcattatccccgtaagcgccctgcgcgcctgactcgcccacactagggcctcctgggcctcactctctgcaggttcaggctctacccggggaggcttctgccgcagcttcagcgttcacgctgtcctccgactgtggggggagaagagccggatcccgatcccgggacaggccagagagaagcttggggccagacttcgtggagcggagagtgtcctgtgaggacaccctcggtgaggaccccgaagagatcccagagccctcgagtgactgcaccagcgacagggcccgggagcctgcgcgcgaagcggtcagggatggcatccgggatcccacctttgaagtggccagcgatgggaccctggagtccatgctcgatagcaccaacgaggggacccgggaagcctcgcgcgacgggaccacggacgaggcccggggggccgcgcgcgacggtaccacagacggggtctgggaggccgcgcgcgacgggcttatgggggcggctaatgacccggggcgcgaggtgggctgggagaaggccggccgctcccagagcggcgggcctccggggcccctgcgcagccagccgtgcacacgcgccaggtcccgcgtgtcctcgtgctcgcggtgcagttgctcgcgctgttccagcagctggcgccgcgtgtggtgcagcagctgggtccggcggagcagcagcagcagctcctgccgcaggcgtccgttgtccgctttgatggcctgcgtgtgcgccacaagcgcgcgcaccgcctcccgctccgcgcgccgcgccagtgactgcacgcgctgacgcgcctcgcgctcgaaggccgccttgtcctccaggaagcgccgcttcacgcggtggagcagctgcgtgtgctccacgcgcatatgcagcagctcgcgctccagcgcccggatccgggccagctgctccagctgcagcacctgcggcgggggcgccgtcagctcacccccaccccgcccccggcccggccaccagccccgccccgcctcaccccggccgcgggcgggctcactggccttgtagggctgcagctcttgcacctgctgtgccatctgtgccgcgcgcgcctccatctccaacagctgcgcgcgcaccccgtcctcgcgcccgtggtagagcgaggccagttccgcccgctgccagtggatctgcgctaggtccacgcggttctgctcgtccagccggacgatggctttggcgcagcgctgggcgcgcgcgctcacgtagctggcgtagagccggttctcctcgcgcaggcgcagcgcctcgcggtccaggaaggcgttctctcgcagcacctggtcaacgctctcctcgcaggtgtccagctgctccgagagcagcgcgtgttcgcgttgcaggtactgcgcgcgctccgatagcggctgctcggcacccgcggccgccgcaccacctggctggctccctgcgctcggcccgcgctttttcttgggcgccatgggttggtgcctggaccaccaggactggtgagggcagcgaccccggccccttccccaatttagcccttcctcttacctggcctaaatattctaggcgccaggcccagaggtgggacgcgcctcggggtcacgaggcttttg

SEQ ID NO: 41257 - DNA, 2300 bp, Homo sapien
aaaaaacattgtggcttattgtcaaatatatttgaccaacaaatgatgagaaaaaaataatcttgacaaaatttatatcggcaagaatatttggacaagggaaagttggacttggttgaaatagtgcccaggccggggtgggtggatcacgaggccaggaaatcgagaccatcctggctaacacggtgaaaccccgtctctactaaaaatacaaaaaattagccaggcgtggtggcgggcacctgtagtcccagctacttgggaggctgagacaggagaatggcgtgaacctgggaggcggagctggcagtgagctgagatggcgccactgcactctaccctgggtgacagagcgagactctgtctcaaaaaaaaaaagggatggggcgcggtggctcactcctgtaatcccagcactttggctgcccatcgtctgggaagtgaggagcgcctctgcccggccgctgtgcaaccttccaagtgtgaagtgacagccttgtgtgtgatcttttctgtcttccccaagtttgcattttcgacattaaagtttactttttagttaaagaaaaatggtaagttttacgtcagccatcttgctttttgctttttttttttttttttttttttttttagacggagtctcagtctgtcacccaggctggagtgcagtggtgcaatctcggctcactgcaacctctgcatcctgggttcaagcgattctcctgcctcagcctccctagtagctggaattacaggtgcacgccaccatgcccagctaatttttgtatttttagtagaaacaaggtttcaccatattggccaggctagtctcaaacttccaacttcaggtgatccacctgcctcggcctcccaaagtgctgggattataggcgtgcgccatcacgcccagcctttttttttttttttttttttttctgaggagtcttgctcttgttgccaggctggagttcagtggcgcgatctcagctcactgcaacctccacctcctgggttcaagtgattctcctgcctcagcctcccaagtagctgggactataggcgcccaccacggcgcccaccaccacacccagctaatttttttgtatttttaatagagacggggtttcaccatgttggccaggatggtctcgatctcctgatctcgtgatccacccgcctcggcctcccaaagtgctgggattacaggtgtgagccactgcgcccagccctgctatttgttttctactggtcttatcttttctttgttccttttccttctttttttgaattctttttgagcaagtagtttgtgttgtggttgttgtttgagacagggtctggctctgtcacccaggctggagtgcagtggcgcaatccaggctcactgcaacctctgcctcccggctcaagcgatcctcctacctcagcctcccaagtagctgggacaacaggctcatgtcaccacacccagctaattttcctattttttttttttaatagaaatgaggttttatgttgccgaagctggtctccaattcctgagtcattagccacgcccggctaatttttgtatttttagtggagacggggtttcaccacgttggccaggctggtcttgaacccttgacctcgggtgatccacccgcctcggcctcccagagtgttgggattacaggcgtgaaccaccgtgtcccgcccaaataataatatactattaatacttcacatgtaacttaagaaccttacaatacatattctcatgttattttgtaatagtataaatgtgtatttccattatcccccttcactttttgctattggtgtcatgcattttacttctacaagttatagagtccacaacagatagttcttgtttctactttagtcagctgggctgggcgtggtcctgcgaggaggtgggcggggcgcactgtggggcggggccggtggggacgtgggcggggcgcattgaggggaggggcctgcggggaggtggggtgggcccactgtggggcggagccggggcctgccgggggcggggggtgttgggaggggcgccccgaggggcggggccgggccgccgtcggttcccacggcaaccgactcaacagtaaggccccgcgggcgtcctggccgccatgtgcaccgtagtggaccctcgcattgtccggagatacctactcaggcggcagctcgggcagggggtgagtgcctgggggtgcgtccgcgcgccgaggggcgcggcagatctgcggagagaggacctgcggggcgcggccggtcccctcggaggcctgttc

SEQ ID NO: 41258 - DNA, 2300 bp, Homo sapien
gtgccctggaaggcctcctgggcatgggctaaactccagcctacccaagtcactgacggccctttccacagtgtgtccatgctcgagggtaggagtggtcccagtgcccccacccctagtcatgtgtctccctgcccctccaggcccctggccccaacatggcccgtcgctctcagagctcctcgcagggggacaacccactggcacccgggtacctgccgcctcactacaaagagtactaccgcctggcggtggatgcactggccgagggtggctcggaggcctacagccgcttcctcgctaccgagggggcaccagacttcctgtgccctgaagagctggaacatgtgagccgacaccttcggcctccgcagtatgttacccgagagccacctgaaggcagccttctcgacgtggacatggatggctcctcgggtacatactggccagtgaactcagaccaggccgtgcctgagcttgatttgggctggcctctgaccttcggcttccagggcaccgaggtgaccaccttggtgcagccaccgccccccgacagccccagtatcaaggatgaggcccgcaggatgatccgttccgcccagcaggtgcgccatcttgggcttgagggtagtgggggaggggcctgggctagaggcacgggggtggaggagatgcatgagcatgatcagcttgaggggtgagcctgagctccagctggagtgggggtccctggcaaagatcttcagggctgccaggtctcggtcatcaggggctgcaggctctgcacaggtctgcttgcctgtggtcatggccagtgcccagaaactcgggggctctggggatgggtgggcaccccaccagcctgggttcattgttcagataattacctctcatcctgcccggtggcccttggccagctgagggcttctaaccatcaccaaacagctagcagacggcggaaggtgctgttaaaccatagcgactgaggcatgaggtccagacgctaaaggcttgtgactttctcccctgcccagggcaacaaccccgtcccagggcagaactggagcctggcacttggccctgacagctgccctggaatgggggcagctcagccgtctgtagggtggaggggattgaggggcccttgccgtgccccaacctggcccaccctcatccagggttctctgccctgcacctgcctcggtttcccccttatggccagccgttccacacctcttctgtttggtcccttcttcctgcccatcttcccagatgtggcgccaactccctaggatggactagcttgtttcacagtggtcgtgggtgatccagacacctcccgggtgtggaggggaggctggacaatggtgtggggacagcaggggcctctcctctccgtcctgacccgcccctgcaggtggtggccgtggtgatggacatgttcactgatgtggacctgctcagcgaagtgctggaggccgcggcccgtcgggtcccagtctacatcctgctggatgagatgaacgcgcagcacttcctggacatggccgacaagtgccgtgtcaacctgcagcacgtggatgtgagttcccgggagtgggagattggggaggacccgtgggagagatctgactcccctccctccccagttcctgcgcgtacggactgtggcgggccccacctactactgccgcactgggaagtccttcaagggccacgtcaaggagaagttcctgctggtggactgtgccgtggtgatgagtgggagctacaggtgcgcccgcggggctccctcacccccttctctggggcctcctcctgtaaccccagcaccccctttccacaccagggccctcctcgccaggagcccttgtcctgtagacccctgcacagcctagccgggcccaggtccttgcagacctcacatccctgcgtcctccgcgccccacccgctgcccacggggctgcagtgccctcgctccagctcggtttgactctggccctgacccccccacagcttcatgtggtcctttgagaagatccaccgcagcctggcgcacgtgttccaaggagagctggtctccagcttcgacgaggagttccgcatcctcttcgcgcagtccgagccgcttgtgccctcggccgcggccctggcccgcatggacgcctatgccctggctccgtatgccggggccgggcctctcgtgggcgtccctggggtcggggcgccaacccccttctccttccctaaacgagcgcacctcctgttcccgccaccccgggaagagggcctgggcttc

SEQ ID NO: 41259 - DNA, 2300 bp, Homo sapien
aggaaggtgcccagaggagcgtgcccctgggcgctgacaggatggatgccggccagctggactacatgggtgctagccggagccacttggctgagaatgttggggtcaggaggcagccgtcctgcctggtgcccctgggggtgacatggagttgagacatgggaaatacctggtgccactcaacagccctagatgccaaccggcttgggagaagctgtcccaacatttctttgttggggcaccgtcctcatggttgacatatggggctggttagggcacaccgctctggttgtgccaggggcagatcgaggccaaccacatgggggtgaggtgtaggcctgtctggctgggccgaggagcccactcaccattgccagcctgtctgtaggggcggtgtctgaccatacagggcagggggaacaaccctgctgatgttgtttgagggtacttcccgacactggggggacactctagaaaggacccccactgtccctttggatttcagtgtccaggctccaggctgtgtgtaatgggggcagggaccatccagacagtggaagcccccgtggccaggagccctcccagcagacatgcctcgtcctcacagggtgatgcccagacctccaactgcttcattcctcacgtcgtctcctttcatgggtacgtgtctcctgggctatggacggggctgcagccactcccgagcccaagatggagcaccccagtggcctgcatgcccacacatttgcctaccaaacgtctgcccaagggagggagggcgcggaacccacccatgggcaatgactcagcacgaatccactcttctgcttgctgacccctgacctctgactcgaagtcagggccctcagctggccttcaaggaccccatcctctccaccctggcaggaagtggggttcctgagtatctggaaggaggaccccatggaaggatctggagttcctacacaaagtggggtgaacctgtgccaagttccgatgggcgcaggagggcgcggaggctctaggcggcggaaaggtggggtgcggaggacggggctcacagaccggaagtcgctcagtgataacttgcggagtgggcaccccagcccccaacggggtcagtgcaccctacgagctcgcggctgcggccgctgggtgccctatccgcccaccccagcccaggaacgtgggcgcgaggggcagcactcccatcactcgccctgctcgccacgcggggatccaggccgcaccctggccaccccagtccacggcggcccgggcggatgtccccagggaagggtccaggccgtgcccagcacccagactccagctaggccgcgagggcgggagcgagtcgggacggccgggcaggctcgacccggatcccgggccccttccccctcggctcttttcgggccggcgtcgtgcgggggcgctcgcgtccatatccgcacagcggcgccccctgtccgagcagccccgccaccccggccccgcgcacgcggccgcgctccactcccaccgcccctctctgggtcgcgcggccccggcccaggtgtgggcgcaagggtagcccaagtgggaccgcgccaaggggcgcccgccccccgcctcgccccgccccgctcgggccgggggaggggggccctacctggccaggtgcgcggggtctcggcacaggggcagcaggagccgaccgccgcccagcggcctcgcggtccggtcggtccggcagccactccctgccgcggcccgcccggcctgattcacgcgcccgcccccgccccgcccgtcgctcctgcctcctgcctgcccgggcagcacctgggggcggggcagccccacccgcggcgcgcccgcattcctgcgccccgcgcccgccgccagccccagcccgcgcccccggcccgcgccccgacccgcccgtgccctgcggccgcgcgcccggagaccccggcccagcgccgccggagaccgtgaggcccgcacttcaaagaccccgacccccgggagcccaactgttgacccaaggctcaaagttcccagcctgacccctgaccctcgccccggaagtcggggtgactcggaagttccggctcagtcgctaggaaacgagcgagcccgacgccaggggcggagctctggcctcctcgccgagttgggggaggcaggtgcgacaggtgaggacggtggggcggcgtcgagccccgggcggggccgggtctgggagccccgagagcacaggggatcccctcaccacacaccggtctcccaccgcaccagcgccccacacgtagacg

SEQ ID NO: 41260 - DNA, 2300 bp, Homo sapien
gcctaccaccagggctcactggtgatgctctgaaccgtggggtcagccaggtttccccctgcagttactcctgccccttgaaatcagcaagtgaggaaggtgctttgagagcatataataggctgtttctcatccagcttcgcctgtgagcctcagcaccttgatggttctgagcgggccccgaggtggttggcgacattcctgacccaccactgccatactcatcaggcagcttcctgccaccgagccttcccttctcccagtttatgtgtgtctgcttacctgttcacgtgggctcacaagggagtccatttcattaacaagtgagcttccattttatttcatgggcgacagccttttaccatcgtaatttattttgaggctcaaattgtcccagccttggcccacggaaggggcttgaggacctgaggcattctgacacgacctcccctctctcagcagcccctcaccttctgcctccaggatgtgctgggcttctctccataccctgcccagccctggagttgcccctttctctcaggagcgctggatccttttagtggagagtgacatttagaagctgtggtctggccctggacccagcgttcttggggtgtcatctcgggacctcctgggggccagagctggagggtatgccggtcattcccaaggttattcttggaacagtagaagagggtgagctcctagtggctgtcggagtcagcacccgggtctgccttttctgtgtttgaacagctctctctgacatgagaggccgggctacctgggaccttgcttcccactctgccaggacccctgcctctcttggacctgcccagtggctttttgacttgttatttcagaaactgagaagacaggcaccttgtttgttgtttgtcccgctagtcctgtgagtctgaaagagacgtagctaagtctgcctgtgtaactgtgcttttacgacactcgcgtttctagtctttgctttctgtgtttagctgcttccttgttgagcgcttacagttgatgactgtatcatcgttgtaaacagcatcttctgtggtgacggcatccgtctgcctgctcgacagctctgaactcacaccctttctcccccggcctgagcagcccctccctgtgcctcccgtgtgtttgcctggcatctctttgcctgccccttacttaccatttcagctgtgtttttaaccaacagtacagggctgggtttgtccctgaggccacactgagagctcctcgattttgcagggaccccgtctgtgatgagggcggtgagcaatgcctgtgtccactgtgctgcctcctccgctgcttctggctgctgctgggggtggaggtttgaagcagtcccgttgcccgccgcaggcttggaagtcagctcttcccatggttccctctgcccgtgttaaccccaggctcgggattcaagtacatcttgtgcccaaccagaagcccctgcctgtcctggccctgtctcctcgcccccctctgccctgcctgagctatctgagtgcctttcctttctagacgccccctccgccctgccagtctctggcttgggacaggtgattgagctctggggagtgcagagctggccgggcctcctgcatggtgtcccttgtttcagaatccctgcccagcactcacactggggtctggagccagcctttccacccgagggggccgttctgccccatcagttccagtgcctgctactcacgcccctccttcccccatcttggtggctgtcagctcttcctggggatgactttacacagtcagcagagtggcaggcatcatgctacttcacagtcttgcctagtgcagacgtgaccacgtccacggcagccctgtgagctgtgatggggaccggccggggacagtgctgcagcgtcctggggggcccagcggagtgccctccaaggctgccccagccacgcggtcagccctgcccagggacgcggctcctgggctcaccgttgctgactattctgggctgggaccccagcctgccccagaggtgggaccccgggttgcagtccccccttcttagcccacacccctcttctcaggtgtccccaggtgtcattgccaacccctttgcggcaggcatcggccaccggaacagcctggagagcatctcttccatcgaccgggagctgagccctgagggcccaggcaaggtcagaggtgcctgcagccggcagccccagggccagggagcccgaggccggtggtgcctgacgggtctgctctgctctgctcacaggagaaggagctgc

SEQ ID NO: 41261 - DNA, 2300 bp, Homo sapien
ccccaggagagaatcacctgggcaagtgccacctgggctttccgttgtcaccctggctcccatccagcgccctgattgctcatctttgttctgtgggtacaggtgtgtttttctaccagtgggtagggcagcagctgcacctggcacagtggcctctccaggaggggccgctcctgggctgaccgagaggggtcaggctactggcaggtctggtggggtttggaccctgtatgggagtcctggagcctccacctggacacctagctgttcagccggggcacgggcatccgggggctctgaagaggcatgcgcccttcttgtagggacacactgagggcaggtgagggccctgaagcccagccaggaggcgtctgcccagggctcatatgctgcgtctgctgctcagctctcctgacctttgcgtgggaactgctgctcctgggtgttggggtgggggtgtgggtcagtaacccagcgaccttaggtgtgtgttgggctgtgcagatgggccggaggtatccaggagcggggccatgtgtggcctggccgtgggggcatctgcttgcctcccgtggccagtgtgtgtcctggccctagggcttcccacaccgggtttcagaggacctggtaggggaggggtcggtgcccacgaggaaccttgtggctaaaggtctcgggtgatgtcagcgcctggggcctttcccctcgccctgtgcctcagtctccccatcctggagggagcgtgtggagcccccagcacgtggctgtctgtggcggcactgggtcctgaatacgcacgtggtccctggcccgcaggtgaatggtgtggctctgcagggcgccgagcaccacgaggccgtggaggcgctccggggggccggcactgccgtgcagatgcgagtgtggcgggagcgcatggtggagcctgagaacgcggtcaccatcacgccgctgcggcccgaggatgattacagcccccgagagcggcggggaggggggctgcgcctgcccctgctcccgcctgagagccccgggcccctccgtcagcgccacgtggcctgcctggcacgcagcgagagggggctgggcttcagcattgctggtgggaaaggctccacaccctacagggctggtgatgcggtgaggctggggcccagggccggggagggctgctctagagctgacagccgcactccagcctcaccggcagccctgcctcctccaccctcccctgcagggcatcttcgtctcccgcattgccgagggcggtgctgctcaccgcgcgggcacactgcaggttggcgaccgcgtcctctctgtgagtggggatggggccccgccccacccacccatcccccctgccccgccccgcgccctctgtccccttctgcccttgggcctccctgattcgggcacgctctcacagattaatggagtggacgtgactgaggccaggcatgaccacgccgtctccctgctgaccgctgcctcccccaccatcgccctgctgttggagcgggaggctgggggccctcttcctcccagccctctgccacattcctcaccccccaccgctgctgttgccaccaccagcataaccactgccacccccggggtgcctgggttgccgagcctggcccccagcctgctggctgccgcgttggaagggccatacccagtggaggtgagacacaagcccccacccaggcacccacccagcttcagctgtgggcactggccttcccaggacctgctctcttatggccttgcggcccactccaggtgggaagccggcctgctcgccctttcccctgcagctccttgaggctggggctctgccccacagccagactcctcagtatggtccccttgacacagtctcctggctggccacatggccacagtcagcgaggatattgtcctcacgctgcgtgcctgcctgggcagcagaacactggtggcgcagaaatccccgtgggcattagggcagcccccgcccgccatccccaaggaccgggacggactcttgggagccctcccacaccctttccctgtcctgaccgaggcctgtccttgtcccgccctaaatccccaggagatccgtctgccaagagctgggggccctctggggcttagtattgtcggaggctccgaccattccagccacccgtttggtgtccaggagcctggtgtgttcatctccaaggtagggcggcccatccaggcggttctgtgagaggtgcacccatcccaggtaccagcgcaggtcagcgcggcctcagccaccagctgccaccctc

SEQ ID NO: 41262 - DNA, 2300 bp, Homo sapien
tcacgcctctccccgcccctgttgcttgagcgcagatccctctcaaaagagctctcagatccagctgggctccaggatcaggacacctcctgcctggggcagcccgtcttggcaggggtgagcggagaggctggtccagctcccatcagccgcctgtggtgctctgagccttacctgcctgcggaggcagcgcagtcctcactcgagggtggcaggggggcctcgggccaccatcacctggaggtgggcaagccccagcccaccacgctctgcagagcagtgccctcctgctggggtcttggggcttctccagctggcgtctgggctggccctggctggtgagtggcatgaggccccattcagctgcctagagaaaagccagaaatggcatctgcgtgctggtggggtctcctgcagagagcacaggcagccccactgcggcccttctagacaccctgtctgttctgtttccagctgaccctcactatcctgcggcagactgggggcctgggcatcagcattgcgggcggcaagggctccacaccctataagggggacgacgaggtgagcactgcctaggagggcctttccgctgccactggcctgccccaccacagttcacactgatggcacacaggccccttgccctgagaacactcacacgctctggggacacgggctgggcccaaggcacctactgttgtgggatcccgaagtccaagagcaacctgagggtgcctgggtctgtcttcccttcacagccctccttctctcaccagctgcctgtgcaccaggcctggggccacgagccctttctcggggctgacgtgctccttctaaccccctggcactcaggatcccacagtggctagagctcagtcctcctgctggccagggctaggggctgctgggagtgggtcttcccctcctgggtcttctgcagaaggagcaggaatgcgggcccgtctccctggcccctgccaagctcgtgtctgtgccctagggcatattcatctctcgggtgtccgaggaaggccctgcggcccgggctggagtccgtgtgggtgacaagctcctggaggtgagtcggcaacctctccgccccgagtggcagctgtgccctctggaggtacatggtccctggtattagggtgcttggctgccttctcccggcctccccaagagttccaagcacaggacacccagacttccgggtgaagccacggaacctgtaaaccccaggagagaatcacctgggcaagtgccacctgggctttccgttgtcaccctggctcccatccagcgccctgattgctcatctttgttctgtgggtacaggtgtgtttttctaccagtgggtagggcagcagctgcacctggcacagtggcctctccaggaggggccgctcctgggctgaccgagaggggtcaggctactggcaggtctggtggggtttggaccctgtatgggagtcctggagcctccacctggacacctagctgttcagccggggcacgggcatccgggggctctgaagaggcatgcgcccttcttgtagggacacactgagggcaggtgagggccctgaagcccagccaggaggcgtctgcccagggctcatatgctgcgtctgctgctcagctctcctgacctttgcgtgggaactgctgctcctgggtgttggggtgggggtgtgggtcagtaacccagcgaccttaggtgtgtgttgggctgtgcagatgggccggaggtatccaggagcggggccatgtgtggcctggccgtgggggcatctgcttgcctcccgtggccagtgtgtgtcctggccctagggcttcccacaccgggtttcagaggacctggtaggggaggggtcggtgcccacgaggaaccttgtggctaaaggtctcgggtgatgtcagcgcctggggcctttcccctcgccctgtgcctcagtctccccatcctggagggagcgtgtggagcccccagcacgtggctgtctgtggcggcactgggtcctgaatacgcacgtggtccctggcccgcaggtgaatggtgtggctctgcagggcgccgagcaccacgaggccgtggaggcgctccggggggccggcactgccgtgcagatgcgagtgtggcgggagcgcatggtggagcctgagaacgcggtcaccatcacgccgctgcggcccgaggatgattacagcccccgagagcggcggggaggggggctgcgcctgcccctgctcccgcctgagagccccgggcccctccgtcagcgccacgtggcctgcct

SEQ ID NO: 41263 - DNA, 2300 bp, Homo sapien
gaagcggctgagtgccgagtctggcctgagtgaagactctcgcccatctgccagcacagtctctgaggctgagcccgagggcccgtcggctgaggcacagggtgggagccagcaggaagccacgactgctggcggggaggaagacgccgaagaggactaccaggaggtgtggattggcaggaaggaggcaggaggctgggcctgctgggtgggggctgcctcccctgcggggcctcagctgggatcggttttggtgcaggcagtgcctgggccctgctgatgcttcggggagctgccctgtacagagtggctacgggtggtgcagggccgtgctgctgggggtgccctggagagctgcctccctaggtggggttaaggtctcccctgacggctgggctcacagagcccacccccaccctggactctcttctgacccccgtgggctccctggtgtgaggccttggcgcaccccttcgtttccacctggggcgctgcgtgtctccaggatgagcccctggccttcagcttttctcagggctgagacacgcgcccctcactgggcagttagtgctgagtctttgtgtggcggggaggctttcggagcccgtctgtggccacactgtttagtagggtcttcctgtggaagcacagccacagagctggggccaccctcacccttttgtccgcacagcccacggtgcatttcgcagaggacgcactgctgcccggggatgacagggagatcgaggaggggcagcctgaggccccctggaccctgccaggcgggaggcagcggctcatccgcaaggacacacctcactacaaaaagcacttcaagatctccaagctgccccagcccgaggccgttgtggctctgctgcagggcatgcagcctgatggggagggccctgtggctcccgggggctggcacaatggcccccacgcaccctgggctcctcgggcccagaaggaggaggaggaggaggaagagggtagtcctcaggaggaggaggtagaggaggaggaggaaaacagggctgaagaggaagaggccagcactgaggaggaggacaaggagggggccgtggtttctgcgccctctgtcaaggttggtgtcagcctcacccctgcctgacccagattcccctggccctcctgggcacccagggctgcggcaggagcagggccgaggcctgacccactggcccctggccacccggagaaggtggtggacacgtgtgctccacagtcggcatcacggccactctcaccagaccccaggcctgccctggcattggtctcagtccatgcttggactccaggcctgccctggcgttggtctcagtccatgcttggaccccaggcctgccctggcgttggtctcagtccatgcttggaccccaggcctgccctggcgttggtctcagtgccagaggcagctctgctggccagtatttgcccgacctgctggcgggcacggagttcacagaagtcaagcatggctgcccactctttgtgggtctccagggcctgtctacatgtgtcgtggtcccagggcagggtctgttcctctcccaagatcactgggctctcctgggatcctctcttgtgttgggcactgcaggcccgaggccctgatggctcttttctgccttgtcgggccctcctgaggtgccacacaggccttcggggcaccagtgtgtccctccctggccctcaagtctcctctccatgggtcacaaagggtctcacctgctctctgggcaaactcagattccagggggagtccccgggtctcactatccctgcccttgatgacactctgaccctgagtgtgggccagtggcatgatagctgagggggcccggaggggccacagcagggacagcccggtgggactctgctcagctctggagccccgcttgtccccaggtgtgtggtgtcactcacgcctccaggatggaggcgcccgtgccagggcagtcgagggagcttgctgtggtctcctctgtcctttctgcttgtggcgggggctgggtgaggcggtggtggtggtcttggcggtggctaacctgcatgcctcactggtcctgtcctaacagggagtgtcgtttgaccaggccaataacctgctgatagagcctgctcgcattgaggaggaagaggtctgtactgctcgctctgcactctggccgggccgctgctggccttgcttcccgggctgtgggctcacgcctctccccgcccctgttgcttgagcgcagatccctctcaaaagagctctcagatccagctgggct

SEQ ID NO: 41264 - DNA, 2300 bp, Homo sapien
ccaacgctgggtctcctggagcccaagaaggagaaggaagaagaggagctgtttcccgagtcagagcggccagagatgctgagcgagcaggagcacatgagcatctcgggcagtagcgcccgacacatggtgatgcagaagctgctccgcaagcaggaggtaggcagaggggcagggtggtggcgggggagagggtaggggggcggggccgcagtgctcagctgtcttcccctcggccctgccccacagtctacagtgatggttctgcgcaacatggtggaccccaaggacatcgatgatgacctggaaggggaggtgacagaggagtgtggcaagttcggggccgtgaaccgcgtcatcatctaccaagagaaacaaggcgaggaggaggatgcagaaatcattgtcaagatctttgtggagttttccatagcctctgagactcataaggccatccaggccctcaatggccgctggtttgctggccgcaaggtggtggctgaagtgtacgaccaggagcgttttgataacagtgacctctctgcgtgacagtggtccctctccccggacttgcacttgttccttgtttcctctgggttttatagtgatacagtggtgtccccggggccaggcgcgctctgcccagcccagcctacagtgcggataaaggtgcggatgctgctggccctgaacgtccgtgtgtctgccgtcggtcctgtcaccgatcctgggcgtgtgtccttagggggtctagggcgaggaggcagggttgggggggtctctggacctgcttcctgttggcaggaggggcctgccgtgggcgagacctgggcagggggttggcgccccgggccccgtcccgcgggtggcggcggctgggtgggcggggctgcctggggcgccaggctctcgcgcgcgggctcgcagccgtccccgcagggtggtgctgagagaaggctgggcaccgggacaccgcgacccgctggacagcgcgcgctgccagtgcttttgtgccgcagagccggccgtccaaggcgggcgggcgggcatggtcgcttcccgggaggaggctgtgcgttaagattcgtggccaaatgccgcggggccaggggccgggctgaagaccggagggcggagggcgccgcctctcgtggattgtagctcccaatatcccgcgcgcggggcgggcccggcttcccggcacgctttgcgcggtgccgctacgggtcctcagaggcggcggcgcgcggggccttctgggggccgcagtccgggcgtgctaggcggcgagggccggactcggcttcccgacgggctgcgcggcggccgggtgggtgtcggcggggcagtccggcgggcagcggcggttccggtgcggcacagcgggcggacgagcgggcgggacgagctgagcaggaccaagcgggatgcggagccgccgccgccgccgctccccgcgcttcctaagagtctgagacccgccgggccgcgccccctgcccaggcccgcagtccgagcgttccgagcgcgggccgggcccagcgccggccgcggccgcgtccccgtccagtctcgggcggcccgccccctgcctgcgccccctccccatgcgcggcgcccatgcggactgagccccgccccccggccccgagcccgccgagcgccgccgccggagcccgcgccgcccacccgcaccatgctcaagtgcatcccgctgtggcgctgcaaccggcacgtggagtcggtggacaagcggcactgttcgctgcaggccgtgccggaggagatctaccgctacagccgcagcctggaggagctgctgctcgacgccaaccagctgcgcgagctgcccaaggtgagcggccgcccgcacctgccgcccaaaggcgcgcccccagcccgtgattcctccggcggcagaatctgcccgggcgagtcaccgcagcctccagccggccctgctggtttgcactggccaggtccccaccccagccagccccacccttctcttccagccgccctggctggcgcaggtggcagcggtcatcaggtgcttgcctggggatagcgattgtcaccgagcctggaggcggagcctcagagtgaaacccgtggggattcagggaggtggatggggttagggtggaacttggattcaggtggctgatgagtactagcttcttgggccgctctggaggtgggtccagacctcctctccttttttgctgggtgcaggggtgagtgggggagccctcttgatgtactctttgctctcggatctgttcgctgtccccctttct

SEQ ID NO: 41265 - DNA, 2300 bp, Homo sapien
ttttgggttgcaggaagcagtggccggagcagcggtgctgggtaccctgggcacacctggactggtgtccccagcactgaccctggcccagcccctgggcactttgccccaggctgtcatggctgcccaggcacctggagtcatcacaggtgagtcttaagtggtaccagatcctctcctctcctgtcctggcatctctcggctcgctgccctcagctgcctggccctggtggtctgggcacaaccctctgagcccagggcaggccagctctgtgcctttctgggaaggggggtggtagggagtgactgatggacctggttggttttcctgcaggtgtgaccccagcccgtcctcctatcccggtcaccatcccctcggtgggagtggtgaaccccatcctggccagccctccaacgctgggtctcctggagcccaagaaggagaaggaagaagaggagctgtttcccgagtcagagcggccagagatgctgagcgagcaggagcacatgagcatctcgggcagtagcgcccgacacatggtgatgcagaagctgctccgcaagcaggaggtaggcagaggggcagggtggtggcgggggagagggtaggggggcggggccgcagtgctcagctgtcttcccctcggccctgccccacagtctacagtgatggttctgcgcaacatggtggaccccaaggacatcgatgatgacctggaaggggaggtgacagaggagtgtggcaagttcggggccgtgaaccgcgtcatcatctaccaagagaaacaaggcgaggaggaggatgcagaaatcattgtcaagatctttgtggagttttccatagcctctgagactcataaggccatccaggccctcaatggccgctggtttgctggccgcaaggtggtggctgaagtgtacgaccaggagcgttttgataacagtgacctctctgcgtgacagtggtccctctccccggacttgcacttgttccttgtttcctctgggttttatagtgatacagtggtgtccccggggccaggcgcgctctgcccagcccagcctacagtgcggataaaggtgcggatgctgctggccctgaacgtccgtgtgtctgccgtcggtcctgtcaccgatcctgggcgtgtgtccttagggggtctagggcgaggaggcagggttgggggggtctctggacctgcttcctgttggcaggaggggcctgccgtgggcgagacctgggcagggggttggcgccccgggccccgtcccgcgggtggcggcggctgggtgggcggggctgcctggggcgccaggctctcgcgcgcgggctcgcagccgtccccgcagggtggtgctgagagaaggctgggcaccgggacaccgcgacccgctggacagcgcgcgctgccagtgcttttgtgccgcagagccggccgtccaaggcgggcgggcgggcatggtcgcttcccgggaggaggctgtgcgttaagattcgtggccaaatgccgcggggccaggggccgggctgaagaccggagggcggagggcgccgcctctcgtggattgtagctcccaatatcccgcgcgcggggcgggcccggcttcccggcacgctttgcgcggtgccgctacgggtcctcagaggcggcggcgcgcggggccttctgggggccgcagtccgggcgtgctaggcggcgagggccggactcggcttcccgacgggctgcgcggcggccgggtgggtgtcggcggggcagtccggcgggcagcggcggttccggtgcggcacagcgggcggacgagcgggcgggacgagctgagcaggaccaagcgggatgcggagccgccgccgccgccgctccccgcgcttcctaagagtctgagacccgccgggccgcgccccctgcccaggcccgcagtccgagcgttccgagcgcgggccgggcccagcgccggccgcggccgcgtccccgtccagtctcgggcggcccgccccctgcctgcgccccctccccatgcgcggcgcccatgcggactgagccccgccccccggccccgagcccgccgagcgccgccgccggagcccgcgccgcccacccgcaccatgctcaagtgcatcccgctgtggcgctgcaaccggcacgtggagtcggtggacaagcggcactgttcgctgcaggccgtgccggaggagatctaccgctacagccgcagcctggaggagctgctgctcgacgccaaccagctgcgcgagctgcccaaggtgagcggccgcccgcacctgccgcccaaaggcg

SEQ ID NO: 41266 - DNA, 2300 bp, Homo sapien
ctgggctgggcagagcgcgcctggccccggggacaccactgtatcactataaaacccagaggaaacaaggaacaagtgcaagtccggggagagggaccactgtcacgcagagaggtcactgttatcaaaacgctcctggtcgtacacttcagccaccaccttgcggccagcaaaccagcggccattgagggcctggatggccttatgagtctcagaggctatggaaaactccacaaagatcttgacaatgatttctgcatcctcctcctcgccttgtttctcttggtagatgatgacgcggttcacggccccgaacttgccacactcctctgtcacctccccttccaggtcatcatcgatgtccttggggtccaccatgttgcgcagaaccatcactgtagactgtggggcagggccgaggggaagacagctgagcactgcggccccgcccccctaccctctcccccgccaccaccctgcccctctgcctacctcctgcttgcggagcagcttctgcatcaccatgtgtcgggcgctactgcccgagatgctcatgtgctcctgctcgctcagcatctctggccgctctgactcgggaaacagctcctcttcttccttctccttcttgggctccaggagacccagcgttggagggctggccaggatggggttcaccactcccaccgaggggatggtgaccgggataggaggacgggctggggtcacacctgcaggaaaaccaaccaggtccatcagtcactccctaccaccccccttcccagaaaggcacagagctggcctgccctgggctcagagggttgtgcccagaccaccagggccaggcagctgagggcagcgagccgagagatgccaggacaggagaggagaggatctggtaccacttaagactcacctgtgatgactccaggtgcctgggcagccatgacagcctggggcaaagtgcccaggggctgggccagggtcagtgctggggacaccagtccaggtgtgcccagggtacccagcaccgctgctccggccactgcttcctgcaacccaaaaggtcaccgtgctcagtccctggtctggctactcaagaccaccttgaatcagtctccaaggaatcaggggccagcccgcccaccctcaagccgacagctgtgtgggccctcacctgagctgtgatcttggcagtggctgcagcagctgccacagcagcggcaggtgggaggcctccaggcgtggctggtgtgagtaggggcatgggcggtgtgacagccttgcccacccgcaagtactggccacccaggtcaaagaggttcatggaagacacagcatcttgggacgactgggccttctcgtactctgtgggcaggagcagcagtgagcagggccagccccagcctcaggtggcccccatcccgcctcagccaccccagctcaccaatgaagccgtagcccttgtgcttgccagttgtggggtcccgggccagtgtgcaggacttgatcttgccaaaggcctcaaacacgctcttgatgtcatcgtctgagaggtcctggtgcacagaggccacgtagatgcggttgaaggcccgtgcctcctcagccaactggtctatgatgggctgggcctgccctatgttgctgggtctgcccacctggggaagaggcggtgagatggaaagaccggtcaacccaggcccggccacaaaaggcttccgtggaggggcagccctgcacgcctgcgggatcgaggccttggctccctgcctcaccttgatgttcctgccccccagcatcaccgagttcatctgctccaaggccagctgtgcagcttcggggacctcatactccacgaaggcaaagccctagacacagggacacacctgtcaggctgcgcgagcccaggggtgggggcgagcccgaagtggccggggcggaccaagcctgctgaccttgtgcttcatggtgacggagtcccaggacatgtcgatgctcttgatggggccaaagggggcaaaggcctggcggatggtgtcctcccccagctcatagtagatagagcccacgtagacgcggcacatgatggccagcgcccgctgccgctgagccgccatctgcagcaggacagaggggagagaaccgctggctcgtcaggggcggcaggaagctgggcagcccactcccctcctggcccacccacccagccctgctgtggggagggctccccacatgacagggaggtgcgggctccatccctgcagtcatagtgtgggggtcgcaggaccccgccacccaaa

SEQ ID NO: 41267 - DNA, 2300 bp, Homo sapien
agctcgcgcgttcttaggcatgagcgtcttgcaggaagggtgggccaagcttcccagaactcgcagtgcttgaggagccagaaggacagatttcatttcagacctctgtgttttcatttaaataaaacagtgaagcaatgcgcaagtcaaagcacaggtctggttgggactcagccctccccatcttttttcggccccaggctccagagtgggtgcaggtgggtcttggtctgttcgatggcccagccttgggagcaggtcctctcagaggtggagctgggcctgtggctgggtagttgggttctttgtgcttctccatggtagcgcccgcctccagagcattccagtggggcctcagcaaggtggcctggcagcctcttggggctgggccctcctcttggtcccccaggcacactcagggggtgggactgggacatggtatgcagcttggatcctgggagatgtgggggctggtgctccctggcccttggctggcgcccagccggccattggttggtgggagaagggccttttgtttaccaagacaaagaggagattgaaaaatgtctgggggctgagggggttggcattgattaccatggtgacagcctgctctcaagtcccagcctctggctcttgggccctctttcccactaaggaggaatgggcttggggccagctgtgagggtggtgaggacaggcctagtgtgagccggactggggcacctggtgctgagggtggtgaggacaggcctagtgtgagccggactggggcacctggtgctgagggtggtgaagacaggcctagtgtgagccggactggggcacctggtgctgagggtgattaggacaggcctggtgtgagccggactggggcacctggtgccacccacagccagcctttgaccttcagggactggttggggctctggttgcctggggaggggtctccagggcttcctgccctttgagcctgggccagcatcccagcacttggcaggcaggagggggttcttggggcttgggccagcctgtcccttcctgcctcctgtgtccctctgtccttgctcatcacttctgtgctggggacccttctctcttctctgctgtccctcaaggctgtgtctggaagtctcggagggcccggttggtgggccagtgatctttgtgcttgctgagctggaggacaggcgcaggcatgctgtttgcccatcccacactctgatgggcctgctagccatgcctccctgctcacacagctgcgttcttccctctgcaaaaagcttagagatggattttgacaggagggacgtaaacataatcctggttggcatcagcttgggtctgcagtggctgtgactgcccaagggcctcttggtccccaggcccacctggctagggtgccagtggggtctgctcctggcttctcccagtgggccaggcaaagcccatgcaagagtgtgtggaagtgagctggagccctcttcagggcttgtgtggcccgagagaggcctgtgttctctgggaggtgtgcacagtgcctgcggggacggtggggggagcactgttgggagagaggcccttgtattagctccttgggtgggccccttgaaactccagggaagctgagcctgtgtctgtggcagggactgtgaggaagcctggaggagcctgggagcaaggagtcccagaacgtccagagagccgtggcccttttctcctgccttggaggacggctgaggctggctctcctgccgggcatgtgatagcagctctggggtcagactgacaacaaggggctggaccccttttctgcctccagctgtttatcttggtggttcccgaggaggccactgtggcctgggccccacaactgctcgggttggcccagggcctccagggcacctgcctgcctcagtctgtgttctaccccatgggtcccgggggagacagtggcctgggctggggacagcaatgtcagaagggctggcctgagtacaggccaggcaggggacagtctgtgctaggggtggccctcctggggccacgtgaaggagaacttgagcttgctgctgatggattcccctgctcccttaccagggcacagactccatcaagatggagaacgggcagagcacagccgccaagctggggctgcctcccctgacgcccgagcagcaggaggcccttcagaaggtgagcatggacctcccagggcactgcaggtgtgggacagtcaactgggggcaggggcaggggcggggtgcggggcaggcctgtctcccatgggctgggccccc

SEQ ID NO: 41268 - DNA, 2300 bp, Homo sapien
gcacgggctgggttggccttccccagtgcagctgggctggtggtgctgctcctcctctggaggctgaaggacctgggacactctggtgggtcagcccagcctctggctttgcgcacatggctccaagggtgggcacgctgatctcttctgttcttagatattgtgggtctcatccttgagctgggagtggggtgactgcatgctgccttgcttctcgttgtgcagcctctgagaaggtagagtaggtctcaaggcccttccatcatctcccgacccccacagcgttacccgtttcctgcccgtggcctgtctttgccctgccatccctcaagaccattgtggagctgctcctccttcctgtgcccccttaggtgtgggtcttactgagtgcagagggctaacctcttggccgtcctcctgcgagacagctctggatggttctgttgccagggaagggaggcctgcgcatccagacccctgcccaccatgctgcttaaaagtgtcttcaggagagaactgggacctgggctgggccagagcctgtggaaggcactggagctggggctgagttgtgggctggccaaggtgtgtacaggttgccaggaaggcaccgctgctgcctcaggagggcatgggggacacccagccggttcctttggccgtccagcctgccggcaggagaggatggctttcttttgcctggggcaggagcacagctctctctaccctcctccccatccccgctgggactcgctggcagccctggcccagcccatgctccgctctgcttctgactgggtccctgggcgtgctgatgggtgtgaagagagggcagtttgggctggggggtcatgtcgggaatgcctccctgcctggcctcccttgcttatccgtgaggagctcagcccttagctcgggaggagagcaggcctgggcggtggggtggtgtgcctgtcgttacaacatctccttcctgcctgcagcaggtcaatggccagcaaggaggggggtccgagccggcggcggcggcggcagtggtggcagcgggagacaaatggaaacctccacaggtactgaccttaagcatcctctccctcaggcccgcccgcctgcccgcccgcccgcccgcctgcctgtgcgtccctgggcccagagagggctggctgggggcggggcgggaggaacctcgggaacccttctctgcctctgggcagacaactgcccgcaggaccacggccctctccccgcaccagccctgcaccctccccacccaggcactgagctggcctttgccctctgcatctgccctgctccaagcaccaggcggggcctgttgacagtctggctgggcggggacgccggggcctggagctcgcgcgttcttaggcatgagcgtcttgcaggaagggtgggccaagcttcccagaactcgcagtgcttgaggagccagaaggacagatttcatttcagacctctgtgttttcatttaaataaaacagtgaagcaatgcgcaagtcaaagcacaggtctggttgggactcagccctccccatcttttttcggccccaggctccagagtgggtgcaggtgggtcttggtctgttcgatggcccagccttgggagcaggtcctctcagaggtggagctgggcctgtggctgggtagttgggttctttgtgcttctccatggtagcgcccgcctccagagcattccagtggggcctcagcaaggtggcctggcagcctcttggggctgggccctcctcttggtcccccaggcacactcagggggtgggactgggacatggtatgcagcttggatcctgggagatgtgggggctggtgctccctggcccttggctggcgcccagccggccattggttggtgggagaagggccttttgtttaccaagacaaagaggagattgaaaaatgtctgggggctgagggggttggcattgattaccatggtgacagcctgctctcaagtcccagcctctggctcttgggccctctttcccactaaggaggaatgggcttggggccagctgtgagggtggtgaggacaggcctagtgtgagccggactggggcacctggtgctgagggtggtgaggacaggcctagtgtgagccggactggggcacctggtgctgagggtggtgaagacaggcctagtgtgagccggactggggcacctggtgctgagggtgattaggacaggcctggtgtgagccggactggggcacctggtgccacccacagccagcctttgaccttcagggactggttggggctctg

SEQ ID NO: 41269 - DNA, 2300 bp, Homo sapien
caagcaatccacctgcctcggcctcccaaagtgctgggattacaggcgtgagccactgcgtctggccacattactttttaaaaaaatcttttttttcatagagacagcgtcttgctgtgttgtccaggctggtcttaagtgctacatcggtctcccaaagtgctggagttacaggtgtgagccaccacgcccagcccctacattgcttttcttgttttctgatggaaatactcttctttgctctgggctgaggaaaggcagtcccagagttggcaccccagagcccctctgctgtgccgcccctcagaggggcttcccatccctccaagcactgctgcctggtgctgggggcatcctgaccataaagacgccattttaattgcctaaagatggcagtacgtgactagctgcgattgtaaacaccggtttcctccaagttctcccagcgtctggttagcacagaaccctaagctccatgcagctgggaacttccatctgccaggaatggcatggggtgtcctgtgtagaatgcaccagtgggccggcttttcccaagaaaatgtttttccgagccacatcccactgtcaacactgttgtggcttacttgttggttagtgcagtgatttgggggagcaggaagttacaaaagtgcccctcagttcaccctgttcacgggtatctggagactggtcgtgaagtgatctcttgctgtgggcaatgagaggcagccttggctgggcacagtggtccacgcctgtagtaccagcactttggaggctgagataggtggattgtttgagaccagcttgggcaacacggagacccccatctctaccaaaaatacaaaaattagccaggtgtggcggcgcatgcctggagtcccaggaggcggaggttgcagtaagccgtagttgcaccaccgcactctagcctgggcaacagagccagaccctgtctcaaaaaaaaaaaagaggcagcctctgctctggctgtgcatgcagtgggaggggccccttgtttcctttcactctctccggggtgcagtgtttaggcagcgtggggctgagttgggcagctagagcacacccatgccgacagcattgggagcagctccaggcacgggctgggttggccttccccagtgcagctgggctggtggtgctgctcctcctctggaggctgaaggacctgggacactctggtgggtcagcccagcctctggctttgcgcacatggctccaagggtgggcacgctgatctcttctgttcttagatattgtgggtctcatccttgagctgggagtggggtgactgcatgctgccttgcttctcgttgtgcagcctctgagaaggtagagtaggtctcaaggcccttccatcatctcccgacccccacagcgttacccgtttcctgcccgtggcctgtctttgccctgccatccctcaagaccattgtggagctgctcctccttcctgtgcccccttaggtgtgggtcttactgagtgcagagggctaacctcttggccgtcctcctgcgagacagctctggatggttctgttgccagggaagggaggcctgcgcatccagacccctgcccaccatgctgcttaaaagtgtcttcaggagagaactgggacctgggctgggccagagcctgtggaaggcactggagctggggctgagttgtgggctggccaaggtgtgtacaggttgccaggaaggcaccgctgctgcctcaggagggcatgggggacacccagccggttcctttggccgtccagcctgccggcaggagaggatggctttcttttgcctggggcaggagcacagctctctctaccctcctccccatccccgctgggactcgctggcagccctggcccagcccatgctccgctctgcttctgactgggtccctgggcgtgctgatgggtgtgaagagagggcagtttgggctggggggtcatgtcgggaatgcctccctgcctggcctcccttgcttatccgtgaggagctcagcccttagctcgggaggagagcaggcctgggcggtggggtggtgtgcctgtcgttacaacatctccttcctgcctgcagcaggtcaatggccagcaaggaggggggtccgagccggcggcggcggcggcagtggtggcagcgggagacaaatggaaacctccacaggtactgaccttaagcatcctctccctcaggcccgcccgcctgcccgcccgcccgcccgcctgcctgtgcgtccctgggcccagagagggctggctgggggcggggcgggagga

SEQ ID NO: 41270 - DNA, 2300 bp, Homo sapien
tgcgtgcacattattgccaagggaagctgtccccagagggtggtgcctgtggcttcccctggtggtggtggcagaccagccccccacctcccatccaccccctccattgtggaggccttgtgtgccaggctagccctaagagcacccacctgtgttactgctattctgttttccagctatctggttctgtcattatacattctggaagacttcatcttaaaagcctattgaattgctcactttcccctcatgttttatttctaagagctctttctcatcccgaggtttctttctctatagcccccagttcctttttattgactgagaatggcattttagttttcatttttcttcggcttcctttatcgtctctgtttcttctgagtcccttttcttctttctcaggtgtctggtgatcctgggctgtccagctgcattgaagagtgagatgcttttagtggctggggcttatgacctggtgagcttcgaggccagggatctggctgggccattctactgggcaacactctacccctaggtgccctgccagtcttttcttttgagctaggagctgctgcagagaggagccctcttctctgagaagcctgatggcatgcgggtggtcagacccagcccaggggtggaggcaggggtaggacccagagtctcacttactcccaggctttcagacagggccttgcttgagcagggcctcagagctcctctcctggagctcacgtctcagacactgcagtgcctgccagccccggtgggtagggacagaggtctggggtttcctttctgtagctgtgctttcacccacgaccctcagacactggcctccatagccaagtgggctggagtagctctcgctgtccacctttcttaagctctgcaatatcccagctctttgcccttgcagggtttgtctttataaaacccctttcctataattttggaaggtttcaggagggaggcggggaatattctgccctatttaagtagaagtgtctgtattaaattctaaatgttcccagggttgaaaggaggcctgcccgggatgccttgtggccttaggcagctgaaggtgcctgagcttacagatgtggcttcttcggatgaccgagttggggtctcgggactgggtgcagcagatggcaaatgtccaggacaggcagctttcccagcagtactgacagacaccttgggccatgaaagccagttcagggactaacggggcctgcgggctgcgggtctagcgactgatgtcagccaacctagggtcatcggttccctggaaggagaaaaagctgccaattgaacggggcctcccggtcccagggatgtcgcgacgcggggacgacgcatctcacgacgtcagcctgaaacacgcgggcctttcatcacccgagactcctccagcccaggagggccccgctctttcgcctgcctcctgggggagagcctctggacgacgcacgcgacagcgttttctccaaaaaaggcagagaagagaagcgtagcagtggccgcaagggcgacgggcggcgaagggtactacgcacgcccgcgtcggccacgcggagagatacgcccgactcgagtcccgcggcgcacgcccctagacgcccgaggtgcgcgggccacgcccctcgcccggccaagagcacgccccttccgtcgcccctcccgggggcgtttaccgttcctccccgccccggaagcgcgttcttacctccttcctcgcgagagttccgtgcaccggcacccagatcgcgcgagacagcggaaggagcaagagtgggaggcgcgcgcggaggccgcgacggacgcaagatggcgacggcgaccatagctctcgtaagtgagcccccccatgagcgcgggcggccctcggcttgcggggccgggtcgtcgacccagcctgggcgcggagggcctcccaagaatgcggcggtcttcccaggtcccgcgcggactccctcgtgtccccgggtcgcgtgaggcgggggcggggcgggcgcgcgccggcggccggctcgcggcctcagcttccggcctgcggaccccagcttccggcggggcggggcgggggcctgggcgcggcgtgtggcccttgcgggcgagcctggcggggttgcgttcctgtccgctaggtccggcaagcgggggtcgtcgtcctccctttgccgacgggggtgtgcgccgtggtcacgacggaagcggggttctgggggtgacgcgtgggccttcgggttgatgggatcagaaggggacgggacctgtagaaaggggcctgc

SEQ ID NO: 41271 - DNA, 2300 bp, Homo sapien
ttaaaattactttttgtagagacgtggcctcactatattgcccaagctggtcttgaacccctgggcccaagtgatactcctgcctcagcctcctgaagtgctgggaaggcaggcatgagccactgtgcctgacctggacttctcttttgagatgcagtcatggtggtggcaagaacacaggctctggagccattctactgctgctccctgccttgtgatgttgcccatcagtaaaaatggggtaacagctgtatccattgcatagcactgggttgtgaggatcccatgaatgaatgtgtgtaagaacagtcctgggcaccatgcatcctgcgtgcacattattgccaagggaagctgtccccagagggtggtgcctgtggcttcccctggtggtggtggcagaccagccccccacctcccatccaccccctccattgtggaggccttgtgtgccaggctagccctaagagcacccacctgtgttactgctattctgttttccagctatctggttctgtcattatacattctggaagacttcatcttaaaagcctattgaattgctcactttcccctcatgttttatttctaagagctctttctcatcccgaggtttctttctctatagcccccagttcctttttattgactgagaatggcattttagttttcatttttcttcggcttcctttatcgtctctgtttcttctgagtcccttttcttctttctcaggtgtctggtgatcctgggctgtccagctgcattgaagagtgagatgcttttagtggctggggcttatgacctggtgagcttcgaggccagggatctggctgggccattctactgggcaacactctacccctaggtgccctgccagtcttttcttttgagctaggagctgctgcagagaggagccctcttctctgagaagcctgatggcatgcgggtggtcagacccagcccaggggtggaggcaggggtaggacccagagtctcacttactcccaggctttcagacagggccttgcttgagcagggcctcagagctcctctcctggagctcacgtctcagacactgcagtgcctgccagccccggtgggtagggacagaggtctggggtttcctttctgtagctgtgctttcacccacgaccctcagacactggcctccatagccaagtgggctggagtagctctcgctgtccacctttcttaagctctgcaatatcccagctctttgcccttgcagggtttgtctttataaaacccctttcctataattttggaaggtttcaggagggaggcggggaatattctgccctatttaagtagaagtgtctgtattaaattctaaatgttcccagggttgaaaggaggcctgcccgggatgccttgtggccttaggcagctgaaggtgcctgagcttacagatgtggcttcttcggatgaccgagttggggtctcgggactgggtgcagcagatggcaaatgtccaggacaggcagctttcccagcagtactgacagacaccttgggccatgaaagccagttcagggactaacggggcctgcgggctgcgggtctagcgactgatgtcagccaacctagggtcatcggttccctggaaggagaaaaagctgccaattgaacggggcctcccggtcccagggatgtcgcgacgcggggacgacgcatctcacgacgtcagcctgaaacacgcgggcctttcatcacccgagactcctccagcccaggagggccccgctctttcgcctgcctcctgggggagagcctctggacgacgcacgcgacagcgttttctccaaaaaaggcagagaagagaagcgtagcagtggccgcaagggcgacgggcggcgaagggtactacgcacgcccgcgtcggccacgcggagagatacgcccgactcgagtcccgcggcgcacgcccctagacgcccgaggtgcgcgggccacgcccctcgcccggccaagagcacgccccttccgtcgcccctcccgggggcgtttaccgttcctccccgccccggaagcgcgttcttacctccttcctcgcgagagttccgtgcaccggcacccagatcgcgcgagacagcggaaggagcaagagtgggaggcgcgcgcggaggccgcgacggacgcaagatggcgacggcgaccatagctctcgtaagtgagcccccccatgagcgcgggcggccctcggcttgcggggccgggtcgtcgacccagcctgggcgcggagggcctcccaagaatgcggcggtcttcccaggtcccg

SEQ ID NO: 41272 - DNA, 2300 bp, Homo sapien
gaggagttctgatgccccagcagctaactccactctttctcccgccccttggcagtgtggcaccgaatcttctccaatggtaagtgcggactttggggggacggggtcctggagaggtccccgcccgctcagctctgcgccctcccacagcacttccagatgatctccgaagccccatccgcgctgagcgagaggaacttcggaacctgcacttcttccccccagagtatggaggtgagtggtgctgggtccgggtgccccgtgcctaccctgcgcttctctcctacgtgtcctgtgctctcttctgttcagaggtggccgatgggaccgctgtggacatcttctcctttgggatgtgtgcgctggaggtactgcccccgccctccaccttgtgctctgccctcctcctaactgtgccctgcctggctcacctgtgtggtcccttccccatgcctgacctggctctgtgccccagatggctgtactggaaatccagaccaatggggacacccgggtcacagaggaggccattgctcgcgccaggcactcgctgagtgaccccaacatgcgggtaagcagcttgccctgcccctccccagctggctcaccgtgctcagctagggctagcaaggtgctccaggcagacctgggagaacatcacagtttgtgcagttgaggggtataccagctgactgcacccctcccaaagaggacctcagtgggagcacatactggttccaggcctgaaggccctaaggggtcagcacattctaaggacaagaaggcaagagagaccctccctctgtggctgccatcaccatgcccgttttataaagaaaccaaggttcagaggagatgagtcctttgcccaaggctttagagtgagtggtggagccaacatctgcacctgggtctgcttcactccaagtccttgactttaagcttccaggaggtgatgaggctccagcttgtggggggacatggtgggtgccaagcaggcaaaaagaggtatgggatggaagctgcatccacagccccctctgctcggagtctagacttaactccatggcctcaggagatgggggtgcctggtcggggctggtggcgagctggagccgggctgggcacggatgtggacagagtggggacccatcaaggtcgtctccagtgttgggcccgagctgagccgatcaaaaggccatgggtaggaggcttgcaggtgtgactttaggatcatggcttctccccacgattttttgggggtcgagggaagcagagcatggtgctccaatcccagaacccagctgtcctcaagctcagaggaccaggtcctggcctggctgctgctgctgggactcctccctatgggcatccctgcatgtcctgtgtgtccctgaggagggacatggggaactcaggggccacctctcctcgaactgcggggccagagcagagagcccttgcacaccaccagcctctcctccctgtgccccaggagttcatcctttgctgcctggcccgggaccctgcccgccggccctctgcccacagcctcctcttccaccgcgtgctcttcgaggtgcactcgctgaagctcctggcagcccactgcttcatccagcaccagtgtgagcagcaggccggcccggggggtggctggggaggtggaggttgggacgtggaaggggccctgcaggacccacggcctgagcacaccgccttgatgctcttgtggccgcagacctcatgcctgagaatgtggtggaggagaagaccaaggccatggacctgcacgcggtcttggcggagcttccccggccccgcaggcccccgctgcagtggcggtgagcagtcagcacccagaagcctcccctccccacacatcccctccccgcacctcccctcccctcgccccggccagcccctcatgtgcctcccacttccatgccaggtactcggaagtctccttcatggagctggacaaattcctggaggatgtcaggtgagaactgatgtaaggttgggggccaggcagctgtcaggcctgaacccccagccaccctgttgtgtccccaggaatggaatctacccactgatgaactttgcagccactcgacccctggggctgccccgtgtgctggccccacccccggaggaggtccaaaaggccaagaccccgacgccagagccctttgactctgagaccagaaaggtgagtcccctctcctgctgctcagtgccatccctcagaccttctaacagccagataagaggtgcccctccttctcttagggcctgca

SEQ ID NO: 41273 - DNA, 2300 bp, Homo sapien
gcagggccagatgcacctctgccaaagaaagaaagaggcgtcccaaagggccagtgcatggagctgcgcggaggggaggagcggagttccaatttgggctccagagagagaaggtaaaggatgaggacccgccgtgaaggagggaggagaccacaggaaggccgtgggggctgtgggctgaagggggttttaggtgagaatcggggacagccccggtggtcggcgtggctggagggtgtgcttagagcggcctccggagggagaggtcgtgtgagccgggtgggctcccccctcatggttccactgtcccatgggagccagccgcggaaaggaaatgcgcgtttgaggagaaaagagaaaatcgccatcctggaaagtgagaagatgggcttgtgggcgggaggaggcactggtgggcgggccagggagagattcgtggtcaccgatcaaagtcagcctgggtcagcctgctggtgggcctttcccccgccctcggtgccccttcgacctgtcccttgggggtcggccggggaatgagtgcgtggccaggagagcgggtcccgctttcgagcccgcggggtcttctgcagctggagggtgccgtgggcttgggggcccccagatgccccgggtcttcccccagatcctaggggagcaaccgcgagagaagtgggcgctccgggctccaggtgtccgcagggcggggcctccgagggggcggggatttgggggcggttcctctgcgcggggcggggcctcataggggcggggcttcgaggaggtgaggcggggcctggggtggggcttcgcggaggaccctgggaacgggcgggggcggggactaaaacggggcggggattcgcgggggtggggcgggtcctggggcggggcttcgcgaaggaggcttggaggacgaggaggggacagggcctggggaggggcttcgcggagcaggcctgggagacgaggaggaaacagggactggggcggggcttcgcggggcggggcctccgggggggcggggcctgggcgcggcccgggctcggcagctctcggggaagctctgctctggctccggcaggcacaggcggctcgggaggtgcgcgccggctccgcccccgggccccgcccgtccgccgcgcgcccgcgcctcccaattcccagagccggggctggggctctaggctgccgcggcggctctaggctgggctgctgggcgcgaggccagggcgggccgggagaggctgcgccggcggcggatcgcgcagagggcggtggcctgggctggccgaaccatggcggccccggagccggcgccgaggcgggcccgggaacgggagcgggagcgggaggacgagagcgaggacgagagcgacatcctggaggaaagcccgtgtggtcgctggcaaaagcgacgggagcaggtgggcgcgggggttggggcacggggtgacaccgccctcccagagcgggaggggcctggaggctgcgcggggcgtgggggcgctgggagagcgcggcggctggaaacctctccgcggcccctcgcggcccgcgaatcagccacccctggacccctttggcctggcgctcgccctgggactccctgagggccagtctcctcccaggaccacctccccatgcctctggactcagccgctagcttcctggggatccccctcgaccccctgaaacctgctccaaatccccttagcccagcccttggataggagcccttggctcctgggggcagctaccctccaagccccaccttcccgcagagtggctcagggcctgcagcccacgcttgggcccactggaaaggtgtggacagggaccaaatcctcacccacaaccctgacacacaccagggcacacataaccctttattcacccccaggtaaaccaagggaacatgccagggcttcagagcaccttcctagccatggacacggaggagggggtagaggtggtgtggaacgagctccacttcggagacaggaaggccttcgcggcgcacgaggtgagaccgctgccccctcctcatcctgcttgggtgaccacctgctgaccacccagcgaccaccctccctccccaggagaagatccagaccgtgttcgagcagctggtgctggtggaccacccgaacatcgtgaagttgcacaagtactggctggatacctctgaggcctgcgcgagggtgagcacgggcaaggccccgggcaggcagagaccacagctaggtggggcgggcatggggacgaacccgcagctggtggaaatcctgagctcgcaccgt

SEQ ID NO: 41274 - DNA, 2300 bp, Homo sapien
cgtgaggtagggtaatgggaccaattactgggccttcatgtttaggccctcataccaagtgagaagggaccactgggggggctccccaaaaccaccctcaagttcaatggttcactagaaggactcacagaactcggaaagggtactatttattacagcaatggatgcgttaaaatcagcagtggcaaggactcacagaacagaacccaggacagaccagcacgggtctgcaggtgtccccacccactgcaggcatggggacagtgctcaacctcccagcactgaggtgtgacaatgagcacagcatgtcagcagccagggaagccctccgtacctcagtgtccagggtttttattgggttggtcacacaggcatggctgacctcccaggtggctgactttggcctccagcccctgcagaggtcaggctgatgccacatggcccaaggtccccccgtagaccatattgttagcacagaccaggggtgtccaatctgtgggctttcctggcacacattggaagaattgtcctgggcaatacccttaaataaaatacacttaacactaacaacagctgatgagctttaaaaaaaatctcaataagaaagtttatgaatttgtgttgggccatattcaaagctgtccttggccgaatgcaccctctgggctgcgggttggacaagcttagcatagaatctggtgtggccgaggtaaacacagacattcaaatcaggcagaacattccaagggcttagagggtgtctcccaggagctggtcagggccagtttcagggtggaggatttgaacaccccaaacctttactgcagagggcctcagcaggatcacctggcattggtggaaaccacacacaaggtgcctggtgaccaaggctggtcagaaaagagagaccacaggggacgcagcagggccagatgcacctctgccaaagaaagaaagaggcgtcccaaagggccagtgcatggagctgcgcggaggggaggagcggagttccaatttgggctccagagagagaaggtaaaggatgaggacccgccgtgaaggagggaggagaccacaggaaggccgtgggggctgtgggctgaagggggttttaggtgagaatcggggacagccccggtggtcggcgtggctggagggtgtgcttagagcggcctccggagggagaggtcgtgtgagccgggtgggctcccccctcatggttccactgtcccatgggagccagccgcggaaaggaaatgcgcgtttgaggagaaaagagaaaatcgccatcctggaaagtgagaagatgggcttgtgggcgggaggaggcactggtgggcgggccagggagagattcgtggtcaccgatcaaagtcagcctgggtcagcctgctggtgggcctttcccccgccctcggtgccccttcgacctgtcccttgggggtcggccggggaatgagtgcgtggccaggagagcgggtcccgctttcgagcccgcggggtcttctgcagctggagggtgccgtgggcttgggggcccccagatgccccgggtcttcccccagatcctaggggagcaaccgcgagagaagtgggcgctccgggctccaggtgtccgcagggcggggcctccgagggggcggggatttgggggcggttcctctgcgcggggcggggcctcataggggcggggcttcgaggaggtgaggcggggcctggggtggggcttcgcggaggaccctgggaacgggcgggggcggggactaaaacggggcggggattcgcgggggtggggcgggtcctggggcggggcttcgcgaaggaggcttggaggacgaggaggggacagggcctggggaggggcttcgcggagcaggcctgggagacgaggaggaaacagggactggggcggggcttcgcggggcggggcctccgggggggcggggcctgggcgcggcccgggctcggcagctctcggggaagctctgctctggctccggcaggcacaggcggctcgggaggtgcgcgccggctccgcccccgggccccgcccgtccgccgcgcgcccgcgcctcccaattcccagagccggggctggggctctaggctgccgcggcggctctaggctgggctgctgggcgcgaggccagggcgggccgggagaggctgcgccggcggcggatcgcgcagagggcggtggcctgggctggccgaaccatggcggccccggagccggcgccgaggcgggcccgggaacgggagcgggagcgggaggacgagagcgaggacgagagcgacat

SEQ ID NO: 41275 - DNA, 2300 bp, Homo sapien
cctctggtggccctgtctgggcataacagaaggctcgcactcttgtcttctggttactcctcactatgtccccttagctcctatctctgtatggcctggtttttcctaggctatgattatagagtgaggattattataatattggaataaagagtaattgctacaaactaatgattaatgatattcatatataatcatatctaagatctatatcagtacaactattcttattttatatattttattatactggaacagctcgtgtcctcgagtcccaggcacgccttgacctgtgggtacatccctccaacactggcctccatgttcatgtgactgtctaccttatttctctgcaccccaagtatcccttttctttctctgataaggacatcaaacattggatttagggcccaccccagcatctcaagatcctaaacttatttacatctgcaaagaccattttttttttttcaaataaggctgtgctcctaggtactggggatcaggatgtagacttttgggggacactatgtgacctaccacagaacatgtgtgtctggttatgggggcggagaaaggggaggaaattcattgagattcttctgctcaaggcttacctccttaggggcttctctggaccacacccgccaaaacgcacccctgcccacccacagatccattcaacaagtgtttgctgagggcctgctgtgtgccgggtaccgtcctcgcaccagagaaagagcagggacaacgagcagacactcctgccctgcgggagctcgaatcgcaacagggacacagacagtgaagaagagagatgagaaaaacccagatgcaagtcaggtggggtgaatactccgggaaaagtcaagtcaagcaggcgaaagggtgtggggactgtgatgtcaggattcgtggtcaggacaggcctctcaggaagtgacctcagaggatgtttgggaagggcgttccgggcaaaggtataaccagggcagagaccctgaggggaagtgcctgtcatgtccgatggcacagggccgtgtacttggggtgggctcagctgaagaaggcagctgacgtgaggtagggtaatgggaccaattactgggccttcatgtttaggccctcataccaagtgagaagggaccactgggggggctccccaaaaccaccctcaagttcaatggttcactagaaggactcacagaactcggaaagggtactatttattacagcaatggatgcgttaaaatcagcagtggcaaggactcacagaacagaacccaggacagaccagcacgggtctgcaggtgtccccacccactgcaggcatggggacagtgctcaacctcccagcactgaggtgtgacaatgagcacagcatgtcagcagccagggaagccctccgtacctcagtgtccagggtttttattgggttggtcacacaggcatggctgacctcccaggtggctgactttggcctccagcccctgcagaggtcaggctgatgccacatggcccaaggtccccccgtagaccatattgttagcacagaccaggggtgtccaatctgtgggctttcctggcacacattggaagaattgtcctgggcaatacccttaaataaaatacacttaacactaacaacagctgatgagctttaaaaaaaatctcaataagaaagtttatgaatttgtgttgggccatattcaaagctgtccttggccgaatgcaccctctgggctgcgggttggacaagcttagcatagaatctggtgtggccgaggtaaacacagacattcaaatcaggcagaacattccaagggcttagagggtgtctcccaggagctggtcagggccagtttcagggtggaggatttgaacaccccaaacctttactgcagagggcctcagcaggatcacctggcattggtggaaaccacacacaaggtgcctggtgaccaaggctggtcagaaaagagagaccacaggggacgcagcagggccagatgcacctctgccaaagaaagaaagaggcgtcccaaagggccagtgcatggagctgcgcggaggggaggagcggagttccaatttgggctccagagagagaaggtaaaggatgaggacccgccgtgaaggagggaggagaccacaggaaggccgtgggggctgtgggctgaagggggttttaggtgagaatcggggacagccccggtggtcggcgtggctggagggtgtgcttagagcggcctccggagggagaggtcgtgtgagccgggtgggctcccccctcatggttc

SEQ ID NO: 41276 - DNA, 2300 bp, Homo sapien
ctggagtggcatctggatggacagcagccggctggagactgggaggaggcctgggtgcaggaggctggggcgctgggcagcatgcgccgcggggcagcaggacgcaggggcctcccagcgggactcgcacgtggcactctctggggcaggtggtgacgggaggcagacacactccaggggagtccctcagtcaccatgctccaggtacttgcgcctcacgtttagaaccagggtagatttggagactcctgggatcttttgacaaaatttctctccaatctctaagtacaaaggatgctcctacaaagggccagatggcaagtcctgggatggaacccctgcccttggtgccaccactgctctttcataactgtgggctcttccgaaagtgacttcatggctcagtgcctcagtttccctttttgtaaaatggtcatcatggctgggcgcggtggctcaggcctgtaatcccagcactttggggggccgaggcgggtggatcatgaggtcaggagttcgagaccaacctgaccaacatggtgaatccctgtctctactaaaaatacaaaaattagctgagtgtggtaggtgcctgtaatcccagctactcaggaggctgaggcaggagaatcacttgaacccggtaggcggagcttgcagtgagctgagatcccgccactgcactccagactgggcgacagagtctctgtctcaaaaaaaagaaaaaagaaaaaaaaaggtcatcataataacacttaactcactcagcagttgtgagtacaaataaaattcaaatcctggaagtgtttgaaaaacatccacaagaatgacagaaaggagaagcacactgttgtttttgttagttttaacattcgtgtggcttttttcttcctatccgaaaaagagattttctccccgatcagcccaagtcatccttctagtggcaagaaaattaggaatgttatggaaagaatcccaaaagaaaaaacgagtgaatattcagattcacatttttcttttttctttttttttgtttttttcttttttgagatggggtctcgctctgtcacgcaggttggagtgcagtggtacaacagctcactacagcctcgaactcctgggctcaagcgatccttccaccttagcctcccaagtagctgggactacaggtgtgtgccaccatgcccagctgatttttttttaaggactagaaagtcaaagacaaatgcccagcagattttgtagagctggggtttcgccatgttgcctaggctggtcttgaactcctgagctcaagcaatccacctgcctcagcctcccaaagtgctggaattacagacatgagccggcacgtctggcctatattctgatttatattcaaagtagactttgcagcaagacaataggcttggaagacaggttagtgacgcagttcatgatggggttcacaaaggggctggtgctgaggttcgagatggcatttgtgataggattggtgatgggttcatgatggggttcgtgatgggggtggtgatgggttaccctggggacagtgagaaggaaaggcagagacagaggagctcagatgcctggcttgtcttcccttgactccctccagtgctggtgggggttgtttcaaaaacatctggacaggccaggcatggtggctcacatctgcaatcgcagcactttgggaggccgaggcgggtagatcacttgagctcaggagtttgagaccagcctgactgacatccaacatggtgaaaccctgtctctactaaaaaaaaaaaaaaaaaaaaattagccaggcatagtggcaggcacctgtaatcccagctactcaagaggctgaggcaggagaatcacttgaatgtggaggcagaggttgcagtgtgtggggaaaagcaagagagatcagattgtcactgtgtctgtgtagaaagaagtagacatgggagactccattttgttctgtactaagaaaaattcttctgccttgagatgctgtgaccttaccccaaacccatgctctctgaaacatgcgctgtgtcaaactcagggttaaatggatcaagggcggtgcaagatgtgctttgttaaacagatgcttgaaggcagcatgctccttaagagtcatcaccactccctaatctcaagtacccagggacacaaacactgcggaaggccgcagggacctctgcctaggaaagccaggtattgtccaaggtttctccccatgtgacagtctgaaatatggcctcgtgggaagggaaagacctgaccgtcccccagcccgacac

SEQ ID NO: 41277 - DNA, 2300 bp, Homo sapien
ggctcctgaaggctgaaagagctgccacgggctacagggatccggccacaggagacacgatcccgctgttccaggccatgcagaagcagctcatcgagaaggcggaggcactgaggctgctggaggtgcaggtggccacggggggtgtcatcgacccacagcaccaccaccggctcccactggaaacagcctacagacggggctgtctgcacaaggacatctatgcgctcatttccgaccagaagcacatgaggaaacggtttgtggacccgaacacgcaagagaaggtctcgtaccgagagctgcaggagaggtgccgcccacaagaggacacgggctggctgctgttcccagtgaacaaggctgcacgggactccgagcacatcgatgacgagacgagaagggccctggaggcagagcaagtggaaatcacagtgggaaggttcagaggccagaaaccaacactgtgggcactactgaattccgaatacgtgacagaggagaagaagctccagctggtgaggatgtatagaacacacaccagacgggcactgcagacggtagcgcagctcatcttagagttgatcgagaagcaggaaaccagcaacaaacacctgtggttccaaggaattagacgacagatcacagcttctgaactcctcagctcagccataatcacggaggaaatgctccaggacctggaaacgggacggagcacgacgcaagagctcatggaggacgaccgcgtcaagcgctacctggagggcaccagctgcatcgcgggcgtcctggtgcccgccaaggaccagcccggccgccaggagaagatgagcatctaccaggccatgtggaagggcgtgctgcggcccggcacggccctggtgctgctggaggcgcaggcggccaccggcttcgtcatcgaccccgtgcgcaacctgaggctgtcggtggaggaggccgtggctgcgggcgtggtgggcggcgagatccaggagaagctgctgtcggccgagcgcgccgtcaccggctacaccgacccctacaccgggcagcagatctccctcttccaggccatgcagaaggacctcatcgtccgggagcacggcatccgcctgctggaggcccagatcgccacgggcggcgtcatcgaccccgtgcacagccaccgcgtgcccgtggacgtggcctaccggcgcggctacttcgacgaggagatgaaccgcgtcctggccgaccccagcgacgacaccaagggcttcttcgaccccaacacgcacgagaacctcacgtacctgcagcttctgcagagggccaccctggaccctgagacggggctcctatttctttctctctctctacagtgactgggcttcctccgtgcagttttctgcaactctggagaagtggaggcatacttgtgtgtctgggttgttttttttttgtttttttttttgtcattctttaattttgttgttttacccattcgttatctgtggaaaacgttttaagttgtcatgtgacagaaacttttcctttgtccatcgaggtgtttcataagttttttggtgtgttttctgggtcgtctatgtgtcatatggttttacttttctctcctttttcgttttcagaacatttttctgtctgttttggattcactgcttccattttacagaatgtcactctttagactctcagtccatcatgccatcgggtactcttgttgcagtgtaatttttattacatgcggttatttccctaacgatgtgctattcacgttcatcttcaaactcattttccatcagccagtgtctactatttagtgccctggctctatttcggtcctcctccccgggctttccctggctgctgtgctggccaaaagcatgggctttattctctccattggctgctgctccaccttagaggtgtgacctcactagcgttgactgagcgagtctgttgtggagaagaactttttgtagtaatttactaggaaaaattctgaacaagtaaaatatgaaggaaactcttgtttttgatttcaggtttttgaaggttcaatcactaatctttatgcccttaatatacagatagtagattaaacaagggaagcaagccgtccaaaatccagggttcctagagccgtatctcagaattttatgcacacaggttgcagttaagtcttgctcaaagttttctgggagaaccaagaactttcattgttaatggaagtgtggcaattggagcaggtgacaaagaacaagccctttcgagtccccccttcattcactccacacatg

SEQ ID NO: 41278 - DNA, 2300 bp, Homo sapien
tctgcagaagggaagggagagggccagggttttgccaaggtgggtaggtgggctgcagtcttaacaggtggtcctgaggggcatctacgagcctcgacagccctcagagttgcccctggagcatgcccttcgtgagaccagacatggggagaggggatggggaggacccagtgccttctagggttaggctctgcatgttccagagcatgagcagcatggggtgcctgtgagacctccaggaggcagctgggcacatggttttgggacccaggacaggctgggctcctgctgcagatttggggagctgagggtaggtgggaggaggtctcagagttaatgggtgaacgaagatggagcggaaccctgtcactggagaggggagcccccatagcccatgtggtggaggtgggtgggggccagctccaaaatgcatttgtcgagtttggcagccgggggtggtggctgcctcaagagcggtggagtgggggtgggggtcaaacgtgggatccgacccttctcctgagaccttgtgtagaggtagggaaaggttgtcatggacaggctgctgagcagagggaggttccagctggaatgagggggagaatcaagagagggactggggcccgtagtgctgagaaaacggggagcagaccctgctcctgggtgggtgggcacaggggtgcagaacactgaccaggggcctaaagagcaggaaattgctctcacagctctagaggccagaagccggaaggcgaggagtgggcagggccgcacttcctccggagctcgaggggaggatcctgcctgccttttccagcttctggggccccaggcgtcctgggaattccttggcttatagatccaatctctgcctctgtcgtcacacggccgccctctccctgtgtgtcttcttataaggacactagttatgttggataacagccaatcctagcccggtatgacctcaccttaactgggtgatatctgcaaagatcctatttccaaataaggtcacattcacagggactgtagattaggacttagacatacgtttttagggacataattcaatctggtgcagaaggggacaggcctgggtggaggcagttgacgtgcaggagtggtggggatggaggtgaggcacctgctgctctgctcagggccagtcgtacagctgtgtgtggaaggggttggcgcagggcatgccggggctgcagccggaggaccagggcccatgggggagagacagccttgcctggcctgcacccggctcctggcaggactgccacacgtctgctgagcctgcggcccccggggcagggtgtgggctcagaggggcaatagcccagaggccgtggtgctcgcagatgtgagatccaggacaggcagaggaggatgcagggccaggctgaggcaggagaccagggcttcagagggctggggtcttgctggagcctggtggatggctgtggagggagggcgggacctcaggagccagcaggaggtggcagaggcttctctggagtgacaggtccaggtggggtgggaggtttcaagagatcactggagctggggtggggcagggcatggggcagagcctttggagaacaaaaggtggggagatgccggtgcccaggctgaggggcgggccctgtgggtggagccacagcccttttggagcagggctgggcccctcgggcagggctaaggatgggaccagggtgcccaggaaggactcgaggacacaggaccctgggctggcgggagggcgttggcctggggtggaggtggaaggacagcctgcgggagggacagccctggagtcccgagaggcctcccggcgccgcctgggtgcctgcgcccacatggtccctctgagctggcacttcccttggcacccccgcggcagagtgctcctgggcagactcagctcctcggggacactctagctgcacgtctgtgggtggagcccagcccgggacagcatgggattgccccatgaccgcatcttccctcgtgcccaccaggccatgcggggtccctgattgagcctttctgtcccctgcaggacagaggtggacctcagcaggctctgcataaccagccgtgtgtgatgagtggccacaccttgcctcctcttcccgtcccaggcaccaacagcacagagcaggccagtgtacccagagccatggcagccacgctgggagccggcacgccccccaggccccaggccaggagcatagctggggtgtatgtggaggcctcgggccaggcccagagtgtctacgccgccatggagc

SEQ ID NO: 41279 - DNA, 2300 bp, Homo sapien
ggggcggggcaggctgggctgggagggaggggaggtgatgaggagggaagagctcagagcaaagaggcacccagaggcaggaagtagggaaggggagcttgagccaggcttgggaggtggaggcccctgaccgagcccccagcccacctggtcccagccctgccccgccccagcccttctcctcacccggtcccagccttgcccgagtccgtgtctggagtccccaccgtgccccttcccttccctgagcccctgccccattcctgaccctggcccggcccagggcggcatctttggaggcctgttagtggcagggagaaggctggaacaggggcctggctggggtgggctccacgtgggtcctggaccttggccccggctcccagtttccagctgtcgtggactccctgtgcccacctccctggctgttccgggatctcacactgtgcctcagcagagtggcagccccgttcctgcaggcaggagccacctggtcacggccgggcccccagagcccatacccagcaggcgcggggcttggcctcagggtagctgctggcccagggcttctgaagaggcgacagtgtttccagaggctttggacccagggaggggcggcagaggtgtggggtccggggtgcccttgggcacaagactggaggtgctgaccagtgcggggtcagattttgatttgggggcttctggtgactcctgaggttctggaggctgctgggccggacaggcagagcaagagggtcaccctgaatctcatgccaggctcagagaccatgcatggagaccaaggggtgtcttcgttgggcggcgtgtacgatgtggcagagccctaggggctggctgtgccccttggcgtggagtgggggcttccccacctctgaggggtttgggcaccccccattgtgagggttctggtgccccctcacggcctcaggggcagtaggaatgaggtggggtgagctcttcccagaactgaggccgagtgcagctcccagctggaccgaatctgcctgatgtgcggctggaacattcttgtggttggggcagcgcattctttcctatggtggtcgggtgggctgggcaggcccagaagctggccagaggcagctccgccccggaccccagggagccggaggccccagccagcgcaggccctttgccctttgccctttacagcatgagactgcttcccttgagccccacccagctgcaaacagcaccccccacccctggggtcgcccaggtcctgcctcaggtgtggcttcccctctgtgagtcacaggcttgggccccctccccatccctgactcactggcgaggcccctcctggggcttcccgatgctccattcccccatgaggcccggcctccgtgagtcagccctcagctacgcgcctccgacgtgaggtgtctgcctggggcagggtgggctccgcaggtgggcactgctccaggatgtgccaggtgggcagcttgggaggggccaggcctggggtgggaccccactggccccagggccagggcaggcaccatggggcagggtgtgctccccgcttcatgcaggtctgtgaagaggtgtgattggggggctgcaagagctgacaggcagcaggtcccctcccctcgccaggtatcagcggcttcttgagtccgccctggcagggtgggtgggcagaggctgaagcagggcctggcccaggcctggagggagctccaaagagaggcgtggcctcagagcccctcccgtcgggggagcccttcagtctgttggggggtccttctgggtggctgtggggacggcctgtgttcctctgcggtcctggcaccatttggtgtgcagtgaagtgccagctccccgtgtccccaggtccccctagggggctgcagtggtcggggtgggtgaggaaaccccggtttcctgtttctggcgggccgagggcgtgtctgtgggggagggggctgcttgctccttcccgccgggacactcccctccctggcggcggcctgggcagggtggggcctcgggggcgggccggcctcgccggggagtacagcaggcagggagtggccgcaccgactggggctctgagctgagcctgtgccgagtgagcgtctcgtggggccgccagccttcagctgcctgtgtgccacacggggctgcccagagcaccgtgcctgaggccgagggtccgggcgacgaaggtgtgggggcagcatgtctcagcaccagctccgcgtgccgcagcccgagggcctgggccgaaagagaaccagctcggaggacaa

SEQ ID NO: 41280 - DNA, 2300 bp, Homo sapien
cttgtgaaatcctggccccttgctggggacaggggccagagggctggggctgaggctggaggccaggggcgctgtccctcgccctgcacacagcctgcctcatgtgccctcacccagaccccctcagccctggtctgcagtctcacttttggggtgttggggctggtgaggagggcgaagttgaaggagtgcagtgggttcagctgcaggcttgaggtgggggctctggcatccctccatgcctgccagctgtccccagagggcagccttggaggcagagtgggctgctcgggcccctcttctggtggggacagcagggggaggctgggagggagggagggtgtgtgccgaggccgcgggcagtgctggggggctgcggcttggccaggcgtgcggctggcccctcctcccggcgggtgtggccgcggggacgcaggggttaaggccaactaaccttgagcgtcagtagccctgcgcagggacagctgagccggccgggtggggagcgagggtggggaggcgccgagggccggacccgcggagggaggaggagaggaggcgggcgggagctgttgtggggctgccgccgcgtatggggcggtcctgcgggcagggcaggctccggtcccggcgctccccctcgctcgccctgcacgcagggagggggctgtctagcctggagcagccggttcccagcgcaggaagggcagccctggcggctccgcgtggcggctatggagccctcgggcagcctgtttccctccctggtggttgtgggtcacgttgtcaccctggccgctgtgtggcactggcgcaggggacgtcggtgggcgcaggacgagcaaggtaagccccgctggtggctgccagggactcgaggcggggcagaggggccgcctgcctcccgccccttcattccctgcgccctccccttcctgtttccaagctgaatgtcagtgaaagcagtgttgcccctccaccccaccctgcagtgtagaccctgaccctgctgcagtcccagggcggggcgggctctgcagtggccctcagcctgcagcctgtgcgggacaggtgggtggaagcggaggccggcagggcaggagcgtcccccacacgaagggaggcctgtggcagccgccgtggcagggacaagtgggcaggtgcctgtccggccagcactgaggtggaggtggctccctgcacacacagcagggggtggagccacacgcaggtgaggcaggtgccctcatgccctcgggccgcacagggggcgggggcagccaggctgtgccctgccctccctgctcaaagtcaccagctcctgggctgtggtcccaggtggcaaccgtgcccagcacaggatggggcggggccctggggattgggcagcctcaattatgggcttctggccagagggactgcctatcggggacctggctggccagacctctcctgcagtgagggcgctgcctggctcagctcctctgctggatccccggacttgagatgagtcaagatggggcttctaggcgtggcgctggggacgcccggagctgccggggactcagctgccaggatgggacttgggctgagggcttcttccccatccatgtttttggctggggaccagacactgtccctgcctccccacctcagcccacaattgcccccttcggccacggtcctggctcacaggatgcctctactccctggtggtgccagacgcggctcagctcctcggttctgcctccagcgttgtctgcccaccacctggccccatgccctgccttcctccctgggccctgcagtccccaccgcacatcctgctgggaggccccctcccatgccgcttcagtcccagggcagcctcccagcccggcccgtgggttggggcgcggcttcctggctgcgctgggcggggctgcgcgccaggggcaggttctttgggtctgggcctcgctcccgcagtgggcggattgtgggggggaggtggaagaggtggagagcgaagccggcagcctcgcagcgtgggctggaagcagaggcgccgccgcggtccagctccccgcactgtccgtgggccgaaccagggctccggccgtggccggcatgtcgggggcggggggcgcctttgcctcgccgagggaggtcttgctggagcggccgtgctggctggacgggggctgcgagccggcccgcaggggctacctctaccagcagctgtgctgcgtaggtgggtgcagtggcgtggccggtggcacagaaggggccaccatcgctctcacctagtggggctgggt

SEQ ID NO: 41281 - DNA, 2300 bp, Homo sapien
tgctggccagatgctgtcctgggctcagctgggagttgggccctttctggcatgcctgggtatccctgaccctcagggctgcctgggcccgcccgacccctggccgcccagagtgggccactgcaggcatttccctcggccgcacgtttttgaggtgtggggctggagagcaggaggctggggtgggcccggccctcttgttgtccgcgggcttcccagcatggacctgggtggcctgcccagtggcccggggccaggctggttcactgtgccttgctgtgggctgaggtaactacactggaggccacctgggctcagatggcagcgtgcgggacagcaggcggcgcctcaggctcctggtctgtatgaggccttcatggtataggacttcatggggtttgctgagggttccatgtggtgccaggagcgacgctgtggaatggggtataccgtcaacgtgcattctcctgggcctgaggggtgcgcccagcagacaggggtcccaggaagaggagcaggactgtgcgtgtcccacgtcctgtttccccggctgcattgggatctgatctgcataggatatgctgtgggcctgcctgtggcccggctctctgacccaggccttccacagagcagggcttcgggactcctgggtggagccaggccagtctcctgccgtggcccaggagaggcgtctccatcccagatccctgggaccccaggagaggctgtgctgtggggcaggcgcaggcctgagccctggtttcgggctgcctgggtctctggcctgcgcgtgactttggggtggctgtcccggccaccggtggggccaggtgctgtgttgagtgacctgcgcagggccctctgggagaatgggcggcctcttctcttggcccctgtggcctttccaagagcaccccctggcttggcagggcaggtgggtggggactgcaccgcctcctgcagggacgtgagcccgcacctcccgcgccctgctctattatattagaaccccctgtgggagctgggggaccgaggtgtcgggtggcaccgtccagccagacctgactgcagcggggcctgggtgccctggcgccgtgcgtcatgttccaagtctgggtggtgacggtccttgcgcgccctcctcggatatttatatcccctgggcccctgcccactgctcccctcccccacaagctgctgctgacagcagcacggccgtgccctcctcccacccgacgctgccgccagtggcttgtgcctcctccgaggggcctgtgacctcccacacccctggcccgctccgtctgccccgtgggctcctgccaccgtccccgatgaagatcgtgcccggtaggtgggcagcccttgaaagccttgtgaaatcctggccccttgctggggacaggggccagagggctggggctgaggctggaggccaggggcgctgtccctcgccctgcacacagcctgcctcatgtgccctcacccagaccccctcagccctggtctgcagtctcacttttggggtgttggggctggtgaggagggcgaagttgaaggagtgcagtgggttcagctgcaggcttgaggtgggggctctggcatccctccatgcctgccagctgtccccagagggcagccttggaggcagagtgggctgctcgggcccctcttctggtggggacagcagggggaggctgggagggagggagggtgtgtgccgaggccgcgggcagtgctggggggctgcggcttggccaggcgtgcggctggcccctcctcccggcgggtgtggccgcggggacgcaggggttaaggccaactaaccttgagcgtcagtagccctgcgcagggacagctgagccggccgggtggggagcgagggtggggaggcgccgagggccggacccgcggagggaggaggagaggaggcgggcgggagctgttgtggggctgccgccgcgtatggggcggtcctgcgggcagggcaggctccggtcccggcgctccccctcgctcgccctgcacgcagggagggggctgtctagcctggagcagccggttcccagcgcaggaagggcagccctggcggctccgcgtggcggctatggagccctcgggcagcctgtttccctccctggtggttgtgggtcacgttgtcaccctggccgctgtgtggcactggcgcaggggacgtcggtgggcgcaggacgagcaaggtaagccccgctggtggctgccagggactcgaggcggggcagaggggccgcctgcctcccgccccttcattccctgcgccc

SEQ ID NO: 41282 - DNA, 2300 bp, Homo sapien
ggcagtttggggctctgctcccgcctggctcctgaaataccgctgggcacatggatgcctggaatgtgggtgggagggtgggagggcagggctgggctggtggggcctgcagcgggaaggggaggctacagggtggggtctgctgggcggggggtctgctgggcggggcaggaacagtagggaagacccgtgggctggggccggagggctctctgggattgcaggcaggccagtcccctgcacccccaggcaggtctgctgggctggtctgacccgtcagtcggctgggcttcatctctgcttactgactaaggggtggctgcgaggaggagccgctgctaccagggcatgagtgggccctccctctgcctcccaccccttccctccttcctgcctcgccttcctccctgccggctctcggagcagcctggcctgtgtggcagccatggacaggtacagcatggaggagctgattcagctgggccaaggtagggcaggcagagctgggggctgtgggaggcagaggagagggccggggccgcctctggcagacctgtctcttcccgttgtccaccgttctgtgccgtcagacctgggatgcagggataggcacagccccctctcggagctgccccaggggtgtgtgtgatgtgtgtcccggaagcacaggcctgtccggacctccgtggagtggtagaagaactgcccgctgccagcctggggcactcctcccgccaggagctggttctcacccaggccattgagtcaggctcctctgaggcttccccagcacgtggcagggagtgggctgaaacgtccggcctgtcggcccctgcccactgctggccagatgctgtcctgggctcagctgggagttgggccctttctggcatgcctgggtatccctgaccctcagggctgcctgggcccgcccgacccctggccgcccagagtgggccactgcaggcatttccctcggccgcacgtttttgaggtgtggggctggagagcaggaggctggggtgggcccggccctcttgttgtccgcgggcttcccagcatggacctgggtggcctgcccagtggcccggggccaggctggttcactgtgccttgctgtgggctgaggtaactacactggaggccacctgggctcagatggcagcgtgcgggacagcaggcggcgcctcaggctcctggtctgtatgaggccttcatggtataggacttcatggggtttgctgagggttccatgtggtgccaggagcgacgctgtggaatggggtataccgtcaacgtgcattctcctgggcctgaggggtgcgcccagcagacaggggtcccaggaagaggagcaggactgtgcgtgtcccacgtcctgtttccccggctgcattgggatctgatctgcataggatatgctgtgggcctgcctgtggcccggctctctgacccaggccttccacagagcagggcttcgggactcctgggtggagccaggccagtctcctgccgtggcccaggagaggcgtctccatcccagatccctgggaccccaggagaggctgtgctgtggggcaggcgcaggcctgagccctggtttcgggctgcctgggtctctggcctgcgcgtgactttggggtggctgtcccggccaccggtggggccaggtgctgtgttgagtgacctgcgcagggccctctgggagaatgggcggcctcttctcttggcccctgtggcctttccaagagcaccccctggcttggcagggcaggtgggtggggactgcaccgcctcctgcagggacgtgagcccgcacctcccgcgccctgctctattatattagaaccccctgtgggagctgggggaccgaggtgtcgggtggcaccgtccagccagacctgactgcagcggggcctgggtgccctggcgccgtgcgtcatgttccaagtctgggtggtgacggtccttgcgcgccctcctcggatatttatatcccctgggcccctgcccactgctcccctcccccacaagctgctgctgacagcagcacggccgtgccctcctcccacccgacgctgccgccagtggcttgtgcctcctccgaggggcctgtgacctcccacacccctggcccgctccgtctgccccgtgggctcctgccaccgtccccgatgaagatcgtgcccggtaggtgggcagcccttgaaagccttgtgaaatcctggccccttgctggggacaggggccagagggctggggctgaggctggaggccaggggcgctgtccctcgccctgc

SEQ ID NO: 41283 - DNA, 2300 bp, Homo sapien
gggggcgtgtgcggagctggcagggtgggccaggaacattctgctccgggctcctccctgcggcttcccttcccgcctgcaggcccctggctggtgggagggaggggactcccgccgagccccgccccatctctgctggaggaagctaccgccctttcctgcccggagccggcttgggggaggcggggctggttgggtggcggcccagcgggggtcagtcctggcacccctgcaggcctgtgtaggagagaacctaggtccacgtgcttttaagaggccttgggatcattttgggacagtgtgggtatcgtgggttagtttggtggggcccttggagatctgggggggattaggttagggaatcaggccaggaagatgcggtcggcctgccgggagtgcaggaggtcagtgtgggggggtgcgctgagggactggccaagagggtagggccttctttgggcacagggctgggcaggcttggacccagctggtgttgttcccaaagccacaaccctggtgggtggagggtccgcaggtgctggtggtccgaggggcgtggccactgtggtccctacatcttcctggagcctcacctcctgaggctggccttttcctgcctggggctggcttcagagggagggagagccatgccgcagcgagctggccctgccagagggctgtgggaaccgtggctatgccttcggagtttccccgccaccacacctctgtgtacgcaggcgtgcgcgtgcgcgtgcgtgtgtgcgcgcgtgtgtgtgtgtgtgtgtgtgtgtgtgtttggagcctgcaccgtggcgccatggcgacggccccataaacccgcccccacaagctgcttgttggccgcctgccggctgctggccagcgcctcccacctcgggatcccccctctctcccactcccccccaccgccctatttataatcagttcccgggtttgccgggcttggtgggaaggggtgtgtcggcttggggcgagcagcgatacgggtgggggtccatggagcacagcgtgggacagtgggagtgttgggtgcggttctcatgcctggaccctcagtgggggcggcagcagcggggcggggaggggggggtggatgatgggtgtggctgggccaggcctgcagggcctcacagggcagtttcctcttcccttcccttgggccctggccgtcttctggcctggcattcttccaccctgcagccatccatctggcctgcagacgggcacttgggctgcccagggtgggcatctgtgggcggtagggactcggtgactttctctgtggcagcggctgggaatctctggcctccaacagctgggttggaggtgggggtgaattgaggcccctctgagccccctagccggtgctctgctcagagggctgtgggcttggagaggccactcctaatctggcctggaatgggaagtgttaacttgagtggccactgcctctaagcctggtgtgtggaggtgggggctctgtccgtttgcccgcctgatggacagcagcagcggtgcctgcagccctcctcatgtgctgtggcagctgcccccagccgctcccctcggacttcctcccgcaagaccccagcttcttccccaggccctagtcctctccgctcaagcctcgcatccctcatccctccaggcctggcagcccagcaccccccttcagatccttgtgaagccgggacaccagagcccacatccctgccgagtacccctcctgccctcagcccccctgcctgccctgccaccctcttctttagactcttggtctatatccgcccccacttgccccagcacagtcttagggaccttgaaggatgtgtttagaaactgatgtcatttctgacgttggagccgtggggcctggtggggggaaaggggcagctgtgggggtggccgctgcctcttgaggtgccccccactctacaagggccccgtcggctgtgggtgggaggggccgcccatgctgctgagtcagagggggccggcccggcgtcctggaggaaggcgggcagccggcagtgccggcagggattgcacggagccaggcgccacgagccacacagccgggagcccgcgccctcacgctcagcaccccagcctgcctgcccgcccgcctgccctgccgctgcccgctgtcacaccctgtagcgcgggagcttctcgcagcgccccgggccttctcgtggtaccctgcctgctgcctttgcccccgcactgactgcccggctccagcagccatggtggccggcatgctcatgccacgggac

SEQ ID NO: 41284 - DNA, 2300 bp, Homo sapien
caagatcacaccattgcactccagcctgggtgacagagcgagattctgcctcagttaaaaaaaaaaaaaaaaaaaagtctccctaggctgaggaaaatttttatgcattaaattaaaaaaattgatctggaccaggcagtgtggctcacacttgtaattccagcactgggaggtgggaggattgcttgagcccaggagtttgagaccagcctgggcaacacagagacagactgtctgtataaaaaattaaaagatgaactgggagtggtggtgcacgcctgtagtcccaactactcagaaagctgaggtgggggcatcgcttgagcccaggaggtcgaggctgctgtgagccgtgattgagccactgcactctagcctgggtgacagagtgagaccttgtctcaaaaaaacaaaacaaaaaaaaaacagcattttttaaaaatgtatgaactttttagatctctttataaatatctgtcactttcacttgaggtttactaaggaagtatgattcacttgcaggccaaatttaggtttatccagatacagctcagtaaaacctagctgggaattcagcagtggcgcgatctcggctcactgcaacctcagcctcctggattccagtgattctcgtgcctcagcctcctgagtagctggggctacaggcgtgtgacaccatgcctggctgatttttttgtgtatttttagtggagatggggttttgccatgttggccaggctggtctcaaactcctgacctcaagtggtccacctgcctcggcctcccaaagtgctgggattccaggtatgagtccccgtgcccggcctgaaattctgttttaattcctcacttcaccattttccttaagtttggcaactggtgtttcttgagactccccacaccccaactggctgagtcccagggagggcagggacgggcagggggacgagagactccagaactgctgggtctacggtggaggtggggctggcttctggccctttgcctgttagctcgtacccgtgggagctgccggcctcgctcctggatcatggtcacgtcctccatgccagccccagcctggcgcacagtgggtctgtttacaggaggggaaggacttgcgggtgaaggcagaggaaaggccttgctggagactgaggcaggctagtcacttctatcttgtggaggctgtcctgccccacactaccagcacggactggggtggagcacagtcccggggccagtgttgaaggggtgccctggtgtgggcagggcccagcattcctccgtgccccctgcagcgcagtgagtgaggcagagctgacctcaccctgccagtgctacctgctcccccaggcgtgcgcagtgacacacagctactcctgcgggctgaggaggctgaccccattagccataggggtggttggatcagagcagctgcgaagggtccctggtggtcgtggggggtgggtgagggatggagctgcagtgtcatctggcggcagtggagatgctggcgagtgggcagactggggggcgcagccaggaggacctgtggggctgcctgtggggcatcctgaggctgggtgggagaggcagagaccagggtgcaggtcggacctgtcatctttggagccagtgtacaaggtgcctgacccagggctgcgcagaggcgagacgcccggggaaggggcacactgctggggccggggaggtgggaggtggccgaccagggtctgggggcttgatctcagcagcctgccagcccaggccctggagttgggccggctgaggaagttactgggagatctggatgggtgggtatctcctgcagggcgcgggtaacggcttcaaggccctcgcacgtgtgtcccacaggctgttctaagcatggctcgttgcagtggactcggggggctgtggggtgggccgggggctgcggagctggggagtgggccgtccgagcgctcctggatccggcctggtgacctggcagtctggctggggttagcggggtcgcgtgccccagaaccacaggctgggggggaggggtgcgcggtgcggccgggagcatgcgcccggggcggccctgtccggcgcattgatcagctgaagccccgcccctggccggcaagccctgccccggacctccgggctcctcccccggctgcggcgctggcctgggcagtgcggtgcggggctggactctgcctggtggtggcacagccgccctcagccccggcgcagacatggacccctcgcgagccatccagaacgagatcagctccctcaaaggtgcg

SEQ ID NO: 41285 - DNA, 2300 bp, Homo sapien
agtcagtgcctggggccagagcatgggggtcaatatgtgggtacagcagagtgcaggaggggtgtgggtgccagtgtccaggcgagaggctgggtggggagagttcagtgtctaggttaagaaggtggtgggtgggtcggcgtgcagagtccactcctgaacaggcagagatgtgacccctcctgctccccttccaggaggccatgtcgggtgaggacgctgaggtccgggcagtctctgaagatgtctccaatggaagcagtggctcgcccagccctggggacacactgccctggaaccttgggaaaacgcagcggagccggcgcagcgggggtggcgctgggagcaacgggagtgtcctggacccagctgagcgggcggtcattcgcatcgcaggtaactgcgcagggccttgcctgtgcacctccttggcacgcgaggttgactgagttcccgctgcgtgctaggcgctggagcggggactgggtgggggaggcctagggggatctgcgggtcacggagggcctcgcgcgtcccaggtgagtgcaggcggcacagcgccacctgccggccgcgcccaggcggttcatgaggcctggggttgggcttcttgccgcggcgtccatccttgattttaacacggtccagtgcccagatgcaacaaggataattttttgggttccccaccaggccctcggtcttggctgccacaatggcggccaggtgggaatgtacaggagcagtgtatagggagggggtacctggttgtctggagccccagcctcttcctgagccaggatctggccttgctttccagtagctccccatccagggagaacgatgggaagcatccagcgagatgcttggggaagggggagggcaggagggaagtgggtgacctagagctgtgctaggagagggaggagcagtagctctctaggctttggcttgagagtcctgacctgttccagccggagggcagggaggcccctgcgggaggccaggagagggctgcaaggccaggtgctgagccctggggggatgttgcagacgacgggaagcggggctggtaggagcaggaaagagggaaggagagggtcactgctgtgcacccagctccagccccagggtctggttccatctgcatgaccttcagggcttttcacagcacacacggactttaaagaaagaagtcactttcttcccacttgaaagggaatcacttgtgtcgttcccacgcctgggctttcttcagcatcacctttacagttgtggaggagtgtggggggtcccgaggccccggctgaccgtggttgccttcggtactcactgcaaaggctttgcccccagccagcaccttccgcgccggggctctgcgtcctctgacggtttccttaggaccgattcctggaagcgggacttgcagttacaggacatatggcattaagcttggagaaaacacggccaggggcatcccagacagggtggccgacattggtgaaggcggggagagcgggggctttgccaatctgatgggtggaaagagttgttttaattatcaccaagcattttttccttctgtgaatgggctattccagtcctcgtatgtgtacttaatttttcttgtgtgtagtgttttaagggttctttataccgactcagtcgtctccaatgttgcaatgggaaagttctcagctgcacgcaggaagcaaggtggggggcgggcaggggagcgtctcggaggcaggtcgccggcccggcggggaacagacaggtcgcggccgcccctgggcgggggccacccgaggacccccgggcgaccgcggtgtcggcggccgcgacccgggcgagaacgggaaagggcgtgcgtgcgggactcggagcccgcggaaccggcccgccgggaggggcccagacgcggctccctctgcccggccgcggcggccccggccccgccccgcccgtggggcatcctgggtgcgggggcggggcgggggcggggcgggggcggcctctttaagcggcgcgcgcggccgcggggacagagtggccgccgggtgctggaggctccgctgcaccccgcgccccgcgcccgccggcatggccggcccgctgcccgacgagcaggacttcatccaggcctacgaggaggtgcgcgagaagtacaaaggtacggccccccgtcccgctgcctgtcgggccgctcctgacagcccagccgccgagcaccttgtcgtccacggtggcggtcccgatcgccggcccgagcgcggccactccgccggcctcgtccgcctgga

SEQ ID NO: 41286 - DNA, 2300 bp, Homo sapien
gccaccctctggcctcctgcttcccaggctcccagctccgcacaggctgatgctccccgcccccaactgtggccgcctgagctgtccccggggacgcccctgcctccctctgcgggctccagaaggcggtgtgggggatggcggtcagcagcggccgaggggggccgggctaggtcccagcctgggccgaccccaccaccaggggtcagcagagcccaggaggcgacaccgcccgcccgccgctcccagacctcgcccgagtcggctctgttgtttgaataaacgtgaacgtgaacccaggcggaagggacccgggaactctgactgcgacctctgtttggggagtggggatctccgcggcccaggggcgggatctgctgcttccgaggaggcgtcggggtgcggggcggggcccggagctcaccggggcgagcgcacgacgttcccgtgtcgcgcacgccggcgcagacagcgtctccttgactaccggcccgccccgtgcgccgggggctcaggtgtgcgccgctgccctggccgaatcgcccgcccgggccccagccccgccgctcccgagatctcggcggccccgcgcagacacgggcgcccgatctcgctggcagcgttcgctcgctctcggccgggcccgcgcggcgcagctctgggtgggggccggggcggggctcggggctcgccccgcctgcgccgcctccgccgctctcccggcccgagcagtctggctgcggcggcagagctgaagtgagcggagccaccaggcatgtatgaccgcggccaggatggagaggcgcgccgcgtgcgggcgctgcggggtgggggtcggggggcggtctccggccgcaggccacacggaactaggggctgcgccgcgccccctcctgccctcgctcgagaggacagcacctccctgcacgcccgagactgcggaactggacgggcggtgcccggggtgtgggcaggaaaggccgctggggaggcgcggctgaccgcagggctccgggcggggggctgcaaccggggcggcccgtggagaagccagtgggggcggggcgcggcggccccctcctcggtgtccgctgcctcctccttagcccttggcctgagggcggaggcacagagcccacattgtgcccccgcgccagcccaccccctccgagacagagccccattcacctcccgcacgccagtgctcttggggacgggggctggggagtgtgcgcgcgtgggtatgcgtgcgtcctggttgcgtccgcggtgccggtgtacgcgcccccactgtgggccgctggagctgcggcccgggctccctcccggcctcgctgcagcagagctcccgcggcccacgccgctgcggctgcagctatttataggccttcgctgcggagatcgaggtgggactgcgggctgaggtggggtggcgtgatggggagtcctagaggtcgagagagcttggaggtggactgccggtgtccaggggaagggcttgggtgtccttccctgatgacccggtgagtggagggggcggtggtcagctttccttgatggcctcgcctgcctgcgattagagggttagaggcgggtccagtttgggatggaggcagtggaggccggcatctgagtgaaggtagtcaccccttccccttccatttgacagagtggaaggtggtctgtcgtgtgccggttgagcccctgggtgacagagtaggtgggtggggtgtgggtgactaagagaggagagtggcagtcagtgtgtgggagtgggggtggccagggtggtcagtgtcctggtgatggactggagggtaaggccagtggctggggggtcactgtgtaggtatctgaggagtgcgcgggagggggcaaggcagtcatggatggagagagggtaagtcagtgcctggggccagagcatgggggtcaatatgtgggtacagcagagtgcaggaggggtgtgggtgccagtgtccaggcgagaggctgggtggggagagttcagtgtctaggttaagaaggtggtgggtgggtcggcgtgcagagtccactcctgaacaggcagagatgtgacccctcctgctccccttccaggaggccatgtcgggtgaggacgctgaggtccgggcagtctctgaagatgtctccaatggaagcagtggctcgcccagccctggggacacactgccctggaaccttgggaaaacgcagcggagccggcgcagcgggggtggcgctgggagcaacgggagtgtcctggacccagctgagcgggcggtcattcgcatcgcagg

SEQ ID NO: 41287 - DNA, 2300 bp, Homo sapien
cgtcttccctgtgtgtgctggagctccggccggtggagctcctgctatgccggctcagacctcaggccccctcacctgctccctcggagttcctttctcttccgttagcttctcactctgcatcagttcctgaactccatctagaacgctagctgggtcttcagtttgaaccacttcctcatttggctcaccccctctagatttagctcagcgtccctttctgaatgcaggagcactctggttttcagactagttccttttcatagcagctagttttgtttaatagacatggtgttcttttgcaactctctgaagaaactatttaaaatttctttaaaagtgtttcccagggctgtcaggttggtcacctgaggccttctctcccacctgggtctttcagcactgagaggtctgtggcatctcctcgtgttggagtcaagtcctgtaggcagcatagggccctggctcagcttttctctgcagaggcctcgcttgagtgggtggggtttgcccgcccgcagacctccacgggagggggaggggtcaggcctccccagcggccctctgaagtcacttgcttcacggaggtgttactgtctgctgctggacagagcatgatgggggctgcaagggctccctcaaaccctggactcctccaacagagggctcctggttgccaggctcagctctgccctgcgtcggccccagggcgtagggagggtgtttaatcctggcccgggccttccccgcaggtggagcgcgtgtcgcacccgctgctgcagcagcagtatgagctgtaccgggagcgcctgctgcagcgatgcgagcggcgcccggtggagcaggtgctgtaccacggcacgacggcaccggcagtgcctgacatctgcgcccacggcttcaaccgcagcttctgcggccgcaacggtgaggcctgagccgggcaggggcgggggctctgcgcaccccgaccaccctgaccttgccccgtctcgccctgcagccacggtctacgggaagggcgtgtatttcgccaggcgcgcctccctgtcggtgcaggaccgctactcgccccccaacgccgatggccataaggcggtgttcgtggcacgggtgctgactggcgactacgggcagggccgccgcggtctgcgggcgccccctctgcggggtcctggccacgtgctcctgcgctacgacagcgccgtggactgcatctgccagcccagcatcttcgtcatcttccacgacacccaggcgctgcccacccacctcatcacctgcgagcacgtgccccgcgcttcccccgacgacccctctgggctcccgggccgctccccagacacttaaccgaaggggccaccctctggcctcctgcttcccaggctcccagctccgcacaggctgatgctccccgcccccaactgtggccgcctgagctgtccccggggacgcccctgcctccctctgcgggctccagaaggcggtgtgggggatggcggtcagcagcggccgaggggggccgggctaggtcccagcctgggccgaccccaccaccaggggtcagcagagcccaggaggcgacaccgcccgcccgccgctcccagacctcgcccgagtcggctctgttgtttgaataaacgtgaacgtgaacccaggcggaagggacccgggaactctgactgcgacctctgtttggggagtggggatctccgcggcccaggggcgggatctgctgcttccgaggaggcgtcggggtgcggggcggggcccggagctcaccggggcgagcgcacgacgttcccgtgtcgcgcacgccggcgcagacagcgtctccttgactaccggcccgccccgtgcgccgggggctcaggtgtgcgccgctgccctggccgaatcgcccgcccgggccccagccccgccgctcccgagatctcggcggccccgcgcagacacgggcgcccgatctcgctggcagcgttcgctcgctctcggccgggcccgcgcggcgcagctctgggtgggggccggggcggggctcggggctcgccccgcctgcgccgcctccgccgctctcccggcccgagcagtctggctgcggcggcagagctgaagtgagcggagccaccaggcatgtatgaccgcggccaggatggagaggcgcgccgcgtgcgggcgctgcggggtgggggtcggggggcggtctccggccgcaggccacacggaactaggggctgcgccgcgccccctcctgccctcgctcgagaggacagcacctccctgcacgcccgagactgcgg

SEQ ID NO: 41288 - DNA, 2300 bp, Homo sapien
gccttggccagcccccggccagaccgggctctggtccagttgcccaagcccctttctgaggcaggtgagaggcagggttggggttgaggtgctggctaggggggattccctgagctgacctgcacataccccacagatgtccgtgtcctggaggagcaggcccagaatctgggcctggaggggaccttggtgtccctggcccgggttccccaggcccgagcggtgcgtgtggtgggggatggtgcctctgtggacctgctgttgctggagttgtacctggagaatgagcgccgcagtggtggggggcccctggaggacctgcaacgcctacccgggcccctgggcactgttgcctccttccagcagtggcaaggtgagtggggctgggcagacccagccgaccgtccctctcctgcagaaatctgacaggctttctgtcctttcccttcctccaagtggcagaacgagtgttgcagcaggagcaccggttgcagggctcagagctgagccttgtcccccactacgacatcctggagcccgaggagctggctgagaacaccagtggaggggaccacccgtccacccaggggcctagggctaccaagcatgctctcctgaggaccggagggttggtgacggctctgcagggtgcagggactgtgacaatgggctctggcgaggaaccagggcagtcaggggcctctctgaggacaggtcccatggtgcagggtagagggattatgacaacaggctctggccaggaaccagggcagtcagggacctctctgaggacaggtcccatggggtctctgggacaggcagagcaagtcagctcgatgcccatggggtctctggaacatgaggggctggtaagcctgaggcctgtggggttgcaggaacaggaggggcccatgagcctggggcctgtggggtctgcaggcccagtggagacctctaaggggttgctggggcaggagggcctggtggaaattgccatggactcaccagagcaagaggggctggtgggtcccatggagatcaccatggggtctctggagaaggcagggcctgtgagcccaggatgtgtgaagctggcagggcaggagggcctggtggagatggtgctattgatggagccaggggcgatgcgcttcctgcagctctaccatgaggaccttcttgcgggcctgggagacgtcgctctcttgccacttgaaggaccggatatgactggctttcgggtgagtgacccctcaggactcctcaccttcagccccctcctcctactggggactcaaagtacctttcctgtgctctaaacctgcaaactccatctctgcaatggccctgcagctctgtggagcccaggcttcctgccaggcggctgaggagtttctgcggagcctgctgggcagcattagctgccatgtgttgtgcctggagcacccgggcagcgccaggtttctcctgggcccagaagggcagcaccttctccaggggctggaggctcagttccagtgtgtctttgggacagagcgcctggccacagccacgttggacacaggccttgaagaggtagagatggagtcccacccctgccctcccctttctcacgcctctgccccaggcctcctctgcccttgcccagaggctagtggtcctgacatcctctccctacaggtggaccctaccgaggccctcccagtgctccctggcaacgcccacaccctgtggaccccagacagtacaggtggtgaccaggaggacgtgagcctgggtagggctccctgggagccctcagcacatcctgtggccctcacttgacctcaccccctgccctgctctgtgctcccatctgtctactgacccatcttaggcccaccctgtaccctaaaaacttgctccccatctttcatccattccaactcctcctgggtccagcccctgacccaatggcctctccctgcccccagaggaggtccgagaactgctggccaccctggagggcctagacctagacggggaggactggctgcctcgggagctggaggaggaagggcctcaggagcagccagaggaggaggtgaccccagggcatgaggaggaggagcctgtggcccccagcactgtggcacccaggtggctggaggaggaggccgctctgcagctggccctccaccggtcactggagcctcaaggtcaggtggctgagcaggaggaggctgctgccctgcggcaagccctaaccctctccctgctggagcagcccccgttggaggcagaagagcccccagatgggg

SEQ ID NO: 41289 - DNA, 2300 bp, Homo sapien
ttttgttttcctgctcccagcagggttaggcttgctgaggggcaggcacaggagtcctggctgagctcatggcctgaggctgcctagcggccacggggaatgtaagtgctgtatgtggggccacccataatgggggagcattgaggacacaccttggaggggcctggggaggggcaggaggggtggaatgggctgtttccctacccacctgatgccccgtcccagggttgcaatggcggaggcagaggcaggggtggcagtggaggtccgtggactgccccctgccgtgcccgacgagctgctcactctctactttgaaaaccgccgacgctctggagggggacctgtgttgagctggcagagactgggctgtgggggcgtcctcaccttcagagagcctgcaggtgagagggctggctgaagggacagcctgggtgccctgatattctaatgcctgacatcctgccccgcccctgcccacagacgccgagagggtcttggcccaggcagatcacgaactacatggtgcccagctgagcctgcggccagctccaccacgagcccctgcacgcctgctgctccaaggactgccccctggcaccacgccccagcgcttggagcagcatgtccaggccttgctgcgggcctcggggctcccagtacagccttgctgtgccttggccagcccccggccagaccgggctctggtccagttgcccaagcccctttctgaggcaggtgagaggcagggttggggttgaggtgctggctaggggggattccctgagctgacctgcacataccccacagatgtccgtgtcctggaggagcaggcccagaatctgggcctggaggggaccttggtgtccctggcccgggttccccaggcccgagcggtgcgtgtggtgggggatggtgcctctgtggacctgctgttgctggagttgtacctggagaatgagcgccgcagtggtggggggcccctggaggacctgcaacgcctacccgggcccctgggcactgttgcctccttccagcagtggcaaggtgagtggggctgggcagacccagccgaccgtccctctcctgcagaaatctgacaggctttctgtcctttcccttcctccaagtggcagaacgagtgttgcagcaggagcaccggttgcagggctcagagctgagccttgtcccccactacgacatcctggagcccgaggagctggctgagaacaccagtggaggggaccacccgtccacccaggggcctagggctaccaagcatgctctcctgaggaccggagggttggtgacggctctgcagggtgcagggactgtgacaatgggctctggcgaggaaccagggcagtcaggggcctctctgaggacaggtcccatggtgcagggtagagggattatgacaacaggctctggccaggaaccagggcagtcagggacctctctgaggacaggtcccatggggtctctgggacaggcagagcaagtcagctcgatgcccatggggtctctggaacatgaggggctggtaagcctgaggcctgtggggttgcaggaacaggaggggcccatgagcctggggcctgtggggtctgcaggcccagtggagacctctaaggggttgctggggcaggagggcctggtggaaattgccatggactcaccagagcaagaggggctggtgggtcccatggagatcaccatggggtctctggagaaggcagggcctgtgagcccaggatgtgtgaagctggcagggcaggagggcctggtggagatggtgctattgatggagccaggggcgatgcgcttcctgcagctctaccatgaggaccttcttgcgggcctgggagacgtcgctctcttgccacttgaaggaccggatatgactggctttcgggtgagtgacccctcaggactcctcaccttcagccccctcctcctactggggactcaaagtacctttcctgtgctctaaacctgcaaactccatctctgcaatggccctgcagctctgtggagcccaggcttcctgccaggcggctgaggagtttctgcggagcctgctgggcagcattagctgccatgtgttgtgcctggagcacccgggcagcgccaggtttctcctgggcccagaagggcagcaccttctccaggggctggaggctcagttccagtgtgtctttgggacagagcgcctggccacagccacgttggacacaggccttgaagaggtagagatggagtcccacccctgccctcccctttctcacgcctctgcccca

SEQ ID NO: 41290 - DNA, 2300 bp, Homo sapien
ctgctatgggcctgtctgcacctccgtttccctttctgtggtgaggattagcggcagcaaggaatgcagtggagccattaccttgtcaccttctgaggttacttgtgacgatgccaatgatggtgtgagatggggaggtgcaggcaggacagaaagctgcaggaatgggcaggcaagacctgaggcgggaggaaggctgtgctgcaatgcacattcttggagaccaagggtggggaaccgcccatgctcagcacctggcaggtgtgagggaccaggagcagggttgagaaggttgctgggggcgttgaaggccagccttggccgggggcgggcctggagacccagcactttgtgtgcagagggtgtcatggacacagaggcttggagatcctgagtgaggggcagtgactcaggccccttggtgggtttagtggggcgggtgattggccattttcaggccatggaggccaggggagtggagggccaccaggggacactcctgtctaccctgccaaccaggggctggagtgggccaggtagggccggtgggctgggctgggttggctggagggtcctgaggggtccagcctggccaatacctcctggtcagctgggggttgaggctgcagcaggagaggaagcatctgagccccagtacccaggcctcagcgcccagggcccagctgctccctccctccttccgtctttcagtttcacttttgttttcctgctcccagcagggttaggcttgctgaggggcaggcacaggagtcctggctgagctcatggcctgaggctgcctagcggccacggggaatgtaagtgctgtatgtggggccacccataatgggggagcattgaggacacaccttggaggggcctggggaggggcaggaggggtggaatgggctgtttccctacccacctgatgccccgtcccagggttgcaatggcggaggcagaggcaggggtggcagtggaggtccgtggactgccccctgccgtgcccgacgagctgctcactctctactttgaaaaccgccgacgctctggagggggacctgtgttgagctggcagagactgggctgtgggggcgtcctcaccttcagagagcctgcaggtgagagggctggctgaagggacagcctgggtgccctgatattctaatgcctgacatcctgccccgcccctgcccacagacgccgagagggtcttggcccaggcagatcacgaactacatggtgcccagctgagcctgcggccagctccaccacgagcccctgcacgcctgctgctccaaggactgccccctggcaccacgccccagcgcttggagcagcatgtccaggccttgctgcgggcctcggggctcccagtacagccttgctgtgccttggccagcccccggccagaccgggctctggtccagttgcccaagcccctttctgaggcaggtgagaggcagggttggggttgaggtgctggctaggggggattccctgagctgacctgcacataccccacagatgtccgtgtcctggaggagcaggcccagaatctgggcctggaggggaccttggtgtccctggcccgggttccccaggcccgagcggtgcgtgtggtgggggatggtgcctctgtggacctgctgttgctggagttgtacctggagaatgagcgccgcagtggtggggggcccctggaggacctgcaacgcctacccgggcccctgggcactgttgcctccttccagcagtggcaaggtgagtggggctgggcagacccagccgaccgtccctctcctgcagaaatctgacaggctttctgtcctttcccttcctccaagtggcagaacgagtgttgcagcaggagcaccggttgcagggctcagagctgagccttgtcccccactacgacatcctggagcccgaggagctggctgagaacaccagtggaggggaccacccgtccacccaggggcctagggctaccaagcatgctctcctgaggaccggagggttggtgacggctctgcagggtgcagggactgtgacaatgggctctggcgaggaaccagggcagtcaggggcctctctgaggacaggtcccatggtgcagggtagagggattatgacaacaggctctggccaggaaccagggcagtcagggacctctctgaggacaggtcccatggggtctctgggacaggcagagcaagtcagctcgatgcccatggggtctctggaacatgaggggctggtaagcctgaggcctgtggggttgcaggaacaggaggggc

SEQ ID NO: 41291 - DNA, 2300 bp, Homo sapien
ggcagaggttacagtgagctgagatcgtgccaccgcactccagcctgcgtaacagagtgtgactctgtctcaaaaaataaataaataagtaaataaaaataaaatagctgggtatggtggctggcaccagtaatcccagcactttgggaggctgaggcaggtggatcatctgaggtcaggagtttgagaccagtctgcccaatagggtgaaaccctgtctctgctaaaaatacaaaaattagctgggcatggtggtgcgtgcctgtaatcccagctacttgggaggcttaggcaggagaatcccttgaacccagtgggtggacgttgcagtgagccgagatcacggcacttcactccagcctgggtgaaagggcgaaactccgtctcagaaaaaaaaaaaaaaaaggcagagtaagggagatcatgccagaggggtggccatgggggtttgtggggaaggtagggccaagcagagggaagggccagtcccaggctactgaggcaggagtggcctgtagctctgcaggaagagctgagagcctggagccctctgagcatcagggtgtgcagggggcatggggccagagaagggactgaggtctggtcaggtgcagctgggcagggggcaggtcctcaaaaggactttgggtttttgttttttttttagacagagtctcactctatcaccttggttggagtgcagtggcacgatctcagctcactgcaacctccacctcccaggttcaagctattctcctgactcagcctcctgagtagctgagattataggcacctgccaccatgcccggctaatttttatatttttagtagagacagggttttaccatgttggccaggctgatctcaaactcctgacctcgtgatccacctgcctcagtctcccaaagtgctgggattacaggcatgagccactgcgcccggcccccaggactttggtttctactgttgctgatgctgggagctgtagcagctgctggtgtcattttacaaggctcaccctgacacctctgttgaggacccaccatgggagtggcagacagagactagttaagaggttagcctagctacctagcgagagatgctggaggctgggaccagggtcggggcagcagaggtgtggcatgtgcagggctaggagtgcaggctggccagggtcctcagctccctggagggaggaacagcaggggtggggctgggttttggtgggctgaggggtgagtgggaagtaggagatggagagtggtagtggccacagctctttgaaaggctggaagcaaacggagcttgggtgatgtgggagatctgtggcgagtgggagtgtggactctgaaggcaccgcccaggtttgaggcctggtgctgctatgggcctgtctgcacctccgtttccctttctgtggtgaggattagcggcagcaaggaatgcagtggagccattaccttgtcaccttctgaggttacttgtgacgatgccaatgatggtgtgagatggggaggtgcaggcaggacagaaagctgcaggaatgggcaggcaagacctgaggcgggaggaaggctgtgctgcaatgcacattcttggagaccaagggtggggaaccgcccatgctcagcacctggcaggtgtgagggaccaggagcagggttgagaaggttgctgggggcgttgaaggccagccttggccgggggcgggcctggagacccagcactttgtgtgcagagggtgtcatggacacagaggcttggagatcctgagtgaggggcagtgactcaggccccttggtgggtttagtggggcgggtgattggccattttcaggccatggaggccaggggagtggagggccaccaggggacactcctgtctaccctgccaaccaggggctggagtgggccaggtagggccggtgggctgggctgggttggctggagggtcctgaggggtccagcctggccaatacctcctggtcagctgggggttgaggctgcagcaggagaggaagcatctgagccccagtacccaggcctcagcgcccagggcccagctgctccctccctccttccgtctttcagtttcacttttgttttcctgctcccagcagggttaggcttgctgaggggcaggcacaggagtcctggctgagctcatggcctgaggctgcctagcggccacggggaatgtaagtgctgtatgtggggccacccataatgggggagcattgaggacacaccttggaggggcctggggaggggcaggaggggtggaatgggctgtttccctac

SEQ ID NO: 41292 - DNA, 2300 bp, Homo sapien
tcagtcccttctctggccccatgccccctgcacaccctgatgctcagagggctccaggctctcagctcttcctgcagagctacaggccactcctgcctcagtagcctgggactggcccttccctctgcttggccctaccttccccacaaacccccatggccacccctctggcatgatctcccttactctgccttttttttttttttttctgagacggagtttcgccctttcacccaggctggagtgaagtgccgtgatctcggctcactgcaacgtccacccactgggttcaagggattctcctgcctaagcctcccaagtagctgggattacaggcacgcaccaccatgcccagctaatttttgtatttttagcagagacagggtttcaccctattgggcagactggtctcaaactcctgacctcagatgatccacctgcctcagcctcccaaagtgctgggattactggtgccagccaccatacccagctattttatttttatttacttatttatttattttttgagacagagtcacactctgttacgcaggctggagtgcggtggcacgatctcagctcactgtaacctctgcctcccaggttcaagccattctcctgcctcagcccccccaatagctgggattacaggtgcacaccaccacgcccagctaatttttttttgtatttttagtagagacggggtttcaccgtgttagccaggatggtctccatctcctgaccttgtgatccacccgcctcggcctcccaaagtgctgggattacaggcgtaagccaccgcgcccagcaagcattttatttttcttaaaggtctctcaaattttgtgagcttctgcttctacaaaggtagaagttaccttctacaagggtaaatccatccctgctttttccacgttttctctaatggaactcatcacaggttatccattacgccgaccctggctgcagagggcctgccacaggcaccactcacaccacaagcagactggtacagtttcgggaatttctgtggactggttgtccagctgggggtaacttgaaaccagccccggtggagtattcacaccacgcgcatgtgcaaaacacgcaccccaggcttcccctcactaggtccggctgctaaacactgcgccagcgcaccataggtgcaggactcagagcggcctgggagaggccggccctccaagggcgggagggcaggtggggtctgggccccgggtgggaaggctggcagcaggatgtaccctgcctgtgtcagtcactgctcccccaagaggacttgggagctaagcagggaggtggcctggcctccagtcctgctgcatccccaagcctcagcccctcgcagcttgtgaggacgttaggcagacaagcgagcgttcagggtctctagtgtgaaaacaagacatcgtatttgttagtacaaagggtgactgtggtcaagaataattgtacattttaaaacaactccaagagtataactggattgtttgtaacacgaaggacaaaatgcctgagctgatggataccccatttaccttgatgtgattattatccatggcatgcctgtatcaaaacatcccatgtagcccgtaaatatacacctactatgtatccacaagaattaaaaaaataaaaaagggtctctagtagcaggcctggcagagtttgggctgacagagcaaatggggcaattaaaccacgaggcctcgatttgggaactaaaggattaggcttcttgatttgggagagatctggatgaaaagaagtgaacgtcgggttttaaggccgagaacggacggtcagtcccgggcagcttcagcaaatcccgcatttaggaataaatttcttaactaccgaacggccagtcaaattggccagaccagacttctgcctccaggggtcttcagcgcccaccgcccgaccccacccctcggcagacagtgagaggcgggcctctggccggagcgaagaggaacacgcaaggcggcgcagcgggaggggtccgcggaagccccgcccacctgcccctcccaccccgaagctcgcccggccccgccccctgccccgccccgtcacaaggccccgctgcgtcttccgagccgcaggcgcaggcccagctgagcggccgccgagcgggtgcgggtgcgggcgcatcggccatcaccgcgcggccgcgcagcggacaccgtgcgtaccggcctgcggcgcccggccaccggtgagtccccggcccgagcccaggagcgcctctgacccgctgcgccgcgcggcctgcc

SEQ ID NO: 41293 - DNA, 2300 bp, Homo sapien
ctgacctcagatgatccacctgcctcagcctcccaaagtgctgggattactggtgccagccaccatacccagctattttatttttatttacttatttatttattttttgagacagagtcacactctgttacgcaggctggagtgcggtggcacgatctcagctcactgtaacctctgcctcccaggttcaagccattctcctgcctcagcccccccaatagctgggattacaggtgcacaccaccacgcccagctaatttttttttgtatttttagtagagacggggtttcaccgtgttagccaggatggtctccatctcctgaccttgtgatccacccgcctcggcctcccaaagtgctgggattacaggcgtaagccaccgcgcccagcaagcattttatttttcttaaaggtctctcaaattttgtgagcttctgcttctacaaaggtagaagttaccttctacaagggtaaatccatccctgctttttccacgttttctctaatggaactcatcacaggttatccattacgccgaccctggctgcagagggcctgccacaggcaccactcacaccacaagcagactggtacagtttcgggaatttctgtggactggttgtccagctgggggtaacttgaaaccagccccggtggagtattcacaccacgcgcatgtgcaaaacacgcaccccaggcttcccctcactaggtccggctgctaaacactgcgccagcgcaccataggtgcaggactcagagcggcctgggagaggccggccctccaagggcgggagggcaggtggggtctgggccccgggtgggaaggctggcagcaggatgtaccctgcctgtgtcagtcactgctcccccaagaggacttgggagctaagcagggaggtggcctggcctccagtcctgctgcatccccaagcctcagcccctcgcagcttgtgaggacgttaggcagacaagcgagcgttcagggtctctagtgtgaaaacaagacatcgtatttgttagtacaaagggtgactgtggtcaagaataattgtacattttaaaacaactccaagagtataactggattgtttgtaacacgaaggacaaaatgcctgagctgatggataccccatttaccttgatgtgattattatccatggcatgcctgtatcaaaacatcccatgtagcccgtaaatatacacctactatgtatccacaagaattaaaaaaataaaaaagggtctctagtagcaggcctggcagagtttgggctgacagagcaaatggggcaattaaaccacgaggcctcgatttgggaactaaaggattaggcttcttgatttgggagagatctggatgaaaagaagtgaacgtcgggttttaaggccgagaacggacggtcagtcccgggcagcttcagcaaatcccgcatttaggaataaatttcttaactaccgaacggccagtcaaattggccagaccagacttctgcctccaggggtcttcagcgcccaccgcccgaccccacccctcggcagacagtgagaggcgggcctctggccggagcgaagaggaacacgcaaggcggcgcagcgggaggggtccgcggaagccccgcccacctgcccctcccaccccgaagctcgcccggccccgccccctgccccgccccgtcacaaggccccgctgcgtcttccgagccgcaggcgcaggcccagctgagcggccgccgagcgggtgcgggtgcgggcgcatcggccatcaccgcgcggccgcgcagcggacaccgtgcgtaccggcctgcggcgcccggccaccggtgagtccccggcccgagcccaggagcgcctctgacccgctgcgccgcgcggcctgccgcccccgcccccgcccccacgcggatcttgcgcatccgagcgtggccgcctcgggtcagtaagttggtccggccggggcgcgcggcagctcgcggccagaggtggcggcggtggtgggggcggggagccgcggcggcctggagccggagggagggggcggcgcgctgcggcgactgctggacccgtgaccctgtgcgcccccggcccgcggagggcccatccgctctcggtgccagtgccacggccgcagcccctacccgcctcgccccacgcccgctttgttccccgcacgccccgtggtcgcttccatcccccacacacccccgcaccccgctgttcccggcgtaccccactggcaggcaccggcagccgatccaggcccgatccccccaccccggagccaggggccgttgggccc

SEQ ID NO: 41294 - DNA, 2300 bp, Homo sapien
taaacactgcgccagcgcaccataggtgcaggactcagagcggcctgggagaggccggccctccaagggcgggagggcaggtggggtctgggccccgggtgggaaggctggcagcaggatgtaccctgcctgtgtcagtcactgctcccccaagaggacttgggagctaagcagggaggtggcctggcctccagtcctgctgcatccccaagcctcagcccctcgcagcttgtgaggacgttaggcagacaagcgagcgttcagggtctctagtgtgaaaacaagacatcgtatttgttagtacaaagggtgactgtggtcaagaataattgtacattttaaaacaactccaagagtataactggattgtttgtaacacgaaggacaaaatgcctgagctgatggataccccatttaccttgatgtgattattatccatggcatgcctgtatcaaaacatcccatgtagcccgtaaatatacacctactatgtatccacaagaattaaaaaaataaaaaagggtctctagtagcaggcctggcagagtttgggctgacagagcaaatggggcaattaaaccacgaggcctcgatttgggaactaaaggattaggcttcttgatttgggagagatctggatgaaaagaagtgaacgtcgggttttaaggccgagaacggacggtcagtcccgggcagcttcagcaaatcccgcatttaggaataaatttcttaactaccgaacggccagtcaaattggccagaccagacttctgcctccaggggtcttcagcgcccaccgcccgaccccacccctcggcagacagtgagaggcgggcctctggccggagcgaagaggaacacgcaaggcggcgcagcgggaggggtccgcggaagccccgcccacctgcccctcccaccccgaagctcgcccggccccgccccctgccccgccccgtcacaaggccccgctgcgtcttccgagccgcaggcgcaggcccagctgagcggccgccgagcgggtgcgggtgcgggcgcatcggccatcaccgcgcggccgcgcagcggacaccgtgcgtaccggcctgcggcgcccggccaccggtgagtccccggcccgagcccaggagcgcctctgacccgctgcgccgcgcggcctgccgcccccgcccccgcccccacgcggatcttgcgcatccgagcgtggccgcctcgggtcagtaagttggtccggccggggcgcgcggcagctcgcggccagaggtggcggcggtggtgggggcggggagccgcggcggcctggagccggagggagggggcggcgcgctgcggcgactgctggacccgtgaccctgtgcgcccccggcccgcggagggcccatccgctctcggtgccagtgccacggccgcagcccctacccgcctcgccccacgcccgctttgttccccgcacgccccgtggtcgcttccatcccccacacacccccgcaccccgctgttcccggcgtaccccactggcaggcaccggcagccgatccaggcccgatccccccaccccggagccaggggccgttgggccctgttgttgggctcgcgggggtgggggggctcgggcctttgttggtcacagatggcccggggatttcctgggatagaaatagccgccggctccggccccttaaagctgcttaaggggcgggatgcggaggggagggtccgggcacaccccacacgtccccggccgagaccccagcctccgcgctgagctcccacccgggagacgccggcagcggcgcaggcctccggttgcttgtgagaaacgacccaagccccaaatcccgaggctggcggtcgtcccctcgcccggcccctcccccaccctaaaggcggcctagagccctgggaaggccccacggcgccgcccgtccggtcctcacgcgcttctccgggcccaggctccggggctccccacagcccggggcaaaggtcacggtcttcccttgcttccccctgggttcccagaagcaggtggagttgcgcagggctgggtcccgacgctgtcgtcaagccaactgttccactgttccttgtctgtcttctctaggggcggaccgcggaacccgaggccatgtcccatgaaaagagttttttggtgtctggggacaactatcctccccccaaccctggatatccgggggggccccagccacccatgcccccctatgctcagcctccctaccctggggccccttacccacagccccctttccagccctccccctacggtcagccagggtaccccc

SEQ ID NO: 41295 - DNA, 2300 bp, Homo sapien
caaggttccaggggtgctttcgccggaagtccccacaacagctgaggacgatgagagagatgaagaagacagcataggagacatagtaggtccagacattctcccggacaaagcccttcacctccgcaacaaaagtgaacacagacaccgtggacagggtcaccgacagctgcaaggtcagcactaggaacacctggggaaggagccgctcagagtcatccgctgggagccacagcccccaccgccttggagatgcccctacccaccttgcggatgaaggcctgtcggatgctcttgtcatcccagttggtggcagggaagtcctggttgtcatagtaggatgggggaccctcctcctggtagtttccatgctggggtgctgagaagcagacaggctgggtcagcgccactcacaagcacctccccctgccctcccggccaccccacccctcccttcctgagactcacagtcagggtcttgtcctgggaagacctgtggctgtccataggggttgggggggaaggggctctggggatatggcccctgggggtagcccccttgggggtaggggccctgtgggtagccctcttgtgggtaggggccctgtgggtagcccccttgggggtagggaccctgtgggtagcccccttgggggtaggggctggggccatgggggtaccctggctgaccgtagggggagggctggaaagggggctgtgggtaaggggccccagggtagggaggctgagcataggggggcatgggtggctggggcccccccggatatccagggttggggggaggatagttgtccccagacaccaaaaaactcttttcatgggacatggcctcgggttccgcggtccgcccctagagaagacagacaaggaacagtggaacagttggcttgacgacagcgtcgggacccagccctgcgcaactccacctgcttctgggaacccagggggaagcaagggaagaccgtgacctttgccccgggctgtggggagccccggagcctgggcccggagaagcgcgtgaggaccggacgggcggcgccgtggggccttcccagggctctaggccgcctttagggtgggggaggggccgggcgaggggacgaccgccagcctcgggatttggggcttgggtcgtttctcacaagcaaccggaggcctgcgccgctgccggcgtctcccgggtgggagctcagcgcggaggctggggtctcggccggggacgtgtggggtgtgcccggaccctcccctccgcatcccgccccttaagcagctttaaggggccggagccggcggctatttctatcccaggaaatccccgggccatctgtgaccaacaaaggcccgagcccccccacccccgcgagcccaacaacagggcccaacggcccctggctccggggtggggggatcgggcctggatcggctgccggtgcctgccagtggggtacgccgggaacagcggggtgcgggggtgtgtgggggatggaagcgaccacggggcgtgcggggaacaaagcgggcgtggggcgaggcgggtaggggctgcggccgtggcactggcaccgagagcggatgggccctccgcgggccgggggcgcacagggtcacgggtccagcagtcgccgcagcgcgccgccccctccctccggctccaggccgccgcggctccccgcccccaccaccgccgccacctctggccgcgagctgccgcgcgccccggccggaccaacttactgacccgaggcggccacgctcggatgcgcaagatccgcgtgggggcgggggcgggggcggcaggccgcgcggcgcagcgggtcagaggcgctcctgggctcgggccggggactcaccggtggccgggcgccgcaggccggtacgcacggtgtccgctgcgcggccgcgcggtgatggccgatgcgcccgcacccgcacccgctcggcggccgctcagctgggcctgcgcctgcggctcggaagacgcagcggggccttgtgacggggcggggcagggggcggggccgggcgagcttcggggtgggaggggcaggtgggcggggcttccgcggacccctcccgctgcgccgccttgcgtgttcctcttcgctccggccagaggcccgcctctcactgtctgccgaggggtggggtcgggcggtgggcgctgaagacccctggaggcagaagtctggtctggccaatttgactggccgttcggtagttaagaaatttattcctaaatgcgggatttgctgaagctgcccgggactgaccgtccgttc

SEQ ID NO: 41296 - DNA, 2300 bp, Homo sapien
ataatgcctgccacagttggtggccaacatatgttttcggatgaaagaacactggcatatgcaaagagaaacagagatggtgcatcagccggagttcttttatattaggagatttattttaagggcttggtcacataattgtggaggctggcaagtccaaaatctgtaaggcaggctggcaactcaggtaggaattctatgctacaatcttcaggcagaattccttattttccagaaaacttcaggtttttttcactcttaagttcttctgccaggcacagtagctcacacctgtaatcccagcactttgggaggctgaggcagaaggattgcttgagcccaagagtttgaggcctgcctgggcaatgtggtaagaccccatgtctacaaaaaaaaatgtttttaataaaaattagccgagtgtggtggcacacacctgtagtctcagctacttgggaggctgaggcagcaggatcgcttgagcatgggaggtcgaggcagcagtgaactatgatggtgacactgcattgcagcctgggcaacagactgagaccttgcctcaaaaaaataaataaataaataaacaaatttaaaaattaaaaaaataaatttttaaaaagttgttcaactgaatggatgaggcccacccaaataactgaaggtaatctcctttaaagtcaacatcttgtagctattaatcacgtctattagacgtctaatagacgtgattaatagctacaagtatataatagcttcacagcactatctaggctagattttgaccaaacacctggacactatagcctcacaaaattgacacataaaatgtaaccatcactgactgcatcaacccaagaggctaacagtgaaataagaccatgacaagctaattttcacatgttgaaggaaagcccaacagagacactctataaagttagaggggtgactgaagagacctcaactctggttcttgggggctctggtccctggggccagagtgactgagccaggattacagtctgaagcattagaggaggggtgggggtaggccccccattgtgaggtccaggcagaatgctcaactcacagcgatcccagccctggctgaccttcttccccttcctcattcccacattctaccaggagtctgtcctctggcctgtacctggacttcgctatcctctccctgccccaaaaagaggtttgagggagaacagccacagagccaatggaggccacgaggacacggcctcactcagtactcaaggtcagtaccatagagttatctgtagatagctctaagagaaggggagcatcatgaggactgagtcctgagttcttagaaccaggtgagggatgcagtcttgggctcctgaaggactaaagtcaggaaaattcaaggagctggggaatagagatccaagtgcggagaaggcaacgacgggagatttggaatagggaacgctgagtcaccagaaatggaaactccaagttatagagagctcctggaccagcagtaagatagagactctgagcacctgggtcagaagaaatcatgggcgagtgtccaggccttcaagacacagcaaccaggagaaggctgagaggccaaacccaggcatgttcaagatcaccaagaaggggcatcctggccaggaaggtggagtggtgggttttcattcaacaaatatttactgtttacctacaaacattgtgccaagccctgtgctggacactggggtttccaggaacgtgttacaatccctgacctcactgtaaagccagtggacaatgttaaggagctagcacggaactggaaccaggggaagtgctatgacacaggacacatctgctggggaaacccagcgggcagcaattaacttgcggtgggggagaggaagtttcacggaagaggcaccatgagggtgaagttggcgagacagagaaaaggtcaggacattccaggccgaggcaaggcctgtgtacaggcctggtggcatggagagctgagggtgttagagcagagagggcaaggaagagggcacagcctctgacctcacaatacccagggcccactgggccagccttgcagactctgcaccctccttcagcccaggcaaggcctggggccctgggcagcctccaggtgcagtgccctcccgtgggccgcacccttgccactgccccagggcatgtctctactcaccaattatgaagggcttcggcatcagatagagaggctggtgcgggaaaatgaggaactgaagaagttggtgcggctcattcgggagaatcacgag

SEQ ID NO: 41297 - DNA, 2300 bp, Homo sapien
atcggctttgacatgggaggtatgagggccgagggctggggtctcggggaggctcagctgctgggcccctgggtcttcaagtgacccaccagcaccccacccctgccaggcacgtccacggatgtgagccgctatgctggggaattcgagcacgtcttcgaggccagcacagctggcgtcaccctccaggccccgcagctggacatcaacaccgtggcagcgggagggggttcccgcctcttcttcaggtcagctctcctgcttcccaggctgggaccccagccctgtctccctcctcgtgtccaactccaaccccagcccttccttcccctaggtctggcctctttgtggttgggcccgagtcagcaggagcccacccaggacccgcctgctaccgcaaaggtaagagtcaggatctggccggcctggccttgccctccgcttgccgccgcaggcccagcccctcctgtcagccctatccctgctgcctactcctgctcccctgcctccagcccccaagccccacaccctgtccacctcccagggggccctgtgacagtgacggatgctaatctggtcctgggtcgcctgctgcctgcctccttcccctgcatttttgggccgggagagaaccaaccactttcccctgaggcctcccgcaaagccctggaggctgtggccactgaggtcaacagcttcctgaccaacgggccctgcccggcctccccgctgagcctggaggaggtggccatggggttcgtgcgcgtggccaacgaggccatgtgccggcccatccgtgcactcacgcaggtacgtccacctctgctctcccgcctgtcctgcccccagccctgctccctgccccaggcctcctgctcaggctgggggctggatggggtagagtaggagagcccactgaccccttctgtctccctaggcaagaggccatgacccctcagcccatgtgctggcctgctttgggggagctggtgggcagcatgcatgtgccatcgcccgggccctgggcatggacacggtgcacatccacaggtgggcctgggtgtgggtgcacggaggtggtgtgatctgcgccgggcttgggaggtgacctcccattgccatgctgcccatccctgcaggcacagtgggctgctgtcggccctggggctggccctggctgacgtggtgcatgaggcacaggaaccctgctccctgctctacgcgcctgagaccttcgtgcagctggaccagaggctgagccgcctggaggagcagtgtgtggatgctctgcaggcccagggcttccccaggtgggctcccagggtgccctggacagagggcttacgttgtcctcaccacgcccttggtgggtgttcctcctgatgacttcccaggtggtcccggggtgtgcgagaagcagaacaggtgtccttgccgggcgctgggtggggtggggtcagggcagggggtttggtgtgagtgcccccaaccacctgctgcaggtcccagatcagcactgagagcttcctgcacctgcgctaccagggcacggactgtgctctgatggtgtctgcccaccagcacccagccacagcccgctcgccccgtgcgggggacttcggggcagcctttgtggagcggtacgtggcttcctgactccggatccctggcaaggggccctcctgtctggccgcctcactctgaccactccttgggtccccgcggggagtgcaggtacatgagggagtttggctttgtcatacctgagcggccggtggtcgtggacgatgtgcgagtgcggggcaccggccgcagtggtcttcgcctcgaggatgcccccaaagcccagaccgggcctccccgggtggacaaggttggtggtcctgcctgtgccagcctgacagcacccatggggcaccgggatggggaccaagccctgtgagaggcatcggggagggtgctgggcccgggcgctgtactcacccgcaccctctgcagatgacccagtgctactttgaggggggctaccaggagacccctgtgtacctgctggcagagctgggctatgggcacaagctccatgggccctgcctcatcatcgacagtaacaggtgggctgaagtccggccagggtggaggatgtggacgggtccactgcggggcccctggtgcagggttctctggcccaaggctgcaggggcctgcaggactctgtatcccaccatcgttggggtggcccctggcctggggccgtggcatctctggttggaggggtgtcgcctggccccatgcagccctct

SEQ ID NO: 41298 - DNA, 2300 bp, Homo sapien
cgccaggtggggcctgcgccgggcggcctcccctccgcggcccttccccgctgcctcccgggcttcccctccgcggccccttccccgctgcctcccgggccgctcctcacgcgtccccgcctcgggtcgccccgtcggtgctcaggctccgtcctgtcccggggcccgccaggcttgggtcgaaggtcgagcaaagcgggaagtggggtcccccggccagctcgccccaaaccccctccccgcactcccgtgcctctttcgtgctgagggaccccgcccgagggctccagggtccagcggcgtccccacctcccgtgcctgctccgctgcctgggtttcggcccagtccagggcccggagaagcgcgatgctgggcatgggggcatcaggccgctgaccgccggccaggctctcgctcgggcccaggctgccctcggagctgggcctgcggctctggctcttcccagagtcgtgcccgtgggtctctccctcaggaaccccccgcatgcgcagggctggggagcctctagtcccactcgcaggtgagcccgggctgaccccgcctccgtccagtttttccagggctaccagctgaagagctcctgtgggactccagccccaccaccatgggcagccccgagggccgcttccactttgccatcgaccgtgggggtaccttcacagacgtctttgcccagtgcccaggggggcacgtgcgggtcttaaaactgctctcagaggaccctgccaactatgcggacgcgccaaccgaaggcatccgccgcatcctggagcaggtgggccagggcggagcgggtggacagggaccccacggccagaagccccacactgaccacgtggtccccaggaggccggcatgctcctgccccgggaccagccgctggactccagtcatatcgccagcatccgcatgggcaccacagtggccaccaacgcactgctggagcggaagggggagcgggtggcgctgctggtgacacgtggcttccgagacctgctgcacattggcacccaagcccgtggggacctctttgacctggtgagctccatgttggctggggaccaggctgtgtggtgtacaccccccagggatgccttgaccctgtggggagagcagttgttggattagtgatggctcatgggcaccagccgacaaagaggaagctcccgaattcccagtgggaccccaagttctcctagccctcggagtgggcacaggatgccctgttcctgcctgccgccatgcccaccctggatgctggtgtggggccacccaagctaccctgttcaggcagaggaggggtggaaccccgcacctactgctgcgtttccggaagaagctgccttcgtgggggtggagcagttggctgcactcagctgcctagggggtggagagctgcccccttggtgagccttgctggggctgccaggtatgactctcctgggcctgccgaccggcctgttgggacacagccactcacctgtaccacccactcacacaggaccccggcctggaccctcaggcctgggcctcttctgagtctctgcccgcccccaggccgtgcccatgcctgaggtgctgtatgaagaggtgctggaggtggacgaacgcgtggtgctgcaccgtggagaggcgggcaccgggacgcctgtgaaaggtgtgtgtgccgccgctgctgtgggatttggggccggagggtcctgctggcctttaacggggcctcctgggcttttctggaaggccgcacgggggacctgctggaagtgcagcagcctgtggacctgggggccctgcgtgggaagctggaggggctgctatctcgaggcatccgcagcctggctgtggtgctcatgcactcgtacacgtgagtgaggtggggctgtgggctgcgggagcaggtgccgggcctggtgggagacgaggtgccactgggtttttgtcataggtgggcccagcatgagcagcaggtgggtgtgctggcccgggagctgggcttcacgcacgtgtcactgtcctcggaggccatgcccatggtgcgcatcgtccctcgggggcacacggcctgtgccgacgcctacctcacgcccgccatccagcgctacgtgcagggcttctgccgtggcttccagggccaactcaaggtgaggctgtgaggcacccccactgcccactcctgggcctgggcctgggccttggcctgcccctcatggcccgcctgctgcccgctcgcaggatgtgcaggtgttgttcatgcgctccgatggcggcctggcgccca

SEQ ID NO: 41299 - DNA, 2300 bp, Homo sapien
gagtgcctaaagtgaaagcacgtttattaagaaagtagaggaataaagaatggttaccccatagacagagcaccccgagggctgctggttgcccatttttttttttttttttttgagacggagtctcactctgtcgccaggctggagtgcagtggtgcgatctcatctcactgcaagctccgcctcctgggttcaagcgattctcctgcctcagcctcccaagtagctgggactacaagtgcgtgccaccacgcccagctaatttttgtatttttagtagagacagattttaccatgttggccaggatggtcttgatctcttgacctcatgatccacacgcctcggtctcccaaagtgctgggattacaggcgtgagccaccgtgccaggccggttgcccatttttatggttatttctgatgatatgctaaacgaggggtggattattaatgcctcccctttctagaccatatagggtaacttcgtgccgttgctgtggccctggtaaaccgccatggcgctgcggggagtgtaggacgatggttttggtaggtttggccaacttctttactgcaacctgttttatcagatacagggtttttttttttcttttttttgagacggagtctcgctctgtcgcctgggctggagtgcagtgacacgatctctgctcactgcagcctccgcctcccgggttccagcgattctcctgcctcagcctcccggtagctgagattacaggcgcgtgccacatgcctgactaatttttgtatttttagtagcgagggggtttcaaccgtgttggccgggctgggagatacaggtttttatgacctgtgtgttgtgctgacctcctatctcatcctgtgacttagaatgcattaatcgtccgggagtgcagcccagtaggtttcggcctctttttagccagctcctattcaagatggagttgctctggttcacacgcctctggcacaaggagggctggagatgagggagacccggtgaagaaggccagagataccgcacaggagaggcccacggggccgggagctggggctggtagagaaggccgcagggcctcccctctcctctctgtccttcaacgccccctccacggggaaggacgtccgccagtgggaagccctgttgtggcctgggctgccagctccccttgcccaggacacctggaggtgggatcctggggcgcccacgctaggcgagcccaggcccggcgccggagacccgagggccgcagagccaaggtgcccttgatcctgcgcccgtggcccggggaagcgcagggcgaggacggaggcgcggggggcgggcccggcctgatgtaaccgcgagtgccgggaccagtggcgcggggggcgggccctgtaggctcctccccgaggcgaggctggtgcgggcagggccgccgggagcgcaggcagagccgaccgcgagcgaccgagccggagccgagcgccaggtggggcctgcgccgggcggcctcccctccgcggcccttccccgctgcctcccgggcttcccctccgcggccccttccccgctgcctcccgggccgctcctcacgcgtccccgcctcgggtcgccccgtcggtgctcaggctccgtcctgtcccggggcccgccaggcttgggtcgaaggtcgagcaaagcgggaagtggggtcccccggccagctcgccccaaaccccctccccgcactcccgtgcctctttcgtgctgagggaccccgcccgagggctccagggtccagcggcgtccccacctcccgtgcctgctccgctgcctgggtttcggcccagtccagggcccggagaagcgcgatgctgggcatgggggcatcaggccgctgaccgccggccaggctctcgctcgggcccaggctgccctcggagctgggcctgcggctctggctcttcccagagtcgtgcccgtgggtctctccctcaggaaccccccgcatgcgcagggctggggagcctctagtcccactcgcaggtgagcccgggctgaccccgcctccgtccagtttttccagggctaccagctgaagagctcctgtgggactccagccccaccaccatgggcagccccgagggccgcttccactttgccatcgaccgtgggggtaccttcacagacgtctttgcccagtgcccaggggggcacgtgcgggtcttaaaactgctctcagaggaccctgccaactatgcggacgcgccaaccgaaggcatccgccgcatcctggagcaggtgggccagggcggagcgggtggacaggg

SEQ ID NO: 41300 - DNA, 2300 bp, Homo sapien
tgaggtaggagtggccccataatcctaaacctgtaatgctgccaggttggaggcctggttcctgaagatgaatacttccaccagggaacacagcaaaggttccactgatcttgaagtagcggctatcactggcccactttggacaccttaggctgaagaccaacatcgtcctcattgtcctgagttgctacggtcaatgctacacaactggggtgggcagtccacagagctccctgggcgtctagtcttcccgcatgcggcaaggactgtcagtggacaacccagtaatggccatgcgtggtggcgggaggccgaggcaggtggatcacctgaggtcaggagttcaagatcagcctggtcaacatggtgaaaccccatctctactaaaactacaaaaaaaaagttagcagggcatggtggtgcatgcctgtaatcccagctacctgggaggctgaggtaggagaatcgtttgaacccaggaggtggaggttgcagtgagctgagattgtgccactgcactccagcctgggtgacagtgagactccatctccaaaaaaaaaaaaaaaaccttagccaggcatagtggcaggtgcctgtaatcccaccttcccagctacttgggaggctgagatagaagaatcacttgaaccctggaggtggagggtgcagtgcgctgacattgtgccacggcactctagcctgggtgcagagtaagactccatctcaaaaaacaaaacaaaacaaagaaacaaacgaaaaaaacgatgactcagtaagaacagggacagtaagagctcagactgaaaggggaaaagggctccacaataagcagagtggctgtagagcagagggtggggaatccggggtggcaagtggcagagggtggtgacccatcatggcctcagaccagctgcagcagcagggttgtggcttgctcactcactctcatgcctcagtctttcaggagagcttaaccaccttggaggggatgctgtgacaactgaacttgggcccctgcagcagaccacatttccctagcccgcctgctcttcctacagtctaatattgacactcctcccactgaagggtggggtccctgtcctcatcccttaagcctgggcagatctgtctgactgccttgacccacagagtgtggcaggagggacactatgtgacttctgaggttaggtcctaaaaataccatgcacatgttgtccaccttgttgtcctggaaggctacccttggaacccagttgccatactgcaaggaagccctggttgcatggagaagccacatgtaggtgtgctgcctgacaggcacagatgaggtcctggcccgccaccagcatcagccaccaaagatgtgagggagaaagctttaggatggctgcagccccagctaccatctggcagcaactgtaggagagatcctaagtgcaaactatctagctgagcctagataaccccagattgcagcacataataatagaatgatttttattatttgaagccgctgaggttaagtggcaagagataaacagacatacaacccctctctggaaaggatgaggaaatctgcatcctcaaagggaaaagggaggcccacctgactgcagtgtggaagctcggtgtaaagggagggcatgagaggactggagaggtgccaggtgtggaccatcctgggacaccagcctggtcactttcctaggaccgctcaatgccttctcctgtcagtgtcgcaccccactgggttcatccttccactttcacacttggggcgcggggaagggctgaatgcaggcaccactggtcacgagggcgtgactgggcaattcctccttcggcgggcgcccacctcctggcacccgtggcacagctccgggaacggctgcgggcccagccgctgcttccccgatagcgccgccgcagttccccggagacagaagtagagccggaccgccggaaaccgtagatccggggaggtcggggccgcggtgaactccagttcaccaggacaggaagtgacagcggaacgccggaaaccgcagatccacggaggtcagggccgcggagagctgtagttccccggaaccggaagtgatggcggacctccggaaaccgtagattccgggcggtcggagccgccgggagctgtagttctcccgcggctcagagaagtaggcagagagcggacctggcggccgggcagcatggcggggctggagctcttgtcggaccagggctaccgggtggacgggcggcgcgccggggagctgcgcaagatccaggcgcggatgggc

SEQ ID NO: 41301 - DNA, 2300 bp, Homo sapien
gctgcccgagatgtgcacaccctcttagatcgagtggtccggcagcatgtgcgtgaggcctctatcttgctgggggactgaccacccagccacccatgtccagaataaaaccctcctctgcccacacacccctcactgtacgttatcacctaacagcacttcagagccatgtgaaggctggcagagcctggtctggtgctggctcctggggatgattagggaccctcgcccacacatgaacggcctatctctgtgtagcctgattcaaaccctgaagagaacagtggattagggggtttctgtaggggaggccctgggtggaaaaagcagcatgtcccagtaaggactcaaggcagctgagcaggaggcagggcctggcaagatgagccaggccattagactgaggaatctgttacccttattccagcacatcgggggccctgagcaaagggctgaggaagaactcagctggctctgggtacccaccctagggatgtgggggccatgtcccacaacctctggactatggtttggagccccctgggcttttcctgctgcttaccttgggctctgaaagtacaacagccaggcatggtggctcacgcctgtaatcccagagctttgggaggctgaggcaggcggattgcttcaggtcaggagtttgagaccagcctggccaacatggcgaaaccccgtctctactaaaaatacaaaattagctgggagtggtggcacatgcctgtaatccaagctactcaggaggctgagacaggagaatctcttgaacctgggaggcggaggttgcagtgagccgagattgtgccactgcactccagcctgggcgacagagcaagactccatctaaaaaaaaataaaagtacaaaaattacctgttctcatggatcacttgaggtcaggagttcgagaccagcctggccaatgtggtaaaaccccatctctattaaagacacaaaaattagtgtggtggcaggcacctgtaatcccagctactagggaggctggggcaggagaatcacttgaaccaggagttgaaggttgcagtgagccaagattacaccactgcactccagcctgggtgacagagcaagactctgtctcaaaaaaaaaacaaaaaaaaacttgttctcacatggagtcttcagctttgacccttctctctgcccaccactattttgtttgttgagacatggtcttgctctgtgctcaggctggagtgcagtggtgtgatcacggctcactgcagtctggatctcccaggctcaagtgatcctcccactttagcctcctgagctgagactacaggcatgccccactcacctggctaatttaaaaggaatttttttgtgtgtacagactgggtctcatttcgttgtccaggctgatctcaaaggatccacccacctcaccttcccaaagtgcaccctcttgagcaaactcccccttcattcacctctggcccaccgagccccgactaccagtccctgcagtctggaccctgggactgcttctcccctaatattccacggatctcctggcccggacagtgacagtatgatcccccactttataatgcacacaccccagctccagtgaagcccgttttggccagtagtgccatcagcatcttctctgcagtcatctgactctgaaaacctcggtgctgggctcacgctgtgactccactgggacgtcctgagtcattggcagtctcgcttggcatccattctctgaccgccgccggctttccacccacctgcccggctcatcacctctgactcctgcgggccttccagccggcgctatctcgcagcccccgaccagctcggcctgctgtcgggcatctctgctgtcctccggctgtagggctacctgcctccctcccggggggtgcactgcgagtccgactctagtgggggcagcgcctagcggactcccaaacccgctcaggtcctgccggcctcaccggcaccgcccaccctccagccggccgcggctctgcgcttgcgcgccggcagcacacagtgttaggggcgcgccctctgctctggacatgcgcgccgtcgcgagcgtctctgggaccggaagtgcgggcgagcgcgggtccccgggtctgacaggagcagcctgtgggcaccgcggcggtagttggaggcgggagagggtccgtagccgcgccgccctgccccgccatgggcctcctgtcggacccggttcgccggcgcgcgctcgcccgcctagtgctgcgcctcaacgcgccgttgtggtgaggacagggcccg

SEQ ID NO: 41302 - DNA, 2300 bp, Homo sapien
tgggttcaagcgcttctcctgcctcagcctctggagtagctgggattacaagcatgcgccaccacacctggctaattttgtatttttagtagagatggtgtgtagaaagtaaaaagtttcctcttcaaagtttcccttcttgttaaagaataaatcgtaagtgttagaaataatagtttcttttacagactaacttccttcaagcctccttgttttgtgctaataattcttttcttttctttttttattatactttaagttctagggtacatgtgcataatgtgcaggtttgttacagatgtatacatgtgccatggtgtgctgcacccattaactcgtcatttacattaggtatatctcctaatgctatccctcccctctcccccaccccacaacaggccccggtgtgtgatgttccccttcccgtgtccaagtgttctcattgttcaattcccacctatgagtgagaacatgtggtgtttggttttgctaataattctttaagctctatcttatgtagctgttaaacatgctcacaggcaggtagtacattctatgtccttgtaccttaaccaaaatatttgtgctggacgtgctcacaggcacgttccagctcacagcctgtgccccttccctatttggcataagcaacttcctcttttcctctgttctcccttgcctttatctatttagaaaagttttaaattattagccagtcgacttttagtttagattgtgccatctggctctagccaatggagacaggacacagtagcagggacaagctgtgtaagggataaaaatagcttctctcctttattcaggtgtgctctcaccatttttccatctgtgaggagcaccctctctgcagaaagtaaaattgacttgctgagagaactttttgtcggaatgctgatctttccttatggtaccagggaacaagcgttctgtttctaaataaacattttacatataacacagggtttctccatgttggtcaggctggtctcaaactcacgacctcaagtgatctggggcctcccaaagtgctgggattacaggcgtgagccaccgcacccagcctagtttttaaattttatttgcttttttttttttcttgagagggagtcttccgtctgtcatccaggctggagtgcagtggcacgatctctactcactgcaacctccgcctcccgggttcaagcgattctcctgcctcagcctcccagagtagctgggactacaggcgcgcgccaccacgcctggctaatttttgtattttcagtagagacaaggtttcaccatgctgaccaggatggtctccatcttttgacctcgtgatctgcccgccccaccctcccaaagtgctgggattacagcgtgagccaccgcgcccggcctttgcttactttttaaatattttacaataaaaatattctcacataacaagatcatatttacttacttttttgagacgaggtctcgctcgatatcgcccaggctggagtgcagtggcgatctcggctcaccgcagtctccacctccggggctcaagcgatcctcccgcctcagcttcccaaagcgctaggacccaaggcgcgcatcacgcgtcgggccatgagtcaagggaatgaaggagaacagggtgctcagcctgggggcccagcctcccgctgtcacgcgctgcctgcggccgagacccctgcccgcgccctctgccgggctgccctccaagccgccctttctctggaggtcctcagcctgcaggggcaccctccacccggccatcgcgcagcctgggaaggtggagaaaaggagcgtcggggtctcggaggcggcgtgggaaacgccgggcggagcgtggcgctgtcacggcaacagagagacgcgacggggccccgccccaccgccagtttccacgacaacccgaagagcgtggggaggcaggcggtgccccggcccctgactgacgcgaccgggaccagcgcgcttcgtccccgcccacccgacaggccccgcccccgagcccggccccgccccgcgctccccggctttcgcgaggttttgactctcgtggcgccccaggggccgacgggagtggcggccgcgcggaggaggccaagatggcggcagctgcggcttcgcttcgcggggtagtgttgggcccgcggggcgcggggctcccgggcgcgcgtgcccggggtctgctgtgcagcgcgcgtcccgggcagctcccgctacggacacctcaggtgagcgctgggccgggccccggcctccgcgcggccccgcatctccgt

SEQ ID NO: 41303 - DNA, 2300 bp, Homo sapien
cagcctaagtagctgttattggcatgagccactgcccctggctcacatggctgcttaaatggaagagttagcagttgagactgagaaacatgaaggactaggtagtatggggctcccagatagagggcagcccacaaacgagataagcagagctgccagaggggtaggaagacagccagacagtgatgtaagagagactcaagcaactcagggtttataaaaggagctaagctctctttagtcattcaccaagcatatgtattcagcagctgccctgtcccaggtactcctttggcatgaacaaaacctcccatccccatcctattggagcttgcatttttagaggggaggaggcagacatataaaataagtacagggctgggcaacatacaaaaaatttaaaaattagctgagtgggccgggcacggtggctcacacctgtaatcacagcactttgggaggccgatgtgggcagatcatgaggttaagagatcgagaccatcctggctaacacggtgaaaccctgactactaaaaaaaaaaaaaaaaaaaaaaaattagctgggtgtggtggtggggacctatagtcccagctactcgggaggctgaggcaggagaagggcgtgaacccaggaggtggagcttgcagtgagccgagattgcaccactgcactccagcctgggcaacagagcgagactccatctcacaaaaaaaaaaaaaaaaaaaaattagctgagtgtagtcgtgtctgcctgtaatcccagctattcgggaggttgagatgggaggatcacttgagcccaggggttctaggctgcagtgagctgtgatcgtgccactgcactccagcctgggtgacagagcgagatcctgtctccaaaaaaaaaaacaaaaataataaaattactgtagagttttttaaaaaagaaagtctgttagatggtgtgggaatgagaatggtggagctgggaggattgctgtttaaaacggtggcaggggccgggcgcggtggctcacgcctatcatcccagcactttgggaggccgaggtgggcagatcacctgaggtcgggagttcaagaccagtctgaccaacatggagaaatcccgtctctactaaaaatacaaaattagccgggcgtggtggtgcatgcctgtgatcccagctactcaggaggctgaggcaggagaatcgcctgaacccaggaggcggaggttgcggtgagccgagatcacaccactgcactccagcctgggcaacgagtgaaactccgtctcaaaaaaaaaaaaaagtggtggcagggaaggcctcattgaggtgacactggagtgaaatttgaaggtcatggcatgaaccatgtgaccaaggaagcagcaaacaaaccctgaggtgagcatgtataagtgatccttgaggttcagtgggggccggggccggggccggggccaggaacagcgctgggtgcgtggaaggccctgcttatcctagtagggagatggtagaatatagtgggcctgagaccacgggagctgtgtcagcactggatggggacccccccattgcagtgggctgggcctcacagggcgggtaagaaggtgagtcagcagggtgctcagctctgaagacgcccagggcagtggcttgtctggagtgctggcagcccaggtgtgggtcagggagcccggagaggggaggtccccaagggctccaagaggccaccctgactgcagggccactgagggcctgctttggttctgctgtgaggcatccctggctggcagaaagagccaagagaggtggcctagccaggcacaaaagggtttgaaaaggctctaattcccaaatatgaactaagtgcagctccagcactaacagaagtctggcaggggcctctgagggtcttgccagagccaaggctgggagaaggtgtggctagaagtgtggcctgaggcagggccctggcatggactgaggtgagggagaaggcaaaggtcctggaaaaccaagggcctagaggcctggacagaggccacagcacagcacacccatatcttacctctaggcagcaagagcaactcaccaccagccttgggcccagaagcatgccctgtctccctgcccagtcccccggaagcctccacactcaagggccctccacctgaggcagatcttcctaggagccctggaaacttgacggagagaggtacaggtggggggagggggttggggggttcggggatagcagatagtccccagtggtgacagctgtcctttccttaccctgcagaagagctggcagg

SEQ ID NO: 41304 - DNA, 2300 bp, Homo sapien
ccaggctggagtgcagtggcaagatctcagctcactgcaacctctgcctccgggttcaagtgattctcctgcctcagcctccccaagtagctgggactacaggcacacgccaccacgcctggctaatttttgtatttttagtagagacagggtttcaccttgctgaccaggctggtctcaaactcctgacatcaggtgatcacccacctcggcctcccaaagtgctggaattacaggcgtgagccaccccacccggccactaattccatcttctaagcatctctagaaacatccttctccccaaccctatctgcaccaacccttgccactgcagaactctgtcttaagcaggaggtatctgagtctgtcactctcccactcctgtcactctcctgctgctcttgggatgatgtcttctcacacaggtcctgaccctgcctgctctgcctcttcatgcttgcctctcatccttcctgagggttaaggaagtgcaggctgaggttccagggcttcctggtggaggctgcaacttgtgctggctggggcctcagatggtgtaggagactgactccagcagccactccaagtactccaagctactccaggctccacctactccctcctggaagccttcccagacatccagcagtggggaaggtggatccaacttccccaaccaggactggggggccaaggctattccaaattgtaattgtatccattacagggcactgaccattctgtccttccacggtggcacctcggactaggactgcccaccgctgagcttcctgagggttgaggaagtgcaggctgagggttccaggccctcctggtggaggctgtagctcgtgctgggtggggcctcggatggtgtaggaaactgactccaggggccactccaaattaacctgagaagagggagagtccaggctcagggcgtccccccgccctacatcgcacgaggagcaaagaaatacaaggtaacatttatagaccatttacacggtcctaagccctgtacgcctatcatcaaatcctcacaatagccctgtaaagtaggtccaggtaggtcccagtaggtccgagcgtcacccccatttcacggacgagaaaacagaagcaaagaaacataactgcttaagggcacccaggtggcaagcggaggggcctaactttgggctccgtgccctgcccgggccaagaggactgaccgcgcgccctccgcccccactcaccgccccaggtcccgcgcccagcagctccagccggaagcgcccaggccgctcagggtccgcgctcagctgcagcctccgcagctgtgcctcggcgtctggcccggcgcccagcggcctcaccgcggcgtgcacagccaagagcactgcggcggagcccaagtccgaggccgccgccgccgccccgcccgctggcggcgccatctccggtccggccgggtcccacccctccgagcgcgcttccgtgggatcgggccgctgagccccctccgccggtcggaaacacgggccgcgaacctggggttccgggcgcgcccagagcgtcgggcctgggacggcgccgagtggtgcactctggccaagcctgccccgctggctttgcccacaaatggacacggcccgagggtctccggacaccggctgggcgaggctggcggcgtgtacgaggctggggcagggcggccgaggcgctcacgttagagctggtctttgggggcgaagggtcagggggcgaagcaccggccacaactgaaggcggacgcggcctcttcgccccaggggctcggcggacgtagatgcatccagcgtgcgactatcccagcgcctaacggcagctggacttcgctcccgggacctccaatgggctgccaccttcgcccgcagaccccagcccccgccacgcccacacgtcgcactaggttggcccgcgcctcactggttacggggtcgacccccctagggggcggagctagagaggccacggccaatgaacgccgggggtaagcgggttagtacgacgagaagagtgacagacaggctccataaccagtagacgtagaaggcagaactgagtggcgggtacggcacccgatggctattcgagctctcgatctcggagactggagcgggccattcagaggcgcggggccgggcccggcggacgcttgttgttgtccggccgggggaggcggaggtcgctcgctcgctcgctcggctcgctgactcgccggagcgctctgtggcggtcggcggcaggtcggtcgcgagagcgggctctgtggaagg

SEQ ID NO: 41305 - DNA, 2300 bp, Homo sapien
gcaggtcacagtcagggtgacaggagcccagggctacccaaagtggggaaggacagtggggtggctgtgggtcccttccctccacctgaccctcacccagctaaggctgggctcccggctgaactcatggctgcgggctgtgctgaagtcatagtcaggcctgaaggactcattgagcgtggcaatcaggtagaagagggtcttgcggctgcacttgtcactgagggggccctcctcctcaccgccttggcttttgctgagtctgcacagacagaaccatcagctgggcccatcacctcccctcaacccccagccccaggtaggccccaccatggctcacctgctggggctcagtcctgaagtctggggtggagaaagtgcctccagcacgtggggctggccctcctggcagaactgcttgaacatgtgtttgtcgtctcctgccatcttacatgagtagctctcaatcctataggatgcagagagaaccatgaagcatgcttcccccaggttccactgaagggcgcggcagtgtgacctccgagatgccagcccccccagcctgcctcacctgccaatgatgtgggcatctccagtctccacagtcagctgtgagttgatggcttcaaagctcgagttctccaatagcttcatgtctttggggaaggagctccgtgctccagaggggctagtattgcctggggagtgagagaccagaccatgggtatctatctggccccttggggccctgccttcagccctcctacccactaagtggagccgctaggaacaagctgagtctggcctctgtccaggctgcacatcaggagctcccctctctgcccggccaggagaggtgacagagatcctgttttacctgagggtggtaagtccaggctccaggtcagccataccccctgcagaacacgcgagttctgggactagactagaccaccggggaccctgctcaccctggggctgctggctgagattgttgctcaacattcccattccccatctccacgcccactccaaaagagctccagccaccatgggggtaactcttgagtccgcaacgggacgtgactcctgcagtctccctcaggctggctgggctcctcagccaaggtaagaggctgcatcccggttaggaaccaggacacctgggactccgggccctgcggtcacctgggcgggcgctctttcgttttggctactttctggcccggggagaggaaaactacaggttcctccactctacccggaaaaattgcctagtttctccagacgcctaggagggcggtccctcggccccgctggggcgctgcagtcaccaggcagcgcccgcctgggccacgtcgggcaccagccaagccgcggtggaactacaaatcccaggaggcagcgcgccgcgcgaggcctgctgggggctgtggttccgggtacgcagacggcgcgggacgcagggcggacacccacctgcctggctgggttagatcaggccgcgccgggccgggtctggctgggctgggtcgctccgcgtcggtgccggtgcgcaggcgggggcgggctccgcgcagcgcgggctcttcaagatcggagggcggcgccgcggcctccgctcgggccgcactgtatccgggggaagaagctccgcggcgacgtcccgttactcccggccctgccggcccatccgggctgccaccgcgacatagcctcgcccccttccacagagcccgctctcgcgaccgacctgccgccgaccgccacagagcgctccggcgagtcagcgagccgagcgagcgagcgagcgacctccgcctcccccggccggacaacaacaagcgtccgccgggcccggccccgcgcctctgaatggcccgctccagtctccgagatcgagagctcgaatagccatcgggtgccgtacccgccactcagttctgccttctacgtctactggttatggagcctgtctgtcactcttctcgtcgtactaacccgcttacccccggcgttcattggccgtggcctctctagctccgccccctaggggggtcgaccccgtaaccagtgaggcgcgggccaacctagtgcgacgtgtgggcgtggcgggggctggggtctgcgggcgaaggtggcagcccattggaggtcccgggagcgaagtccagctgccgttaggcgctgggatagtcgcacgctggatgcatctacgtccgccgagcccctggggcgaagaggccgcgtccgccttcagttgtggccggtgcttcgccccctgacccttcgcccccaaa

SEQ ID NO: 41306 - DNA, 2300 bp, Homo sapien
ctctcactccccaggcaatactagcccctctggagcacggagctccttccccaaagacatgaagctattggagaactcgagctttgaagccatcaactcacagctgactgtggagactggagatgcccacatcattggcaggtgaggcaggctgggggggctggcatctcggaggtcacactgccgcgcccttcagtggaacctgggggaagcatgcttcatggttctctctgcatcctataggattgagagctactcatgtaagatggcaggagacgacaaacacatgttcaagcagttctgccaggagggccagccccacgtgctggaggcactttctccaccccagacttcaggactgagccccagcaggtgagccatggtggggcctacctggggctgggggttgaggggaggtgatgggcccagctgatggttctgtctgtgcagactcagcaaaagccaaggcggtgaggaggagggccccctcagtgacaagtgcagccgcaagaccctcttctacctgattgccacgctcaatgagtccttcaggcctgactatgacttcagcacagcccgcagccatgagttcagccgggagcccagccttagctgggtgagggtcaggtggagggaagggacccacagccaccccactgtccttccccactttgggtagccctgggctcctgtcaccctgactgtgacctgccctaggtggtgaatgcagtcaactgcagtctgttctcagctgtgcgggaggacttcaaggatctgaaaccacagctgtggaacgcggtggacgaggagatctgcctggctgaatgtgacatctacaggtgggccggcatccctgcagatggcctccaggcctccaggtttgtggggcacttggcgcctcacaccacctgtcaccctatactccccagctataacccagacttggactcagatcccttcggggaggatggtagcctctggtccttcaactacttcttctacaacaagcggctcaagcgaatcgtcttctttagctgccgttccatcaggtgggcaccccccgcctcctcccccacctccctgttgggccgatacaacttccccagctgtgccatctccacccagctttgccctccctgaacatcctccctggggccagcagcaggcctgggtaggggtcctgaaactggtttccctgcctcccctcagtggctccacctacacaccctcagaggcaggcaacgagctggacatggagctgggggaggaggaggtggaggaagaaagcagaagcgggggcagtggggccgaggagaccagcaccatggaggaggacaggtgtgtgatgggggccatgacccgggtccttgaagcctggagtgggtacaacagggtgggggcctcctctacttggtctaagtggtggctcctgaaggcccactgtgtgccaacctccgcccagggtcccagtgatctgtatttgatgaggaggagccgaggccccagcttcatccagcttcaaccaatgcctggacctgtccacctgagaggcccctggggcctccccagctgctggccagaccctggcgctgccacagtcctggcactgcccaaggccatacctgcctagccctttggctccatcctgtggatgcccactcacccctcagactcctgctgcccatgctgtggccggacttgtcagcagggggcctggtgggaggagcgactgccctgcccaaatgaactgccacagcagggacagctggaccgcagagtttatttttgtatttctactgggcctgcacactccagcccaaagggtctgtggccggaggccccacgagcaggccccagcagtcaccggctctggtcttgggccggccccggtgcccacctgtacccccacctcgcccatttggccgcgtgcactgagtgtcactttgctgcagctcgtttctttccaataaaagtttctgtgacttagtgtggacctgatgcggtgtgggggtggggcctgcggtgtgggagtggccggcggcatctggtatcctagcaactgccgctgcgggccgtgaccgctaagtcctgggagctgttgggctctgggaccgcagttgctgaaatggaggcagaggtgtgggaggcagaaggctacaacctagttctggactcggacctgtatgatgcggatggctatgatgtcccagaccctgggctgctcaccgaaaagaatggtgagggggcctggcctcgccctccgggcatcccgctaggaagtgggtctcattcgggcttgg

SEQ ID NO: 41307 - DNA, 2300 bp, Homo sapien
tttctgtgacttagtgtggacctgatgcggtgtgggggtggggcctgcggtgtgggagtggccggcggcatctggtatcctagcaactgccgctgcgggccgtgaccgctaagtcctgggagctgttgggctctgggaccgcagttgctgaaatggaggcagaggtgtgggaggcagaaggctacaacctagttctggactcggacctgtatgatgcggatggctatgatgtcccagaccctgggctgctcaccgaaaagaatggtgagggggcctggcctcgccctccgggcatcccgctaggaagtgggtctcattcgggcttgggttccgtcccctggaacaaaactcccctgggcagtccctggtagggcagggcccctggaggagggctccccataaccgtcagggtcgaggacctgaggctgtaggtggcagaacttccagttcctgcccgcagagttgactttcacggagccgtcgcaggtcctgccctttttgaccagcagccaacagtggcaaagcctgaccccgcgcgcccgcgcccgccggctgtggctgcttctgcgcaccagcctccacgaagtcgtggaaaaggtgcggtgtgcctgtcctgcgcctcctggcctctttccggatctgggccttcccttaggggtcccctaggccggagtagccccaacctttgattgcgggcccgcccaccccggcccacaggagaagagagccgagctgcgcgcggcgcgcctgacgcatgggctggaaccactgcgccgcctggaggtggcagccgggctgcgctcggtggcgcaggacccggtgggtggacgcttcgtggtgctggacggcgcgggccgcctgcacctgcacaaggaagacggctgggcacaggagacgctgctggcgcctgtccggcttacggggctggtgaccgtgctgggcccgctgggtgccgtgggccgttttgtaggctggggccccgcggggctggcaattctgaggcccaacctcagcctgctgtggctgagcgagcagggggtgggcagggccccgggttgggcgcccacctgctgcctgccggttcccgacctcaggctgctgctcgttgcggagatgaacagcagcctggcgctctggcagttccgttcaggtggtcgccgcctggtgctgcgagggtcagcactgcacccgcccccgagcccaacaggcaggctcatgcgtctggctgtggcgccggttcctccccaccacgtcctgcgctgcttcgcggcctatggctcggccgtgctcaccttcgatctgcatgcctggactctcgtagatgtgcgccgggatttgcacaaaacgtgagggggatccccctagggagggccaggcatgtaggggcacacggccctcacacacaaggcgatgttaagtccattgggattctcccattccccacctgtagcaccatctcggacctggcttactgcgaggaagtagaggcaatggtgacagcttcccgggacagcaccgtgaaggtgtgggaggctgactggcagatccggatggtgttcgtgggccacacaggtgctctgagttctctgcaccccgagcctcggccctttgcctccagccgctctaggctgtccagcatctccgcagctccggccaggccttgctgcgctgactgcaacacaggctgaaggctcccctgccttcagtcggccgagtgacctgcacccctcccacaggcccggtgacggctatgactgtgctcccgaacacgaccctggtgttgtcggcctcgcaggacgggacgctacgcacctgggacctgcaggcggcggcgcaggtgggcgaggtagcgctgggcttctggggccaggacaagctgtcccggcgcgtgggccgtctgctggcgccggtgcgcccgggctggccggtgctgtccctgtgcgcgagcagcatgcagctgtggcgcgtacgcgagctctactcgccgttggcgcaactgcccgccaaggtgctccacgtgcaggtggcgcccgcgttgcccgcgcctgcgcaccagtcgctgcctacgcgcctcgtgtgcgcgtgcgccgacggctcggtctacctcctgtcggcggccaccgggcgcatagtgagctcactgctgctggagccggaggactgcgcggcagccgtggcctactgcctgccgcgcgaggcgctgtggctgctgaccagggctgggcacctggtccgcgccaacgcggcgcgctgccccatgagcgtgctgcaccgcgtgtgcccgccgccgccccctgcgc

SEQ ID NO: 41308 - DNA, 2300 bp, Homo sapien
cagcctgggcaacaagagcaaaactccatctcaaaaaaaaaaagaaattctgtgtttttgatcatagccatcctagtgggttttgcaccaataatgtctgctacaccctactttgcaaaaccattatgactatatatatgaacactatgcaaggtttgctctcagggaagctttggaaaggacccgtccaagcaaggcaccatgaagcttaaattttattaccttcctttaagtactgttttcttttttttttttttgagacagtctcactctgtcacccaggatggagtgcagtggcacaatctccactcactacaacctccccctaccaggttcaagcaattctcctgcctcagcttcccaagtagctaggactacaggcacacgccaccatgcccggctaatttttatatttttagtagaaatgggtttcaccatgttggccaggctggtcttgaactcctggcctcaagtgatccacatgccttggcctcccagagtgctgagattgcaggtgtgagccaccgcacccggcctaatttactgttatttattttatttttgagatggagtctccctctgttgcccaggctggggtgcagtggcgctatcttggctcaatgcaacttcttcctcccaggttcaagcaattctcctgcttcagcctctcgagtaggcgggactagaggagtgtgccaccacccccggttaccttttgtattttttttagtagagaggggtttcaccatgttggccaggctggtctcaaactgctgacctcaggtgatctacctgccttggcctcccaaaacgctgggattataggcatgagctaccacacctggcctaagtactgctatcttgaaggaggcagacagaaaccaagcagtcatgggtggcgggtgggctgagtctctgtaagttgcccagggaagatagctctgacaaataattagaagttgccagccttgtgtacagctgagaaaagagcattccaggcagaagagacagcaagtgcaaagaccctgaggccagaatggccaccaaagttgtttggttccgtgtcctgagctaccagcttggcagatggctggtgcccaaaaaatgctggagtgagggaatgcccttcttttgccctcccttcctcccagtctgtgtgtctctagaaggttgctgctccgcccacagtggaggacacgtgaagaactggagtccttttctggggcagactccaatactgggacagagaaactcttctgccacgaccatggaactgggaggtcccagtgtctttctttcccaactgctctgagaaaatcggccagtggcaggtggaaatgatatggagccacagagcagcagggcagcagagagggagagcaatggtagggtagacagtacaaggctccagagagctcctggataaagcagtgccggaagctggctccctccaaacctccatttacaaattttctcttcgtgcaagtcagtttgagttgggtttgtcacttgcgactgaagacgtcctgacaaatgccccaaagctaccagctcagagatgcccagaggcctctccaaagctgcctcctcaggtccccactggggccctgtgttgtcctgtccctggacggcctgagcttctcggtggccgtgccagcctggacaagagcaggccttccttccgagaggcccgtggccactcccccattcagcccttctctgacccgacagcctagtcgaggagccggggcgcgggcctcagaccctcagggcccacgagaagccagggccggctgaccaggttcggcgtggccagcgcccagtgggaagcactggccgacctagccgagactacatggacgcttccagcgagtgtggacgcggcaggcggccaaatcgcgccgggcctcggtccccatggctcgggacatcacagcgctcagtctccaacctccgcagcttccggccagacgccgagacccataactccccgcgcgcggcctggcccctcccctccgcacgccggtcccgccccttgagcccagtgcgcagcctcggattggccagggcggctttcgctcctctggtgggcggggttgcgggccacacagcggacccctaagcggaccgctggcaccggtcgggtggcagcagagtgtcgctcgacatgggggaggccggggctggcgctggcgcctcgggagggccggaggcaagcccggaggcagaggtggtgaagctgctgcccttcctggcgccgggcgcgcgggcggacctgcaggcggcggcggtgcggcacg

SEQ ID NO: 41309 - DNA, 2300 bp, Homo sapien
ctagggctgtgcaggacgtgctttattaacaaaatgtttacaagcagtatacttggtaaaagtcatcaccattctctagtctcgataaaccaggggcacaatgcactgtggaaagccacagggacctctgcccttgaaagcagggtattgtccaaggtttctccccatgtgatagtctgaaatatggcctcgtgggatgagaaagacctgactgtcccccaaactgacacccgtaaagggtctgtgctgaggtggattagtaaaagaggaaagcctcttgcagttgagttagaggaaggccactgtctcctgcctgcccctggaaactgaatgtcttggtataaaacccgattgtacattcagttctgagctaggagaaaaaccgccctatggtgggaggtgagacatgtttgcagtaatgctgctttgttattctttactccactgagatgtttgggtggagagaaacataaatctggcttaagtgcacgtccagtcatagtaccttcccttgaacttaattatgacatagatgcttttgctcacgttttttgctgaccttctcatcaccctgctctcctacaacattcctttttgctgaaataatgaaaataataataaaaactgagggaactcagaggccggtgctggtgcaggtccttggtgtgctgagtgctggtcccctgggcccactgttgtttctctatactttgtctctgtgtcttatttcttttctcagtctctcgtcccacccgactagaaatacccacaggtgtggaggggcaggccaccccttcattaggaaaaaaatagaaactgcgccaggcaatttaagcaggtgggattggttgcttaagtgtcagaagggcttgagaggcacgggggcagggtggagttcgtcgaaggtgggggctgcaagaagcggccactctagaaccggagccaggtggtcccgacccagggtggctgagcctctgggctctgctgcggagcctgggagcctgcggcccctgcggcacacctccgctcccaccagtggcaggacacagctggaagcccgcgagtgtcaagccaagtgatgactgcaggatcagaacggccattggctctgtccaccctccctttgcagtctcgattatccgcgtcgttgcctgcacctgagtccattcccggggcttcattgggcagccgtcccgtgcggggctttgtaagcagccctcgggagcaaaatacagactcaggcctgcccctggcggaggggctggcgttcgtttgtgatcggagtgaaagtggggctgtgctgcgcgcggcagctggtgtgcgtgaggcgggggcggcaccgagaccgggaggggacaaggccacaggcgcgtgggaagccgccgcaggggccgcgcccgcatccgcaaagggtactgcgctctcccgggcgccgtccccacagcgggagcccagtccctccggccaggagtggacatcctgcccgcgctgctcccgccgcctccgcctctgccgacgcccagcctggacgcgcggcgggcgctttccttcctcacatcgctcttatcgcgtcccgagttcccgggaccccgctggtcgcctctttcccaacgagcgcagggccctgcgagtcctgcccccctccgggtgccgcggcctccagctggcgcttccggggcagacagagggcgggcgggccgcgcgagtccagggcgggcgtgtgcttgcgagcggccgcaacgccgcgccgagcccgcgtccccggcgtctgggagcggaggtcgtcagggctgtatgcgtccgacggggacacggggactgcagcaccccggggctggcgtagctgtcgcgagcctgaaggccgcgcctgcgccgtggcggccgaactgtcgctcaacagacgggcggggccgagcgtgaggcggagtctgcgcactgctgctttgcaaatgaaggtgggcggggtggagcgagcgtgagagacgtgcccccgaccaataagtgcagagatcgctcgggggcggggacctgctgccgcgctccaggctgcgggtggccagaaggcagcgggggcgggctcggcgcgcgcggctccgcccactccgggcccctgctgggcgggaaggcggcgccccggccgaggtggcggcggctcctcaggtaaacggcgggtggggatgagccttcggcggcgctggggaagagcccctcggggaagtctgggctgaagagcctggggcggctcccttggcggggccgcggaggaagccgagtcaggaggcgcctccccaaggtcacag

SEQ ID NO: 41310 - DNA, 2300 bp, Homo sapien
cttcattaggaaaaaaatagaaactgcgccaggcaatttaagcaggtgggattggttgcttaagtgtcagaagggcttgagaggcacgggggcagggtggagttcgtcgaaggtgggggctgcaagaagcggccactctagaaccggagccaggtggtcccgacccagggtggctgagcctctgggctctgctgcggagcctgggagcctgcggcccctgcggcacacctccgctcccaccagtggcaggacacagctggaagcccgcgagtgtcaagccaagtgatgactgcaggatcagaacggccattggctctgtccaccctccctttgcagtctcgattatccgcgtcgttgcctgcacctgagtccattcccggggcttcattgggcagccgtcccgtgcggggctttgtaagcagccctcgggagcaaaatacagactcaggcctgcccctggcggaggggctggcgttcgtttgtgatcggagtgaaagtggggctgtgctgcgcgcggcagctggtgtgcgtgaggcgggggcggcaccgagaccgggaggggacaaggccacaggcgcgtgggaagccgccgcaggggccgcgcccgcatccgcaaagggtactgcgctctcccgggcgccgtccccacagcgggagcccagtccctccggccaggagtggacatcctgcccgcgctgctcccgccgcctccgcctctgccgacgcccagcctggacgcgcggcgggcgctttccttcctcacatcgctcttatcgcgtcccgagttcccgggaccccgctggtcgcctctttcccaacgagcgcagggccctgcgagtcctgcccccctccgggtgccgcggcctccagctggcgcttccggggcagacagagggcgggcgggccgcgcgagtccagggcgggcgtgtgcttgcgagcggccgcaacgccgcgccgagcccgcgtccccggcgtctgggagcggaggtcgtcagggctgtatgcgtccgacggggacacggggactgcagcaccccggggctggcgtagctgtcgcgagcctgaaggccgcgcctgcgccgtggcggccgaactgtcgctcaacagacgggcggggccgagcgtgaggcggagtctgcgcactgctgctttgcaaatgaaggtgggcggggtggagcgagcgtgagagacgtgcccccgaccaataagtgcagagatcgctcgggggcggggacctgctgccgcgctccaggctgcgggtggccagaaggcagcgggggcgggctcggcgcgcgcggctccgcccactccgggcccctgctgggcgggaaggcggcgccccggccgaggtggcggcggctcctcaggtaaacggcgggtggggatgagccttcggcggcgctggggaagagcccctcggggaagtctgggctgaagagcctggggcggctcccttggcggggccgcggaggaagccgagtcaggaggcgcctccccaaggtcacagggcgaacgctgggagggtcctgggtgtcgcggggacctcggctcaggtgtgcgccgcgccacagcccggaagagaggccggagctgtgcggctgtgctcctcctctgcgccgctaagtcgtctcggccgcgcgaccacccctcttcggggagcttggtggtccccggtgcccgcccctccgcgggagcccggtggtccccggtgcccgcccctcctgtgagcccggtggtccccagtgcccggccctccccgggagcgcggtggtccccggcccttctccccccaggcggggccaccgggggtcctctctccgggaagccaagcatacgcccggagcctgcaaagccggcgtgccccgggcctccgtatgccttccgtattctctgacgatcgcgagcaggaaggtgatttgtccctagtcacgaggatgactggtcatagcgtgccgggcatagcgctggcagggccgccgggagccagccctcactcagccaaggtgagacttagggggtcggattttcgggcagcgtcagtgcagctgcagtgtgagggtcagaggaaaccactctgcgggcgctggtggctcggtcctacacactctggggaggggctcctttgcctgctcagttggggaagggacagactcataaactcaagtgcagtgaggtaagcagaaaaggggtacgggggtgtggccgaacttagggatgtgagcagagttgggtcggggacagccctgtaggcagggaccactttggaaggggatggtggtgaacgcacacgatgcggtaag

SEQ ID NO: 41311 - DNA, 2300 bp, Homo sapien
tcgcccaggctggagtgcagtggcacgatctcggctcactgcaacctccacctcctgagttcaagcaattctcctgcctcagcctcccaagtagctgggattacaggtgcctgccaccatgcccggctaatttttgtgttttagtagagatggggtttcaccatgttgcccatgttggtctcgaactcctgacctcaagtgatctgccagcctcggcctcccagagtgctgggattacaggcgtgagccactacctggccaatatttacaggttttatggctgccttgggggagaatgaggaggagagagaggagggcagagcagatctgagaaggactttgctcctgagcctccgttctggggtgtcctcctctgagccccagccactccatgcttgtcctactttgtttctgattttaccccttttctaacctttacatttttttaactgaatttttaaaaagtctgccttcacagttgcatatttacatattatacacatgctgagctggaagcactgaccctgtgggctgtgacccttcccagggactttccctgccctagtcctcttctgtcgtctcctcctgcagaccgcctccaggaggtttgggtcacagcctccagtttctgccatttgtttgtggatctcaccgcatttgcacttcgcttgattgcgtcttgcctagatagcaggcatggttcaaagcccactgagtctctccagaaagatgtggaacaatagggaaaagcaatgccacatccccctccaggcctcagatgtcagcacagtgtcctggggtactcctggagctttacaggtttcagctcctgtctggcgtctgtatctgtggttctgtttttatgaacccagaggcccatgactttgtagcatgccacctgtgccaccaaggggtgctgggcctcacggttttagacacatccagtcttgtacacgtcagccagggttctgcacaggacagacagactcctcaggggccgtcaggccatggggagggacgggatttggggaagagaagcaagaatagtaaaactggattttcaaattctgtgagtggaaaaactcaaactcacattgttttctctgctcttacaccacgcaacaatcaacacagaagatttctgtgaccaaatgggggggatttctctccaccagtaaacagcagtcagttgtgcagtggacaccagctgggtgtcctcaattcaatcccaacaccatccacctggaggtcgcgtcagatctggcaggtggagggctcagtcccacacaacagccctgcttctgatgccagtcgcaagccccaggtgtggcctgtgcttctgaccgacctgccatgaatcagggttttcacgaccccctcctcaggcttgatgaattgcagcagtggctcacagaatgcagggacagagtggcctgcgtttacccatttatgacacaggctgtgacgaagggtgcgggtgcccagcaggtggaggagacgcttgggcaggaatggggaggggcgcggagctcccgggccctcctgggaaccacctccaggcacctgcgtgggttccgctaccggaagctccttttgagggtttgtgctcagttgcgctcatgctcacttgaggcattcttcccttaccagccaagtgtttctagaggagggccatataccggttaaacaccaccatttcacctcagtgtgcttgctggagcccattcacccaactcctgagatcctctaaggaagctgctgtcaccagccttaggtgttttctttcttttccttattccgccatgcagaagctttaggtgttttccatctgttgtgagactgtctttccctggtgctggcagtgaccaattattattttagagagacacctaaacaactgcctgaccatcacctgatgaccgcctgacattcctagttgggggcctctcctgccctgttcatgtctgcctagtggcctactctaacaccctcttgtccaaggagacccgggagcgacgtggaaaactaccttccaggctacgacagacagaaaggagattggacatacctcgttatacctgctcccttttggagtttggacaaccagcgaacattaggttaaaacagagatcgtaagtctgacaaaacagactccttgtagcaataaaattccagactggactctggcatagcatcacgtgatagatagtgggccctgaaggaaataaaagtattttaccccaaaatctattcttgacatattttgaaatggccctgcaaaaccatattttgtggaggaa

SEQ ID NO: 41312 - DNA, 2300 bp, Homo sapien
gagatgcatctgccagcatccttagttttttattgttgtttgttcatttgtttgagacagggtcttgctctgtactcaggctggagtgcggtggcaccattacagctcactgtagcctcaacctcccgggctcaggcagtcctctcacttcagcctcctgagtagctgggaccacaggcatgcaccaccatgcccagccaacagccttagtttttgctttttaccaataagactttttttttccttataactttgaacaagtggactccagaagttttgggttccagtactttatgtgtcctagagattcatgctttccagcctgggtcctgggcctcatgcctggggcatgggagactctcctctttagtcaagaaatatttcttgggaatctcttttcctgctgctggtaggagaggtggaaggtggcaggagcaggatgtgtccctggagacttgacagtagctgtgtgtctgcctgttgctgcctgtctccctcctctcccccaccgtaaggagatggggctggtccctggagggcctctgattacaggggatgagactgtcctgcatccagggcttgggtgagaaagagcctggagcgcccgctgcatgctgtaggcatggggtggaaacccagagccttctgcccagctgcccaggcccagaattgtcagagggcgggaatccttccttctggcctctctggtctataacctcggccccgttcctggagcagatctgtgtgcctgtggagtcctcaagccccctggtgatgagtaaccagaaggaggtgctgcgctgcttcactgtgctgggtgagtggtgggcccagctttgcccatgggcatctgtggacactcacagggtcactgcctgctgtatgtggaggatggtggtggctggggtactggtcggggatgaggaggcccctgtttccacctctcctgggcctacctgtggctccagaggcctctgaaccagggcctgggcagtggctgcagcctggaacgttgttcacctccgaggagcgtgctgctgacctgcccaaatccttgggggcctccactcaccgtccagtctgcacattccctacctgccccccgcctacctgtttctccacacccaatctctggctccatggcctgctctctgctcccccagggggcctgtggctgctagccctggtcacctgccagcctcccatgacccacctggaggtgccatgcatcctgtcaccacccccactggatgctgtccctatgccctgcacaggccctcatagccatcctggaggggcagcagatggtgtgaggaggggtcctgcttgcacttggggctgtcaccctgctggggccacagcatcaacatctccctggagctggtcaggcaggcggggcctcaggccccccacctacatgagcatctacccttacacaagatccgcaggaggggtgtggggagactgactgcagccaggctgggggcagggttgtggtgggcagatggatcacaggtctgatacccaggcagagcaggcctccagagcccacctggaatggggatggctctggtccgtgaagtactggtaagggaactgctgcagtcgttgccagagggctcctggagcttgggctgcattagccctgcttgggctgggggtctgtgtgcttgacagctcgagtccccttgagccttagactggcctagagccaagagagtcaagaggggctactgatggccctcttgtgggcccccttgtgagctggagatgctgaaacaagcaccggtgtgctgggttggccaagatctaagtcccggcatgctcgggtggtgctggcgccgtgggataagggctacatgtgctccaaccctgccttagacaggggcatcggagccaggcccagcgattaggtgaccccagcttctcaccttcacacagcaactctcctctggctcctcccctgtgctggagagtaggtggacgctgtgtatagggatgaacaagatgacatggagcctaatctgtacccgttgccctgtagcctgcagctcgcctgaccgcctactggccttcctgctgcccaggctggacaccagcaatgagaggacccgcgtgggcaccctgcaggtggtcagacatgtcatcaactcagctggtgagtgcctccatgctagcctggccgccacccctggccatgtccaggatggagcaggtcctggcagattgtgtccctctaagtgaaagcaccatcctgctttgaattctctagaaagatttccctacttactattttgcaa

SEQ ID NO: 41313 - DNA, 2300 bp, Homo sapien
tgcagcggaacatgaccccccaaggcctgcagatcatgattgaggtgtgcaggggggaactgtcatggggatggggatgggggcacagagggcactccacctggctgctggccctctctccacatgtgggcaccacagggacagtttggtgctctctgcacttgggggtggtttatgaacaggcaggtgcaccccctcccatctgggctggcaagcagttggggaggccctgacccaggtgggacctctggagcctgtcctctcccgccactgcatggcgcggggatggaggggcccacgggtacccatggctcctgactgggggccgctaccagggtggtgctagggtggggccgacccccatgctcggagtgtgttcttctaggaccaaggtggcctccaccctgtccctccacagtcctggctggccctggatccacctgggctgggttgtgtctgtgaccagactggaggacagagtggcagggccagaggagctacggtggcctaaggctggcaccactctgggtccccggcttggccccctgtagcccaggaaggatggcctggcagggacactgagctggcccacgatgcacaaggctcctgcccccagggctgccctctgagcagtacctgtgtgacgcccctcttcctcagcacctgagcccatggatcaagtccccaagaggtcacgagcgggcgcgggccctgggcctgagcgccctcctgctgcgctacttcctggagcacctgcgtgtcagcgtgagtacctgggtccctggcccgggtgctgctgcctgtgttactcatgacccagagtgtgagctgccttcctggcttcctctggccgccgccccagctcaggccacagtcctcttccttgagacctggattgagggcctgtcagggccaggagttgtcagggatggctgctcagaatagagtccgttgtcatcaggggtccactgttagccggaaggaacatgcacctctggtctccagggcttcactgttgagcgcggtgcttgatttggttggcgatatttttatcatgttccagaagcatctatttgttttaatgagaacttttatcaggaacaggtattagattttgctaaatatctttttatcatctgtcaggattattctaggctttcttttctctctctttttttccctgagacagggtctcactctgttgcccaggctggagtgcaatggtgcaaacacagctcactgcagcctggaactcctgggctcaagtgatcctcccgccttggcctcccgagtagctgagactacaggtgcatgccaccacacccagctgattttcttttattttttgtagagatgggtcttgctacattgcccaggctggtcttgaactcttgggctcaagtgatcctcctgtctcggcctcctaaagtgctgggatgacagatgctggggttacagatgggagccactgcacctggccttttgttaatgcaccaaaactatcttttcttttttttctttccctccctccctcacctccctcccttcctcccctccctccctcccttcctccttcctttccttcctttccttcctttccttccttcctttctttcctttctttcctttctgagaccgagtctctcgctctcacccaggctggagtgcagtggcgcaatcttggctcacagcaacctccgcctcctgggttcaagcgattctcctgccccagcctcccgagtagctgggattacaggcgcccaccaccactgccggctaatttttgtatttttagtagagatggggtttcatcctgttggccttgaactggtcttgaattcccagactggtcttgaactcctgacctcaagtgatctgcccacctcagcctcccaaagtgctgggattacaggcatgagccaccgcgccctgccgaaactttcattctttatgtggtcaaatctcgtgtgttcagggctcttcccacctcatactttcatggcctgttcatcacataaccctggtctggctgaagcttaccttggtgcatgatgtgatggatgcccagtctaagaacaatggctggtcaccctgcagtctttctctaacattccagcctttcccttctgacttgaaattctttctcatcagtggcgcccaagtagataccaggtttccatctgagcccaggatcctgtgcaagggtagggtgggagcacctcccaggaaggcctcgcacgtgggggctgaaaagggagcaggtggtgggagggggacaggtgcgtctgccagggaggagg

SEQ ID NO: 41314 - DNA, 2300 bp, Homo sapien
atctgaagggaggatgaccctgggcaccgcgtcccctccccgacccatgcctgcctggtctactctgaggctcagctcacaacacaagcttgagtattattaaagtattgcattacgggggggaaaaaaagagtccttccaaggggatgagaaagctgcccctccctccgtgctctcatgtgggtccccaagctggaacacggcctgtctccatttggtgcttaggaatggccttccaggtccagagactgtgtctcctgcagaggaaggaggggtaggtcaccagggccttttctggtgctgggatcacaggtgtgagctaaggctcacctgcccttgaccccgtgttctagagagctccagggcgactgcaccacagggctgctcccagcccacttcactggtcagaaggagcctgagggagggtactgtgaccccagccctgcagctgcccaggcaccaccttccaggagcccgcccaggttccagcaggccctggcaggttccggagaaggagaccccacccccgtgcagcgagctcattgaaggcgcagggcccagcggctggggcccggctgcaagaaggggtgtggcttcccgccctaacgcgagcccctgagacccgatgcctaacagaagtggcgttgggggtgccccccttccctcaacctctggcatcgccttcctcctagattattgccaagcgcctccccccagaccagctcatcagcctcttgctaaccatgtttgaggccctgggagaccccgaaaagaactgctcccgagcagctaccgtcatgatcaactgcctgctgcaggagcggggcggtgtgctccaggagaaggtgggagagggcggggcgcggggggtgctccaggagaaggtgggagagggcgcggtgggacgggcagggcaggagtggggtagtggctcttggagaggtggcactgcgggagaaaacagtgaggctggccctggcctgtcctggaccaccctgcccagccctcctcgggtgtgacccccactgctctgccccctctccctacaggactaccatggagaaatctttctcttatgtctgaagacaggggttagaatttggcaaaaacaagtgctgagagaataaggggggaaaaggaagtgaaaaggcgggtgaaagcgctcatgtttcccttagcccacagggtgtcagccgtcccctagggagaggcaagcctgacctcatggcccattgctttgttttcacccaacatggtggtattttccagctgtgcagtaagcatttggcagtaggggtcaccatggctgagggtggagaggagactcccaggccaatacccatcatgagcagggagccccctcgtgacaaggccgtcccccagagtgaggctcatgctatgctgctgctggacttgtggtgggcctgggggtcccagggccagcgtcctcctgcccacgtttcccccgcgttccgttcacctgctttctggagcagcaggacagtcgcaaactcacagccccccccaagtcccatccttccgtctcaggcccagctccatcctcggtctgggaatctgtctccttctcccttcccgccacgtccccagcccagctcccgcaggagtgccgttggcagctgtgtgggtcctgcctccggtgggcctgccaggggagcctgagagttgcacccagcaggcgtgctgtgagggcatggggccgctggctctgttggatgcctgcccagctccgaaccagcctctgggccacatgtgcccttggcgcttcctctacctcccggggcactggccactttgcacgcagaatccaggtcgtggctccagttccttggcttctgggctgtccgtggcccacgggggatcctggccctacctcaggctggaaccagcagtatggagctctgcatctcatggggctccctcatggccccacccccttgggctggcgtaggtgtgcccacagctgtcccccacgcgtggcctgaccaccgtgtcccgcccatctacaggtgcccgagatcgtgagcgtcctgcgctccaagcttcaggaggcccagggagagcacgtcctgccggccgcccagcacagcgtgtacctcctggccacccagcactgcgcagccgtggtgtccagcctcctgggcagccccttgcccttggacaggtacccagctcagactccaggcttaggggtccctctggaatgatgctccccctggaatgatgctccccgagccctccacccggctctgcaccccgactttctgcatgagttcccatgg

SEQ ID NO: 41315 - DNA, 2300 bp, Homo sapien
acgggcagtgcggggcggtcagcccaggccaagccccaggggctgtgtgccccaccttctccttctccaccagggaggggatgaagctgcgcttgtcggccgggcggttggtcaccgggtggatcatgacgtccccgctgaagaagtcgacagccggctgggggagaagatgtgggcgtgtgggccagagtggctgaggccctgctggtgcctccaggacccccgccgcccaggggccagcccctgccacctacctcataggggttgaagcccacatccccaaactggccactctgcagccgccgcaccagggccacctgctcatccgtcagtctcaggtcccgccctgtcatcgggtcctgcacggtgcgcctggagaccgccagtcagaccccgccagccctgccccacccctcgggcccaccccggctgctggccccaccccaccagccctcaccagtagtcaggatcgtccatcttgtccaggaactggtccagctcatcccgggtccgcaggggcttgtagatgcgcctgccatccaggtcgtagcccacgtgggggaagtcatcgtaccactccaagggcacgttgcccaccgtgttccggatgtcctgcagccgggggccaccatgtcggcatctgatcctacaaggcccacccccgcttcgggccgcccaggggagcaggtgagggggttgcagggggagtgcaggcccagcctcaagtgccctgaggtcactggccctgacctacgcctgttccccagccctggggtctgacgtggcatggcggccacgctgcccccacccccgccctcggaggcgccggagctgcaccttcacattttccactgaagtggtgccaaccccagagctcccccctcactggattccttggccagggctctgggcagccacagacagggatgacctcatcacccacgggctccctcccctggcaggggccttaggcagaagtgggcagctataagacggggactcggggaagaccccaactgacccattccacagagaggcagaagccaagacctctctgtgggggaccccccaccgtctgccctcggcccctccccaggcagaacagccacgttcctggacgtacattcctggttgcagcccctgccagccgccaccctcgctccttccagcctggggaccgctgcccaggaggctgcttcctgcaacagtagccacggggaggggcccaggcaagacagagcacagctgggagcctgccgggccccctgctgcaggagggaccccttgggccctgccccctgctgagggtccttccctctcctccccatggagatagggggccatccccaaattggataatgggggtatgtgtgtgcttcctgaggggcctggtggccctggagaggaacgggggaaggaggaaggggcaaggagaccgacggggtgagaggtccacacagcacaagaacaggggacatggccagctagcagaaggcacagtctgtgccaagcctggagaggcaggtgcaggacagacaggcggagagactgagctctaggcccctaaatactcgcctgtgcccgccccctgcacacggcctggcacaggcaggcgctggcgcacatgggaggcaaagacagacagggtgcggtcaggcagcagggccagggcggctgggttaactcagttgtgccacgggagaaaacggggtggtgggttcctcccctctcccggggacggggggcactgcagttttggggccctgagtaactacagcccagaagcgacctcccagttcctccgcatccccagagacggaacgatgcccccaaagaccagccccgccccccccacccccgccaaagcgtggccacagaaggccgagggacgcggcgggcgctgctcgaggagcctccgggctgagaggggcggggcgtgcgcgggggaggggccgggacgccgctataaaggcgcagctcggggccccgctccggcccgggacgcacatgtgcgcgcgacgcccggcagctgccaccgcggggcgcagccgagaccccgcgcctcgccccggccggcccgcgaggcccgcggcggccgcaggaggcggcatgagcagcgcgcgacagagctgacgccgcgcccccgccggccccatgtccttcgccacgctgcgcccggcgccgccgggccgctacctgtaccccgaggtgagcccgctgtcggaggacgaggaccgcggcagcgacagctcgggctccgacgagaaaccctgtcgcgtgcacgcggcgcgctgcggcct

SEQ ID NO: 41316 - DNA, 2300 bp, Homo sapien; identical to SEQ ID NO: 41308

SEQ ID NO: 41317 - DNA, 2300 bp, Homo sapien
tcttctgcctcagcctcccgagtagctgggactacaggcgcccgccaccacgcccggctaattttttgtatttttagtagagacggggtttcaccgtgttggccaggatggtctcgatctcctgaccttgtgatccgctcaactcggcctccgaaagtgctgggattataggcatgagccaccacgcctggccagagcctctcctattcttatgtgcatgcatctctctccgcatggactcgtggtttgctgtttgacgcaggggtccatgcgcagtccctgttgctggccttggtgttcaaactgtcccacacttggtcggtagcacccttcgagcgcgcaggcccctgtcctgaggccctgttgccctttctggcgcaggacggtgtcccagctcacctggggctgcccgtgcctctgctctgcggacccttccatgagctattggtctcttgtttctgggaagctcgctcctttatttcttgagtatttcttgcccctgtttttgtgtctcactgactttggtgtatctgttatccgaaggctagcactgctgtcttcacatcttttagctttttcttcttccattctttttaaatttcttcttccttgaagtcttcggcagcctgttcttccaagttagtaatttcttcctcagtgaatcgttacattattcgtttcctgaattgaattctttatttcacggttatactttttcacaccctgtcgctgggattttccttgttcttggctcctcatttccccgttgtggttccttgtttccctgttgcggtacttttggtgcattttttcgcacaggcattgtccccagtctgtgtcctaacgttcgtgtttctggtggagtatgtcctcactgttcgttatcaggtattttgcagtttctatttggtttctttattaacgcaaatgattcttttatgatctttaaaatctccaggtcgataggttttcatgggtgttgtggatttattgttatattgaatctggccaggttgatttctgcttttaagtgttggttgcaatattatttttggcctaatggtcaggatttcaaagtgtatgtttggtatgaagttctatctatatttttagtgcctactgtaaaaattgaagttcaaggcctaaatatcactgtttttttttttttttctgtgtgactttcagcttctgaaagagagggattagaagtccctgcagtgttgccatttttccaaatatgccgctttgtggttgagcttttactttttggtatttcaaaacctgaatggaacgtgtgggaaacagaagtcgtctgcttacagggacgccttctggggagctgagcgtacagagaggacagcagacatccagcccaccgtggctgccgaggctgggtggcgtcctggtgggaaccaggttttctgacatgggtaacgttcccacagaggctatcctgttcctcccctgcaggcattgcaacctcacgagcagtgattttttatggagtcagtagcttagcaaatgctcaaggttttgtttgttttgaagatgagaactgaggcaggtaagcctgctttcttgggtgatcttagcggagagtgcctttcctgtctgtggcaggtggtgcacatgtctgcgtgacctgcggcgaggctcagggtctgccccgcttccgggcaggctgtgtcctcaggcccagagccatggccgcccacgcacgcctttgccttttgccttcctccagcctgagaagccaggccccggcagcaaggaccccaaggccgacagcgtgcgggccatcagcgtgcgcaccctctacctggtcagcaccaccgtggacaggatgagtcacgtgagtgcacggcacccgtccctgcctggcgacaacagagctctccagggcagtggcccagggtgctcaggcccagcaaagggtctgtctccaccttggagctccggcagggccctgtctgcatgggaccgccctctgggcggatgcagaccaggccctctgctcccctaggtcctctggccatacctgctccagttcctcacccctgtgcgcttcactggggccctgactccgctctgcaggagcctcgtgcatctggcgcagaagaggcaggaggccggggccgacgccttcctcatccagtacgacgcccatggtgcgtgccgcgccgtaccccacctccccactcctgcccccacttccccactcctgcccccacttccccatcctccagttcctgacacccgccccagggctacaggcagccccccactgactatttccacct

SEQ ID NO: 41318 - DNA, 2300 bp, Homo sapien
tgcagcggaacatgaccccccaaggcctgcagatcatgattgaggtgtgcaggggggaactgtcatggggatggggatgggggcacagagggcactccacctggctgctggccctctctccacatgtgggcaccacagggacagtttggtgctctctgcacttgggggtggtttatgaacaggcaggtgcaccccctcccatctgggctggcaagcagttggggaggccctgacccaggtgggacctctggagcctgtcctctcccgccactgcatggcgcggggatggaggggcccacgggtacccatggctcctgactgggggccgctaccagggtggtgctagggtggggccgacccccatgctcggagtgtgttcttctaggaccaaggtggcctccaccctgtccctccacagtcctggctggccctggatccacctgggctgggttgtgtctgtgaccagactggaggacagagtggcagggccagaggagctacggtggcctaaggctggcaccactctgggtccccggcttggccccctgtagcccaggaaggatggcctggcagggacactgagctggcccacgatgcacaaggctcctgcccccagggctgccctctgagcagtacctgtgtgacgcccctcttcctcagcacctgagcccatggatcaagtccccaagaggtcacgagcgggcgcgggccctgggcctgagcgccctcctgctgcgctacttcctggagcacctgcgtgtcagcgtgagtacctgggtccctggcccgggtgctgctgcctgtgttactcatgacccagagtgtgagctgccttcctggcttcctctggccgccgccccagctcaggccacagtcctcttccttgagacctggattgagggcctgtcagggccaggagttgtcagggatggctgctcagaatagagtccgttgtcatcaggggtccactgttagccggaaggaacatgcacctctggtctccagggcttcactgttgagcgcggtgcttgatttggttggcgatatttttatcatgttccagaagcatctatttgttttaatgagaacttttatcaggaacaggtattagattttgctaaatatctttttatcatctgtcaggattattctaggctttcttttctctctctttttttccctgagacagggtctcactctgttgcccaggctggagtgcaatggtgcaaacacagctcactgcagcctggaactcctgggctcaagtgatcctcccgccttggcctcccgagtagctgagactacaggtgcatgccaccacacccagctgattttcttttattttttgtagagatgggtcttgctacattgcccaggctggtcttgaactcttgggctcaagtgatcctcctgtctcggcctcctaaagtgctgggatgacagatgctggggttacagatgggagccactgcacctggccttttgttaatgcaccaaaactatcttttcttttttttctttccctccctccctcccctccctcccttcctcccctccctccctcccttcctccttcctttccttcctttccttcctttccttccttcctttctttcctttctttcctttctgagaccgagtctctcgctctcacccaggctggagtgcagtggcgcaatcttggctcacagcaacctccgcctcctgggttcaagcgattctcctgccccagcctcccgagtagctgggattacaggcgcccaccaccactgccggctaatttttgtatttttagtagagatggggtttcatcctgttggccttgaactggtcttgaattcccagactggtcttgaactcctgacctcaagtgatctgcccacctcagcctcccaaagtgctgggattacaggcatgagccaccgcgccctgccgaaactttcattctttatgtggtcaaatctcgtgtgttcagggctcttcccacctcatactttcatggcctgttcatcacataaccctggtctggctgaagcttaccttggtgcatgatgtgatggatgcccagtctaagaacaatggctggtcaccctgcagtctttctctaacattccagcctttcccttctgacttgaaattctttctcatcagtggcgcccaagtagataccaggtttccatctgagcccaggatcctgtgcaagggtagggtgggagcacctcccaggaaggcctcgcacgtgggggctgaaaagggagcaggtggtgggagggggacaggtgcgtctgccagggaggagg

SEQ ID NO: 41319 - DNA, 2300 bp, Homo sapien; identical to SEQ ID NO: 41314

SEQ ID NO: 41320 - DNA, 2300 bp, Homo sapien
gtcgctgccgcggtcctcgtcctccgacagcgggctcacctcggggtacaggtagcggcccggcggcgccgggcgcagcgtggcgaaggacatggggccggcgggggcgcggcgtcagctctgtcgcgcgctgctcatgccgcctcctgcggccgccgcgggcctcgcgggccggccggggcgaggcgcggggtctcggctgcgccccgcggtggcagctgccgggcgtcgcgcgcacatgtgcgtcccgggccggagcggggccccgagctgcgcctttatagcggcgtcccggcccctcccccgcgcacgccccgcccctctcagcccggaggctcctcgagcagcgcccgccgcgtccctcggccttctgtggccacgctttggcgggggtggggggggcggggctggtctttgggggcatcgttccgtctctggggatgcggaggaactgggaggtcgcttctgggctgtagttactcagggccccaaaactgcagtgccccccgtccccgggagaggggaggaacccaccaccccgttttctcccgtggcacaactgagttaacccagccgccctggccctgctgcctgaccgcaccctgtctgtctttgcctcccatgtgcgccagcgcctgcctgtgccaggccgtgtgcagggggcgggcacaggcgagtatttaggggcctagagctcagtctctccgcctgtctgtcctgcacctgcctctccaggcttggcacagactgtgccttctgctagctggccatgtcccctgttcttgtgctgtgtggacctctcaccccgtcggtctccttgccccttcctccttcccccgttcctctccagggccaccaggcccctcaggaagcacacacatacccccattatccaatttggggatggccccctatctccatggggaggagagggaaggaccctcagcagggggcagggcccaaggggtccctcctgcagcagggggcccggcaggctcccagctgtgctctgtcttgcctgggcccctccccgtggctactgttgcaggaagcagcctcctgggcagcggtccccaggctggaaggagcgagggtggcggctggcaggggctgcaaccaggaatgtacgtccaggaacgtggctgttctgcctggggaggggccgagggcagacggtggggggtcccccacagagaggtcttggcttctgcctctctgtggaatgggtcagttggggtcttccccgagtccccgtcttatagctgcccacttctgcctaaggcccctgccaggggagggagcccgtgggtgatgaggtcatccctgtctgtggctgcccagagccctggccaaggaatccagtgaggggggagctctggggttggcaccacttcagtggaaaatgtgaaggtgcagctccggcgcctccgagggcgggggtgggggcagcgtggccgccatgccacgtcagaccccagggctggggaacaggcgtaggtcagggccagtgacctcagggcacttgaggctgggcctgcactccccctgcaaccccctcacctgctcccctgggcggcccgaagcgggggtgggccttgtaggatcagatgccgacatggtggcccccggctgcaggacatccggaacacggtgggcaacgtgcccttggagtggtacgatgacttcccccacgtgggctacgacctggatggcaggcgcatctacaagcccctgcggacccgggatgagctggaccagttcctggacaagatggacgatcctgactactggtgagggctggtggggtggggccagcagccggggtgggcccgaggggtggggcagggctggcggggtctgactggcggtctccaggcgcaccgtgcaggacccgatgacagggcgggacctgagactgacggatgagcaggtggccctggtgcggcggctgcagagtggccagtttggggatgtgggcttcaacccctatgaggtaggtggcaggggctggcccctgggcggcgggggtcctggaggcaccagcagggcctcagccactctggcccacacgcccacatcttctcccccagccggctgtcgacttcttcagcggggacgtcatgatccacccggtgaccaaccgcccggccgacaagcgcagcttcatcccctccctggtggagaaggagaaggtggggcacacagcccctggggcttggcctgggctgaccgccccgcactgcccgtcctgacccggctgtctatgcaggtctctcgcatggtgcacgccatcaagatgg

SEQ ID NO: 41321 - DNA, 2300 bp, Homo sapien; identical to SEQ ID NO: 41315

SEQ ID NO: 41322 - DNA, 2300 bp, Homo sapien
gccggagaagcggcggtctgagcccgaactggagcctgagcccgagccggaggtgactgtggcgatgcggggcggcggggcgcgtccctagagggcccggcgggcacgtggccgcgctggggcgggtgggcccggcttctgtcacctgggcgcccgcgcccagtgaatcggtcttgggcgtgggtgcagctcctctatcggggggtctcaggcagagcggactgcggggtaaaggacggcgtccgggaagcaaagaaacgggggagcggggagtggggacggggcgccccttgcagcagcctctccagccgttccatttgtgcatcctgccaataaaagggctcggcttgcgctcccagtaaatgcttaacctacgtatacgctagttaattgcgtttttatgctcatgggatagacatgagaataagaaaacctgaatagaacccagtgtctgctgcatttgctgtattagaactcactgttgctctctgctagctcagccctgtcttggttgtggggatcatcaaattgggtggtggaggggatggacagccagcccctcacagccccctcggccgcggccgcgctgggttgttgaaactgccccattgctttgtgaagcgaattcaactcatcctggctcccatgggctgaatggcccgcaggccactctaggcgccaggttctgcgacttccacccttggactaaacggtcctcaggagccagttgtttgcgcccaggccacggatgccatttccactagttattgtgattgtgtagccgactgaataccaagacacatcatgactctgtgtgagagaggcattgtgtgaacactcggtatgcaatagctaatacatgcaggtcgtaccttaagtgagacttgtaaactattaggaaaacagtaaaatctagaattctgcattcaactgcttcctttttcttttcttttccttttctttcttttttctttttttttttttttgagacagagcctggctctgttgcccaggctagagtgcagtggtgcagtcttggctcactgcagcttccacctcctggctaactcagcctcctgagtagctgggattagaggtgcccgccaccaccagctaatttttgtatttttagtagagatggtttcaccatgttggccaggctggtcttgaactcctgacctcaggtgatccacccgcctcagcctcccaaagtgttgggattacaggagtgagccactgtgcctggccttcaactgcttcctaagagtctaagttcttgttccaccctttaaggccagtgaaggacccgaacactgtgtgtgccggtgtcacgcagccagcagggctctgctcagaggcagctgtggtcctgctcagagagaggagtgggtgggttggtgcgtggttgcggttagagtctctatcattcctgtgactcttcagccaatcctttcaatttactgatcaatcgttggtcccaatctggttaaatgaggaggcgtctgcttcaggtggtaaaagccctttggggacccatttctcttccagcccccagccccttttctagtgacctcttggctctggggccttggatgccagggtgaggtgtggagagggctcaggcaggctgtctgagggacccagtggagtccagcccagcctgaccccacagggcctccggagtgtcagtgggtggtagagagcagtgttagttttgcgatgagagctgagctccaagaggaggaggttgtccttgaaaagccccttccctgtgaggtgctaggaattaaaatgtcgatggcaaaggcaagaggctgtcttgtcagtggaggtagaagatgaggaaggctcaggttgggtggatgcttttggtggaagtttgtgactggaggggtgtggtcctggaggccacatggagctgctggtgggtggctggaggggcgagaggcagctctccctgcagtgttcagtgccccatgcctggaggggcagttgtcaccaacccagtgtttccttgcagccccccctcctctgcacctctcctctcagccacagcaccggcagcgattctggcgtctccgacagcgaggagagtgtgttctcaggcctggaagattccggcagtgacagcagtgaggatgatgacgaaggcgacgaggagggagaggacggagcccttgatgacgagggccacagtgggattaaaaagaccactgaggagcaggtgcaggtgggtgagcgaggagccccctcgagggctgtcccccatgtgcaggtggccttgggctttctgagactgc

SEQ ID NO: 41323 - DNA, 2300 bp, Homo sapien
acaagacagcctcttgcctttgccatcgacattttaattcctagcacctcacagggaaggggcttttcaaggacaacctcctcctcttggagctcagctctcatcgcaaaactaacactgctctctaccacccactgacactccggaggccctgtggggtcaggctgggctggactccactgggtccctcagacagcctgcctgagccctctccacacctcaccctggcatccaaggccccagagccaagaggtcactagaaaaggggctgggggctggaagagaaatgggtccccaaagggcttttaccacctgaagcagacgcctcctcatttaaccagattgggaccaacgattgatcagtaaattgaaaggattggctgaagagtcacaggaatgatagagactctaaccgcaaccacgcaccaacccacccactcctctctctgagcaggaccacagctgcctctgagcagagccctgctggctgcgtgacaccggcacacacagtgttcgggtccttcactggccttaaagggtggaacaagaacttagactcttaggaagcagttgaaggccaggcacagtggctcactcctgtaatcccaacactttgggaggctgaggcgggtggatcacctgaggtcaggagttcaagaccagcctggccaacatggtgaaaccatctctactaaaaatacaaaaattagctggtggtggcgggcacctctaatcccagctactcaggaggctgagttagccaggaggtggaagctgcagtgagccaagactgcaccactgcactctagcctgggcaacagagccaggctctgtctcaaaaaaaaaaaaaaagaaaaaagaaagaaaaggaaaagaaaagaaaaaggaagcagttgaatgcagaattctagattttactgttttcctaatagtttacaagtctcacttaaggtacgacctgcatgtattagctattgcataccgagtgttcacacaatgcctctctcacacagagtcatgatgtgtcttggtattcagtcggctacacaatcacaataactagtggaaatggcatccgtggcctgggcgcaaacaactggctcctgaggaccgtttagtccaagggtggaagtcgcagaacctggcgcctagagtggcctgcgggccattcagcccatgggagccaggatgagttgaattcgcttcacaaagcaatggggcagtttcaacaacccagcgcggccgcggccgagggggctgtgaggggctggctgtccatcccctccaccacccaatttgatgatccccacaaccaagacagggctgagctagcagagagcaacagtgagttctaatacagcaaatgcagcagacactgggttctattcaggttttcttattctcatgtctatcccatgagcataaaaacgcaattaactagcgtatacgtaggttaagcatttactgggagcgcaagccgagcccttttattggcaggatgcacaaatggaacggctggagaggctgctgcaaggggcgccccgtccccactccccgctcccccgtttctttgcttcccggacgccgtcctttaccccgcagtccgctctgcctgagaccccccgatagaggagctgcacccacgcccaagaccgattcactgggcgcgggcgcccaggtgacagaagccgggcccacccgccccagcgcggccacgtgcccgccgggccctctagggacgcgccccgccgccccgcatcgccacagtcacctccggctcgggctcaggctccagttcgggctcagaccgccgcttctccggccgcacgctcggcgccgccgtgcgccccgcaccccgcgaacccgccatgccccaccgcgcgccggccgccacccgcacagccgcttccgacagcgaccgggccgcgtgcgcaggaggacgcgccccgcccagcccggccccgattggcgggtggagggaagggggtgggaccaacacgcgcaggcgcgcggctgggccggggaccagggcggggtcggggcctgcgtgctcgcgccgggggtgacgcgggagggcggcagcggcggcggcgggagcgcgcccgttgcaagatggcggcggccatgctgggccccggggctgtgtgtgcgcagcgggcggcggcgcggcccggaaggctggcgcggcgacggcgttagcccggccctcggcccctctttgcggccgctccctccgcctattccctccttgctcgagatggatctgcccgtgggccccggcgcggcggggcccagcaacg

SEQ ID NO: 41324 - DNA, 2300 bp, Homo sapien
aacccgggaggtggaggtcgcagtgagccgagatcgcaccactgcactccaacctgggtgacagagcaagactcggtctaaaaaaaaaaaaaagaaaaaagaaaaagacggataaaagaagacagaaacatgggagtatttcctttgcacaagaatccaaggtctagaatgaagagatggtgaaatgaagccagcctccaggaaggtgcactgtgccttaatgggacctggggatgggaaggccaacacagaggtgtcagcgggacaaacacaaagtgtttctaacaagagcaaagatttccagtcttctctttatttccaaacactctgtaggtaaagcagagcctcagtaaacccaagaagcagaaaacctggcctcctgcctggggcagcttcagtttagacttttcttcattcctaacagcataaagaggctgtgcaaatgggaggcactcagcagagcctgaagaactctggggtcttagctcctgggaggccacacatgcttggtggcaccctgccggtcacggtgcctccaaaagctcccaatgatcagtggcctttcttttttttcttttttttcttagacagggtctcactctttgccaggctgcagtggcgggatcttggttcagtgcaacctctgcctcccaggtccagggagtcctcctatctcagcctcccaagtagctaagaccacaggcaagcaccaccacgcccggcaaattttttgtatttttagtagagctggggttttgccatattgtccgggctggtctcgaactcctggcctcaagtgatccacccgcctccgcctcccaaagtgctgggattacaagcaagagtcaccccactcggccagtgtggcccttcttcaggtcatcacttgccagccgcaggcggtggctctgcccctcaccggacacgacgtcacagccgggatgtgaacagcagattctgatctccaactccagacaatcactgatttacttctgcaaaccggagctgtccggtcttgcagggtcggaccatgtaaacaagcctgctgccaggcaactgaagacagaaacacgaataaagatgccccataaggaatgaaaaacaaaactcctcttgggaaacccagatttgggattcggaaacgggcttgagatcaacctgaagcttcatgacgtcttactgtttccactgcctttcctgttccactacagcaacgccctccacttcacgtgccaagtcctgactttctcctaatagttgccgacccagcaccccgtaggctgtcccctggggacgccgatgtcctctggggcatagcgtccgctggcgaagccgggtgcttgccctaagcgcggacacttccgcaaccgcccaacagttagcagaagcccaatacaagagacgccccattctccccatcccagggaaacttcgctggggcaggggttgaaccgagtgtgggtctcgtagccgctttcccaacttaaggctctgggtctgagcaggctcgggacccgccgcccttctctggcgggggcagggcaggctcaccgcgcgtaagctgaagtgcggcagggcccctccccgcagccctcccgcgccgtccgccgcggccctgctccctcccggtccccacgggccccgcgcccgcgcgctgccctcaccgggctccagcagatgagcgcgtcggtgtccgggtcgctcacgagggtccacagcttggtcaggaaggccgggacgttgctgggccccgccgcgccggggcccacgggcagatccatctcgagcaaggagggaataggcggagggagcggccgcaaagaggggccgagggccgggctaacgccgtcgccgcgccagccttccgggccgcgccgccgcccgctgcgcacacacagccccggggcccagcatggccgccgccatcttgcaacgggcgcgctcccgccgccgccgctgccgccctcccgcgtcacccccggcgcgagcacgcaggccccgaccccgccctggtccccggcccagccgcgcgcctgcgcgtgttggtcccacccccttccctccacccgccaatcggggccgggctgggcggggcgcgtcctcctgcgcacgcggcccggtcgctgtcggaagcggctgtgcgggtggcggccggcgcgcggtggggcatggcgggttcgcggggtgcggggcgcacggcggcgccgagcgtgcggccggagaagcggcggtctgagcccgaactggagcctgagcccgagccggaggtgactgtggcgatgcggggcggcggggcgcgt

SEQ ID NO: 41325 - DNA, 2300 bp, Homo sapien
tgtgttggggacgccttcagcacttggccaggcagtggacaacccaactgtatgcctgacttcctgcttacacagagcctcaaggtcagccagaagtgagagctcggggctggctcaggtctttcctgagcacgggcacggctcacacgtgtacacggctgcgagatgtcctggaatatctcagagcttttcagagcccctagtggcacctccttctccccagctgccaggcactgcctcaggcagccacagcgttcaaaaatcacctgtaaaggtttcaacaggcacacctcggcaaacagcttttttattcaggagagcttcaagtcaaatcagagacagccttgggagtggactcttaggtcagatgctgacagtcctctgggaatggggccctggaggagctcaagccctggcccaccccgcagcggctgccaggacgctgttcccacggggactgcagctgttggtttttaaggctgcagatggagtgggaatagggcatgtaaaatgccacaaagcctggctgggcacagaggctcacgcctgtaatcccagcactgcaggaggccaaggtgggcggattgattgaggtcaggaattcgagaccagtctgggcaacatggtgaaaccccatctctcctaaaaatacagaaatgagccgggcgtggtggcgcctatagtcagctactcgggaggctgaggcaggagaatcgcttgaactcgggaggctgaggcacgagaatcgcttgaactgggaggctgaggcacgagaatcgcttgaactgggatgcagaggctgcagtgagccatgttggtgctggtgcactccagcctgagcaagaccttgtctcagaaaaaaaaaaagttcacaaagcccactgttcttactaagattcagctgtttttcttgaataaatgctccccgtgctactgtaattctttggttaactttcagagttctggaaagttggcttggcgcttttcgccgtctctctcctgctgccttggggtcctttccgtgaccgtttccctccctgacacgtgtacatccctgtgtatttcacatctctctatgctggaaagaggttctccacttctagtgccacaccacgggggtctttctggctttttccctgtttgcatctgcagctcccttccctggcagggagaaacctgccccactgcccttcaccagtttcttcactgagtcagccaccccttcctatgcagacacccctcacccctctctggccctgcttcaggccccccttccccgccgtgtgggcttctcgctgtcccctaagccttcgatgtcccctctgagccaccgcggccacggccaacagggatgcctccctcaccagcgcctcctgatagctctgggcctgagctcggtagagaaatggaagaggaaggtatatgcagtgtttgactgtctctgtttcttgtctcacgtcacaaaacaagactgaatttggatttctgaacgcgactgtgttttcctcgggagtaatgaaattagggctccatttccttcgctgttcccaagggaaaggtcctgcttaaacaggtgctttgtgagtggaaacgtggccagagtgcggcgggtgctttgtgagtggaaatgtggccagagtgcggcggatgctttgtgagtggaaacgtggccttctctggaagccctggggaggggctttccgactgagaggaaggcctcgcatctgcccaccgcccagtcctgggcctcacagtgaggatgcaggtcacgctgcacagatgaggcccgtgtggcaggtggtcccaggaacgaactcgcctcccgccagccccctgggcctcccatggccccagccccatcaggtggaacgtgcactgcctgcgtttcagaaggggcggcctggggaaggggcggcttgggcacgctgcccctcaccaccacgcgtgacccacccatgtgtctccctttcagagcgggaacagcttccacgtgttcgaccagggccagtttgccaaggaggtgctgcccaagtacttcaagcacaacaacatggccagcttcgtgcggcagctcaacatgtgtgagtgctgcctccaggcagcgcaggggtgcgggaggcagacctgcagatggcgggaccccagcaggaggaccctgtgatgaaggacggggcgtcctgtgctggccaagggcatggcgtgggaccctgcaagcctgggggccggggagcagccgcctcttccatgggggagggtccttgtgggtatgaacctggggtccccatggaagaaccgtgaag

SEQ ID NO: 41326 - DNA, 2300 bp, Homo sapien
agcgcctcctgatagctctgggcctgagctcggtagagaaatggaagaggaaggtatatgcagtgtttgactgtctctgtttcttgtctcacgtcacaaaacaagactgaatttggatttctgaacgcgactgtgttttcctcgggagtaatgaaattagggctccatttccttcgctgttcccaagggaaaggtcctgcttaaacaggtgctttgtgagtggaaacgtggccagagtgcggcgggtgctttgtgagtggaaatgtggccagagtgcggcggatgctttgtgagtggaaacgtggccttctctggaagccctggggaggggctttccgactgagaggaaggcctcgcatctgcccaccgcccagtcctgggcctcacagtgaggatgcaggtcacgctgcacagatgaggcccgtgtggcaggtggtcccaggaacgaactcgcctcccgccagccccctgggcctcccatggccccagccccatcaggtggaacgtgcactgcctgcgtttcagaaggggcggcctggggaaggggcggcttgggcacgctgcccctcaccaccacgcgtgacccacccatgtgtctccctttcagagcgggaacagcttccacgtgttcgaccagggccagtttgccaaggaggtgctgcccaagtacttcaagcacaacaacatggccagcttcgtgcggcagctcaacatgtgtgagtgctgcctccaggcagcgcaggggtgcgggaggcagacctgcagatggcgggaccccagcaggaggaccctgtgatgaaggacggggcgtcctgtgctggccaagggcatggcgtgggaccctgcaagcctgggggccggggagcagccgcctcttccatgggggagggtccttgtgggtatgaacctggggtccccatggaagaaccgtgaagccggagctgtactccacgtgtgtcgggcgcagggagccctgtggggacacagggtctcccttagaccaaggccactcggccacccaggcatgggctctgagggggcagggcagggtctgaccatggccaagccccgcagcagcctcctggagcagtggccgctcttcaggggttctggtcccgccctgaggcagagctgcccccttccctgttatgtgcagatggcttccggaaagtggtccacatcgagcagggcggcctggtcaagccagagagagacgacacggagttccagcacccatgcttcctgcgtggccaggagcagctccttgagaacatcaagaggaaagtgaccagtgtgagtgccggccctgcacccttgcccggtctcacctgccacagctctccccgcccgcccctccctgagggctcccaccccagcctgccccttcctgagggacctggctgcagtggacgagcctgagcctgccaagctcctaggctgctccagtgactcctgtccctctcgggaatccaggtgtccaccctgaagagtgaagacataaagatccgccaggacagcgtcaccaagctgctgacggacgtgcagctgatgaaggggaagcaggagtgcatggactccaagctcctggccatgaagcagtaggtcccacaccagcattatgggccacagcgggtcctggcgcccaccaagaggccccgggtgctgtgggggcagggccctgaccggggccaggtgctcagctccaccctcccgctccacgcacatctaccctgggcctctgccccagccccgccgcccgtggctgctgcaacagctctggggccagccgttttccatgtgcagaagggggttgggagggtcccctgctctgcacatccccagcgccctctgggccattggcttctgcctggctccgagcttggcgggacccaccagcctacttttgaggacaagccttgcacagcagacccgtcccacccgcctcgggcctggggtcagacccacctcaggcccttcctggaaccgctgtcccacactcgcctgggcccatggagctagcccccagcccctcctcaccgggaccctgcggctctggggaaaccttagcaggagcctaacacacggtggcacctgagaaactgaggcaagcccacctcggaaggccagctcaggtctcacgtccactttggggctccaggcatgcgggaaccccaatgccagtacggcttcctcggctccgtgcagcaggcgctcttgacccccacgtcatggaggaggccttggcctcagactctcctgcatggggtctagcaggagccaccggctttgtgattcctgga

SEQ ID NO: 41327 - DNA, 2300 bp, Homo sapien
ttgacccccacgtcatggaggaggccttggcctcagactctcctgcatggggtctagcaggagccaccggctttgtgattcctggagtccggccacgtggacctggcctaccaagaagactcacaggcttgacagggcccagcctcccagagcagcaggagcgcggtcatggccctgctcacctggctggggacagctcttccccacccctgagccacctccaggcctggcgagggccctgagcacctacaggacatgggacagccagtgtcgcagcctgaagaaccgtcctcccttaacctggctgctcaggccttggaagggcggcccaagggtctgctcctggcctgtgtccaaggcagccctccaggtgtttgccaggatggatgccaggatccgggtgcacctggctcgcatggatccatccccaacaccctacgtgacaccaggtgtccccggcagggaggggcagtgggaccagcaagccctggccctggcccccagtccctccacacacaagttctcatcctggggtgggccaggccagacatggtcacacttacccctgctcctgcatgggggacagggagggtctgtggggctccctcagccctggggctcatgggattgggccccactgacccagcctggtctgttgcagtgagaatgaggctctgtggcgggaggtggccagccttcggcagaagcatgcccagcaacagaaagtcgtcaacaaggtgggggcagggccagagggccggcgggggccccacaagggccggggtaactgtgtcctctctctccacagctcattcagttcctgatctcactggtgcagtcaaaccggatcctgggggtgaagagaaagatgtgaggttttggggatgcctgcatccaccacccggggcccagggctgtcccccttctctgtcagctgtgccccgggtaccccgaggtggggggtggtggctgacctgcacccttccccacagccccctgatgctgaacgacagtggctcagcacattccatgcccaagtatagccggcagttctccctggagcacgtccacggctcgggcccctactcggtgagtgccggagacagggcacccgcccaggcatgcaggcggcagtggggtgggttgcccctgccggcactgcatggacctcctgcctttgattgcaggccccctccccagcctacagcagctccagcctctacgcccctgatgctgtggccagctctggacccatcatctccgacatcaccgagctggctcctgccagccccatggcctcccccggcgggagcatagacgagaggtgggggccgcatcaccccagccatcctgtcccccaatgaggcgagcccctgtgggcccagggcagagttggggatgaggtggggctggccgagacgccagctcacctggcccccctcgtgtgcaggcccctatccagcagccccctggtgcgtgtcaaggaggagccccccagcccgcctcagagcccccgggtagaggaggcgagtcccgggcgcccatcttccgtggacaccctcttgtccccgaccgccctcattgactccatcctgcgggagagtgaacctgcccccgcctccgtcacagccctcacggacgccaggggccacacggacaccgagggccggcctccctcccccccgcccacctccacccctgaaaagtgcctcagcgtagcctgcctggacaagtgagtgccgcccacccctggccccacccacagcgcctggacgcacagccctgggcttcagccccgactgtcccagtggactgagcagggcagctggcgaggcaggaccctacccccaacctcggagctcggggctggggagggagacaggtgccagccagatcaccccacagtcccaaacgccacagaagccacgggcatgtccggacaggctgccgggccctgctctcagccacccctcctgctgccgccaccctcgccacaggccacgggccctggcaggtcgtgctgcccagacacatggcaggagatggtgagcagggccggcctccacacccccagcccctgcctgcaatgggggctcttgtttttgtatcttgcagtttggctcgcactccacagatgtctagggtcgcccgcctcttcccctgcccctcttcctctccgcatggccaagtccagccagggttagcgctgaccccactggggagggaggagggctctgccagcgctcgggccctcccacacagccgtggaccagacccagcctggccgggcatgagcgtcg

SEQ ID NO: 41328 - DNA, 2300 bp, Homo sapien
tcatgggggcctgtgaggggtaggggtagcgcagtgggggtgctgcctctgggtggggctggtcaggcctgtgaagggcctgaggtgaggctgtggctgggttgaggaaggccttggaagcctgtcaaggggcccctgagaaagcttgtgtaggattgtctgcagtgagctttgggaagcaccaccctttcccgactcctgttttcatcttggagatgggcatggataaagccagcatggtgtccttggtggctcaaagggggcaggggtcatactgctgtgaaacagctgtggttggtaggtcgtggtacaagaaggccaaccctgaggcttgggattgttctgctgaaaacaaatgggctcgaacttggggaagagggggcagtggagaggcccccagacagacagcccagagaggctgctgggcagttgggcctcgtgcccctgctcccgtcacggtgctggggctctggcggtgtctacacccagcctcctggttgtgggcaggcagtgagtggagtaggctggggagatgagccaagggcggtggtcagttgggaagacagctgccaacttggggaggagggaggctctggtggagaccacagcctcactgcatggcccaggatggacctggtgggtggatgcagggcgctcaggctggagctgggagaggcaggggctgggtggagctgcctgcccctgtgttccagtctagatgggcagagggaaaggtgtgagcatcctccctgcctgggggtcttggggactagtgtagacttgtccaggaactgtgtaggtgtagatggggcatgtgttgcaccaaccttggtcttggggagcaaaggttgggcttgttggcattgcctctcggcctccctggccctttgcctcctgggcagggccgtctgactgccgaccccaatcctagccagcttgccttgggtgccctgagggcgtctgcctcatggggctcctgccatggctctcaggcccactctccctgcctaggggctctgaggggcagatgtgcgtgtgcgggagggaaagggaggctctggcctctcctcttacaaagttgaggacttgctcaatgctgtgtgtggtgtcccagtggcacggcagatggggggtgaggcgggcctgcagctagtgtatatgagccagcactgcttcctaggacgtgtgggggcctggccaagctcttgctgtccttgtcctagctatatggcagtccctctattgggctgggtgccctcttccacctgtgcagtatgctgaggaccaggcagggtctgcctgtgcccctccagcgctggttgggagatcatgggtgggtgcctgcctctgttggaagcctctcagccagcaggcacctagccccgggtgggttcctttcagccccctcagcctgggcacacatcacaaacaagtggaggctacactggcacacgagggctggatccctgcctctgggaaagtgcatgtcaggctggtgtgtggctggcgcctggcctgcctttgccagtttgagcctgcacgtccaagtgtggggaccccttagctcccgggtgctgggatgggccaactgaatagggtggactcaaccctcaccacttggtccccacagtgctgggcagtgccccctggtccatccccaggttggaccctgcttgtggccccagtgctagtccacagccagagtacatggcagtggccagaggcctctggagagtgaggcctggagtgtccaagctccatgtaggtccagtccgggcagggccagctgggcttgcttctgaccctgacatgctcgtcccgctgcctggaggtgcaggctctgggggtccggagagctttgcccactgtaggtcttgaggccacagtgtggctctgcctggcttctcctcctggttgtaaataaggagtggggcctgagggcagacgaggacactggggtgggggcctggatcctgcgggggtggcgctgccctgctggtgcccactcagggggtgcttgtgttgtgctctgtcaggtgccatcgcctgcaggattctttattcagctctgacagtggcttcagcaactaccgtggcatcctgaactggtgtgtggtgatgctggtgagtgggacatggtgtcgggagcgggtctaggtccaggtggggctctgtcccaggctggcctttgcctgagaacaggctctgtcacccagggtgtccaggctggagcccctgtgggctggggtgtgtggagcaggctgcacctccatgtggctgccagcactggactgttgggg

SEQ ID NO: 41329 - DNA, 2300 bp, Homo sapien
tgctttccccattggctccaagcctggctctgctcaccaggcccgacccatcctccctggtggtccagtccaccctcccattgtctttctcctgtggccacttgccggctttgagttgggacgcgaccacaggttgagtcgttgatctcctctgcctagcatgaggtgctccgtggccaggtccagacctctctgagcttgctgtcagtccatactcagacaggtctgggcctacctggccacagagtgtgtctgccagcgactgcattcaacaaatgaatattctgagagactgggtaggagatggggctggtcctgaccgaccaaggcccatgtgtgaggggctcttgggtccagtgagggcggccccactcggcaggctacacaaagggcatctgccaggtagctccagcctgcctgatacctggttggcagcaacccacagcggcctgtggtgacaagaatatgtcaccaggggggcaaccaagggggcagccctgctggccactgttggtggaggtggtggaagaggacggagctcagaggcgaggctgtgaccagcccacgggagaggaccccacctcaggaggagcacctgtttgcttccagagaagtgctgcttgcccctgctcaccccagaggaatgaaggtgtttctagagtcagagtcctcagtgaaccctggcatcctgagatccaggatgttctcactccatgccctgtgcaatatgcacaccaagccaaggtgggccgcaactgtggctgttacagttgattagttgcttcatttaacatacaagatgtctggggcagtggctcatacctgtaatcccagcaccttcagaggccgaggtgggaggattgcgtgaggccaggagttcgagaccagcctgggcagaatagcgagacccccatctttagaaaaaataacaacaggccaggcgcggtggcttgcgcctataatcccagcactttgggaggccgaggtgggcggatcacgaggtcaggagatcgagaccagcctggccaatatggtgaaagcccgtctctactaaaaacagaaaaattagctgggcgtggtggcacgcgcctgtagtcctggctactcgggaggctgaggcaggagaatcgcttgaacccaggaggtggaggttgcagtgagacgagatcgcgctactgcactccagcctggcgacagagtgagactgtctcaaaaaaagaaaaaagaaaacaaaaaacaacagggcggttgcacaggccgtgcaaatgcacagaagcctcttgagtcccggcgatccagcggcccagacttctgacatcctggagaggctggcccacgttggaaactgggaggccctgagagttgagggacgtggagctccttgtggagagagtgggtgggctgagaagacaccaccaaggggcctgcgccctcgccctcgccctcgccctcctctcgccgggctctgcaggcggggaggtggagagcctgggagtcgcgtgcaaggcaggcgtcccggtgacgcagggcctggtgcatttctccagcttggtcttctgacctggcccttgtctgacgtccccctaaggcgaagaaaagcaggttcctgccggggtaaccagagggctcgcggagcagaagcgcgccagggacgttactgtaagctgcgtgcgcagaaaccaacgcgctgggtggcgggcgacgcgagccgccgcggacaccggcccggacagctggaccgtggcgcactaggcgcttcctaaatgattgcccggagtgactcgccgagaccccgtgtgtacacaagtgggacgaggggcgggcgcacagcggccaggaagtcggggcccagcgcacccctcagcggaccatcccgctccgtggggccggacaggaccccgggaccacgcgggagcgatgcaaggtccgttcccgctgcgcgcacttgcggcccgcagccccggccctgggagctgccacggctcccagggtgttctgcgccggtgcggccgcggcgactacgactcccagggtgctctgcgccggcgcgcccgcggcgactacgactcccagggtgccctgcgccccgtcagcctctccaggccccgcctcaggtcggccgcggactacaaatggacgagagaggcggccgtccattagttagcggctccggagcaacgcagccgttgtccttgaggccgacgggcctgacgcgggcgggttgaacgcgctggtgaggcggtcacccgggctacggcggccggcagggggcagtggcggccgttgtctagggcccggag

SEQ ID NO: 41330 - DNA, 2300 bp, Homo sapien
cccgcgcccggagctggccaccgctgcgggcggctacatcaacggcgacgcggccgtcagcgagggctacgcggcggacgccttcttcatcaccgacgggcgctcgcggcgtaaggcttccaatgccggctctgccgccgctccctccacagcctcggcggcggcccccgacggcgacgccggaggcgggggcggggcgggcgggcgcagcttgggatccgggccggggggccggggcggcacgcgcgcgggggcaggcaccgaggcgcgcgcggggccaggggccgcaggtgctggcggccggcacgcgtgcggcgagtgcggcaaaacatacgccacgtcgtcgaacctgagccgccacaagcagacgcaccgcagcctggacagccagctggcgcggcgctgcccgacgtgcggcaaggtgtacgtgtccatgccggccatggccatgcacctgctcacgcacgacctgcgccacaagtgcggcgtgtgcggcaaagccttctcgcggccctggctgctgcagggccacatgcgctcgcacaccggcgagaaacccttcggctgcgcgcactgcggcaaggccttcgccgaccgctccaacctgcgcgcgcacatgcagacgcattcggccttcaagcacttccagtgcaagcgctgcaagaagagcttcgcgctcaagtcctatctcaacaagcactacgagtcggcctgcttcaagggcggcgccggaggccccgcggctcctgcgccgccacagctcagccctgtgcaggcctagggcggcggggcctcccccagccaggtcggctctcagcaatacggccccccagggaagtcttcgctggcgtccgggtggaggggccggagggcgggcccctcctcacagcaatagggggaggggggcccggtcccaccccgccccgcccgccaggggccttgccggccccttcaagcaatagggtcccgaggggagacccaccccgagccccctcccctcccctccagggtgcccccggctttctcccagcaatagggtcgacgagacctagaaccgaacctcatctccgagttgggtctctgaagacgggggtgaggtgaggtagggagcgccctccttctcccgcctctgcgcccctggatcgcgtcgcagggactcaggtcttccccaccccttcccaagccttctagcgcagggcctgcggcccagacgtccagggagccggcccctccccggcagcaggccggggcggagcaggagcgggcgggcctgcagggacgcccctgcctagcagccttcgcggaactcccggcagtgttagacgcgttgtgggtcggggagaggggcggacggcggcaccccctccctcgggttgcttctggggcctcagtcggagccgccctcctaccctcgcctcgcatcctctgccaaatccgaattcttccagcccagcttcccgggctctgtcctccatatcgaataataatgacacatatcgaatcgcatggacttatccgacctcctcagaccccgcttccgccctgccccgggcccccacccccccccccgtaccccaggcattcgtgttggaggacggattcccggggccggcaggcaggcctgggcgctgccctctacacacctctgtcttcgctttgcgggtaaagccccctgggggggttgcggacgcgtcgggtttctttttctgtatttgtacgttttatttatgaacggattgcactcgggtcagggagggggcgctgaacccccatcttgcccgccgacgccgggggcctgggatgtccgggattactttccacgccccgaggcccgcccctagctgggagcctctagggagcctcaggccccgcctctccgaggcaggcccctcccctgagacccaggccccgcccctgagacccaggccccgcccccactcggttgccaactttcgcccgtctatgccaaagcctcggcggcgaccccgccccaagggcccgccccattggccgccgcctttgtgacgtcactgcatgcagccccacccctcctcccgatcctacccggggctgcccgctccccctccctcttaggtagtccgaagccgactatagagcaataatgcgcactgcatgcgaagctgccgccgcctctagagttactgagaatcaggtatcccctcgccctacccaccccataggcccctagatcagggacgctgcgcggggccggccgcgcagactttctccccacccctccccgacccccacggcagagcccggcggctgtaatggttcca

SEQ ID NO: 41331 - DNA, 2300 bp, Homo sapien
tcctccatgcactctgcttctcctccgaactccctctcaccatcctgcacccttgggtcctaccctgttcaacattgccctctcctgctcacaccctaacccctttcagggccttcccaagcccctgaactgtgcagagagggccagggcgtccactttcacagggacgagctgcaggagggcagcatcacttataccggtagctgcagttgctccccaggcacaagatggatctcataacctcaaagtcacaaatgcacgcccctcgcgacgctctgcctccttcagggctacacccagtctcccagcatgatcagcccttgtgtgccctcacagggtgggctgcacactgatgtgccgaactcaccacctcctcactcacgcagggtcacacatgcagtcaccccggacacactctcaagtcacatggtgcacagcggcctcagagtcacatggtcccatgtagtggcacacaggcaagcacacacacacacagggtcacacacaagcgcacacggtcacatggccacacacagtcacatggacccacacaggctcacactcctgcaggtcacacttgctctgccaccccatgctgctggcactcctgtccccctctcctgcatgctgacagttgtccttgaacttgggcacccttacacaaagagcctccccctgcctcccacaccttgggcgtcccttgctcacagcctcctccctgcttcctctccctgacccaggcttcagggaagagactgctgctgcctctgctggccctctgctctgacaggtgggcggccctgttggaccccctgcctactccctggagctccctgcattccccagctaaccctagcaggtgtcctggtgcagtcaaggaagaggagagggtggcgaggcggccctggtctcttgagtgtaggtctgtgtgtgccggcatggctgggtcccgtcatggcagcgcccatgcggctgtgtctgtcccagcatgggtcaggatgtgggtccatgtgtgcgtttgggtacctcagttcctgatcctcttccccaccctctgtccaacgtcgacactctccctgcccagccttggcctctgtgttccccttcctcccctctaccgtccaggctccagccacagactcttgccgtttctggttcccttcagtctgtttccccgggccctgccctccgcccccacactctggccctccaccgcttccagcaaagccccaggccccgcgccctggtctcagaccagcgctcacctttatcgtgcagtggcgcgccgaggtcgctgcgggcgcgtccgtaggcgctctccaggtcggccgaagagaacgcgtcaagtttgaccttcttgaccaggaaggacctgggcatgattcctgcggggctccggcgctgtgggcctgcggagccggggcttgggggggctgcggcggcagggccccgtcaccatccgaggagcggcggaggcagcgcgggtccccactctggcctttggatgctgccgcgcgagtggtgtcctctctccttgctgccctgcgtctcctccgttgcccctccggatccctcttcttcctccttccttcaatccttccttccttccttcaatccttccttccttctctcctcttctctcctctcctcttccttccttccctcctctggtcccggcttcccagcccgcagtgccgcccctggacaggcgggggaggaggctgggggggcggagagggggggagcggctccgtcccgggcctggaggctgcgagtgggtgcagggctggcccggctcggtggcccccttcccctccccccccccgccgccgcggcggagcctcagtcagcggccccccatgcccccgggggcggcggcgccgggcccggagaacgcggtggcagcggcagcgccggcagcttcagcaccgcggccagcgccggcctgggcagcaccgcggccagcgcccgggcgcgctcaaccggcgcgggcggagaggggcggtccgcgggggtttggccgccgggcaggggtcctcggcgggggtctctgggaggcttgctttattgttctgcagccggagcgagcggcagtggcgacggcggcggcggcggcggcggcggcggcgggcggggggcgggggtcctggggggaggggtgcgcagggagggcgggccgagggagggagggagggagggacaggggctccgggggcggggctcggcgctcggactgctcctgggcccggcctccagagcccgcagccgcctctgcctgcggcccggcccagcctctggct

SEQ ID NO: 41332 - DNA, 2300 bp, Homo sapien
gatcccgcccccgcccccaccgcgagcctagccggctgccgctcggagataagggggcggccgcgccccgcccccacccctcgggagcgcctgccacgcaagatgaatgtcccgccgctgccggggccggggcggctggcacaaagcgggtccgtggtctccgccgcaccccccgcgcgggcgggccgggtcacacccacccgggctccgcgcggggccgggcggccgggggcggggcgctgagctcagcaagtgcagcgcgcccccgcaggccgccttccccggggcccgcccgccgcgcgctcccagccgctgtccgcgggtccgccccgcgcaaggtcattttgcgccgcaacgagcgcgctccagtatcgcacgcgctcccggcacacccgcgcccggacgctccccggggccgcccccgcgaccttggtccccagcggcagcggggcgcgtgggagcgcgctcggagcccgtagacccggaccaccgggcggggcgggtgaggggacaatggcggcgccaggccctaattggggacagaggcacccgcgcgcggccattgtgcggcccggagccccggagcccccgcgcccggcgccccgccattggccgctgagcctgacgtcatgggggctgcaaacgctgggcgggcggccgaggaaagggttatccgcctggttgcggggctgccgtggggagctgcagccgcgcggaagggcggaaaacccccaaagcagcagaatttctggagcagggtcgtggcagcccctctccagctccacacccggctcgcagcgacgccgctgcgccgcacacccgcccggggggagagaggcgggggcgggtaggcccctccagcgtgcacggggtcagccggggtgaccgagcggcgggagccactgcggcacagggcgcgcgctgcgctttcgctgcctcagcacttgctccttcggctcccgcctcccccgcccgcccccgcagatcccgcgccccaggccccgagcgaggcaggcgggactggggtcctccctacgttcctccccacaagaccccgagtccggggcgcttgggtcccaggcctggctccatttctccccacacgcccgacaatgctgctggctgccgggccgcggttccccgagccgcgcgggggaattccccactcgcgcaggctgaggcatccccgggacccctcccaggagacccaggccggggctcggcccagcgcagccatttccgccggcctctcccccacctccctccccctcccccagctcctgggctttaaaagccagaggctgggccgggccgcaggcagaggcggctgcgggctctggaggccgggcccaggagcagtccgagcgccgagccccgcccccggagcccctgtccctccctccctccctccctcggcccgccctccctgcgcacccctccccccaggacccccgccccccgcccgccgccgccgccgccgccgccgccgccgtcgccactgccgctcgctccggctgcagaacaataaagcaagcctcccagagacccccgccgaggacccctgcccggcggccaaacccccgcggaccgcccctctccgcccgcgccggttgagcgcgcccgggcgctggccgcggtgctgcccaggccggcgctggccgcggtgctgaagctgccggcgctgccgctgccaccgcgttctccgggcccggcgccgccgcccccgggggcatggggggccgctgactgaggctccgccgcggcggcggggggggggaggggaagggggccaccgagccgggccagccctgcacccactcgcagcctccaggcccgggacggagccgctccccccctctccgcccccccagcctcctcccccgcctgtccaggggcggcactgcgggctgggaagccgggaccagaggagggaaggaaggaagaggagaggagagaagaggagagaaggaaggaaggattgaaggaaggaaggaaggattgaaggaaggaggaagaagagggatccggaggggcaacggaggagacgcagggcagcaaggagagaggacaccactcgcgcggcagcatccaaaggccagagtggggacccgcgctgcctccgccgctcctcggatggtgacggggccctgccgccgcagcccccccaagccccggctccgcaggcccacagcgccggagccccgcaggaatcatgcccaggtccttcctggtcaagaaggtcaaacttgacgcgttctcttcggccgacctggagagcgcctacggacgcgcccgcagcg

SEQ ID NO: 41333 - DNA, 2300 bp, Homo sapien
cctggtccgggagccacccctcgtcccggaggcttgggcagccacatcaggttcaacagccgcagcacctgggggcaaggtccaggctgtagatgggggagggtgtgacaggtgggagaggcagggcgccaggtacctggagctgagggcagcctttctgcagagcctcgacaggcagctgaaggggaatgctattacggttgatgccggtgctcacctccaggacctggagctgggggcagcagctgccctgcagagatggggggagggggtaggtcacagggtcagtggcctggcagtccccagctcagcatctgcctctgctcccaccaatgccaacttaccagcagtgcgcccaggatggctgtcgtctgggagctgtaggtcagccacaacttgcgcattcgggaccctgcctcctccaagaagctcaccacagctgtggactccacctggggccccaatacaagagcacccgtcaccccggcctgggttttttcagggccccttgggacacagggctcaccatggagtgctgtaggtccaggctatggagctggcagcaggctttggctagcatgaccagagcgtcagcagtcacaccgtggcagccggagagcttgaggaaagtgagccgaggacagcactcacctaccagctgcggggagacagaggggcagctggggttgggagacgacaggctaagatccacaagggaaacagacaagtggctggtgccaaccccactctaccgccttagctgtgacctcctttctgcccatgccaggcctacttgggtgtccccgcctctgatacctccctgctggaggaaacagcaggaaaagagaaccaggcaggcaagcagacatccccacggagcagcgttgggcccccaaggtgcctgacccacttcctagagtactgaacagtcccagagtgtcacagctgatgtgcaggacagcctggagctctcaccttcaacacggggtgtacctgagacttccagtggatgagggtcagcctctggagctgtgaaaacctgggccgacagcggaggcagagctgcactaatgttcccacacgagtccttcccacccaacaccttggtgcagggagacggaaggagcctggagccaggggtaaggaagagagggaacccctcaccgattgggcataagccactccagggaagcaaggagcttcttctccgccttgaccccgcccttggcaggccggccgaccagcggggacgacagggtcacggtgtgccagagcgcgggttgggaagcggcctcctgccagcggcggcacacgcgcgcagccctgggaggacagcgtgctgagggtgccggcccctccgtaggcgatgcccccctctcgcagcgcagtagacaccccggctcaaagccgggctcctgggactccaactgggcgcctaaggggctgcgctctcggactgagcggtgcgcgctccgatgctttcgccctccgcccccgcccgggccaccgctcggaccacgtctggcccaagccgctacgctcggcggcgggcccggcaccagcgttacctgcccaggaagggcatggggccgtccgccgccaccaacaacccgaaaatctgcaccaggatttccaagggaatgcggtctccccagcccgcgtcgggcccttcctcgggcgtgggcgtgggtgccggtgcgggtgcgggcgcggccgccgcctcggacctgagcccggccttgggcttggccgcggcgctggggccccggggcggctgccggggagtgcggcgggaagcgcgccgctgtgcgcggggccgggcggggccgggttcggacagcaccagcagcatgctgtcggactgcagcaggtggtaccccgagcccctcggcgccagccggtcccaccaccagtcctcggccgagcggggccgcggcgctgcccgggctctgcgtcggacctgccgggaggctggggcagccatgaccaccgacggcgctcggggaagccccagggagcggaacgggcgaggcttatagaccgacaaccccccggttcctctcaacgcccgcccgcccgccgaccagcttccggggcgggacttccggtcgtgggccatgccgggggcgggcccggaaccgccacgggtgagtcgggtcgtggctgctgccgggtcctgcgcgctccggactgaggtggcgtccctgggccggacggcggtgtcccggcgtggcgggaagccggcactggagcgggagcgcactgggcgcgggaccgggaggcgcagggaccggacggct

SEQ ID NO: 41334 - DNA, 2300 bp, Homo sapien
ggccgcccagccctgccaaggacctgcagtgagcgagcagaatgtcagggctgactgcgccaggacctggctcccagccctgagttccacccgcacaggggctgggggtccttgtgtacctgcacagcacacccatggccaggaagcaggccaggggattggcagcactgcccagcaccacagccaggtggtaggccagacgcccgtagggtaagcaggaaaagctctgcacggcaggcagcacgccattggtcagcgcgttggtggcggccaacaggcccagcaggcaggcactgcgggctgatagaagctgataggccttagggtctggaccaggggtggtgcctgctgcctggcttggtggctcttgcagtggtgaggactcttccacctcttcctctgctcctggggctcccacctggaggcctgatcctaactcccctgtgggtacagatggtggtggcggcaacagcagcagaagaccctggaaggcagcagctgaagcgaccagaagggcagtcagtgcccagaagaaggtgctggcgggaaaacgctcaaggaagtcgagcggggggccaggggtgccgttgatgggggctggcgggcactcgaggcggcccacaccctgcactagggccagcacgcagggcagcagggcactcaggccttgacccaggaagaatgaccgtaagaagcgaggtggcaggtggctcaagaagggcaggaaagtgacattcgaggcacagcatgccagtgccagcacaaaggccagtgctaagaaggccacagaatgcaactgtcctgccactggggccacatggtgccacagagaggccagcagggctgtgcccaccatgcccagcacctgcaccacccggatggggacctgctcgtcctttcctggggccagcctcctccagagggtcaccaccagcagacccaggttccccagagccacaagcacagagacgtaagaggggaggctccaacctgcagggaagggaggaggccatgtcagggtcatgatgcccaagggaggaagagtgccaaagcccaccttcctgggcacacctgcacctcctcccactcaccctctggaagctctctgaccaccacaggtagctccacccagatcccactgaccgcagcccaggagtcttgggcacacctgcacctccctcccactcaccctctggaagctctttgaccaccacaggtagctccacccagatcccattgaccgcagcccaggagcccatgccgaagagagccaccagcaggtgggtcagcaccggacgggcgggcgtgggtgctgccattcagcccaaggctgggcccttccaggtcagggcaaaggtcacagccagttcttttcccacctagggccagacacgctttggctctcctgggaagtgaagacttcttctagcttgaaagaaacagagaaacagataggatgcagagccggagtcagaacagggtgagaccaggggaactgggggagccccgggcaggagcgcagatggggaggattggctaaaacgtacccagcgggaccgccggcaggcagggaagcaggaagccggcccgagtcgctgcggccccaggggaggaggccgaaggagcgagtggagccctcctctccagggagaggcggggctggagtcaacgccaccaccaccccaagccggacgccgggaaagggcgcctaccaggaggagccacgcacaccccagggcttcacggtgcccgcgaccgcaagagccaagtcagatcccaggggagtggccgggacggctctgctcggaggggcgccgccctctcggtaccgtcaggtgggcgactcgggagccgtccggtccctgcgcctcccggtcccgcgcccagtgcgctcccgctccagtgccggcttcccgccacgccgggacaccgccgtccggcccagggacgccacctcagtccggagcgcgcaggacccggcagcagccacgacccgactcacccgtggcggttccgggcccgcccccggcatggcccacgaccggaagtcccgccccggaagctggtcggcgggcgggcgggcgttgagaggaaccggggggttgtcggtctataagcctcgcccgttccgctccctggggcttccccgagcgccgtcggtggtcatggctgccccagcctcccggcaggtccgacgcagagcccgggcagcgccgcggccccgctcggccgaggactggtggtgggaccggctggcgccgaggggctcggggtaccacctgctgcagtccgacagcatg

SEQ ID NO: 41335 - DNA, 2300 bp, Homo sapien
agagcccagggcagttccaagaagcaatgtggggtagtctgggctcagagggcatgactgtacaatccgtgagaccagcctgtggtgggtaaggacctgcccagggcctggggagaggcagcctgttaaacaggccaggccatggctctagttcagggaagcatccacacagagagatgtgctcaaagaattaatgccaactcattaaatacaaatgttttattacgcaaaccacatgtaggtcccaggctcaggggcttaccctacagcccccactggtccctggctccaagcctgctccttgcccttgcccaccctggaaagccaggatctcctatggagtgtgtaggtgtccacgagtgtaccggtgtgcgggcctcctgggctgcaggcactcaggcatggtggcagcattgagggaaagacaggtgttggggagcggggtccccacctgcccaggctcaggagtcacaggggtctgcacagtcctttctgctgtggaacacgtgatagatgctggtcggggggaacatagcaacagcgccgagcagagagcccacctggatggccacgccggctgccagcaatgccggccggcccccgccatgcagcagggagctggctgccaccttcacgtaggagaacacgccaagacacagcacccacgacagcacctgagggggacacagcaccagctgagcgtgagatgtgcctgctccagggcaacgcccccccaccccacttcatgtccccctgtgctcaccacgaggaccacccccgccgaggtgcccaccaggggcgggcaggggctcaggactgccagcgccatcaggtagcccccacagaacacgcccagcagagagaggccgcccagccctgccaaggacctgcagtgagcgagcagaatgtcagggctgactgcgccaggacctggctcccagccctgagttccacccgcacaggggctgggggtccttgtgtacctgcacagcacacccatggccaggaagcaggccaggggattggcagcactgcccagcaccacagccaggtggtaggccagacgcccgtagggtaagcaggaaaagctctgcacggcaggcagcacgccattggtcagcgcgttggtggcggccaacaggcccagcaggcaggcactgcgggctgatagaagctgataggccttagggtctggaccaggggtggtgcctgctgcctggcttggtggctcttgcagtggtgaggactcttccacctcttcctctgctcctggggctcccacctggaggcctgatcctaactcccctgtgggtacagatggtggtggcggcaacagcagcagaagaccctggaaggcagcagctgaagcgaccagaagggcagtcagtgcccagaagaaggtgctggcgggaaaacgctcaaggaagtcgagcggggggccaggggtgccgttgatgggggctggcgggcactcgaggcggcccacaccctgcactagggccagcacgcagggcagcagggcactcaggccttgacccaggaagaatgaccgtaagaagcgaggtggcaggtggctcaagaagggcaggaaagtgacattcgaggcacagcatgccagtgccagcacaaaggccagtgctaagaaggccacagaatgcaactgtcctgccactggggccacatggtgccacagagaggccagcagggctgtgcccaccatgcccagcacctgcaccacccggatggggacctgctcgtcctttcctggggccagcctcctccagagggtcaccaccagcagacccaggttccccagagccacaagcacagagacgtaagaggggaggctccaacctgcagggaagggaggaggccatgtcagggtcatgatgcccaagggaggaagagtgccaaagcccaccttcctgggcacacctgcacctcctcccactcaccctctggaagctctctgaccaccacaggtagctccacccagatcccactgaccgcagcccaggagtcttgggcacacctgcacctccctcccactcaccctctggaagctctttgaccaccacaggtagctccacccagatcccattgaccgcagcccaggagcccatgccgaagagagccaccagcaggtgggtcagcaccggacgggcgggcgtgggtgctgccattcagcccaaggctgggcccttccaggtcagggcaaaggtcacagccagttcttttcccacctagggccagacacgctttggctctcctgggaagtgaagacttcttctagcttgaaa

SEQ ID NO: 41336 - DNA, 2300 bp, Homo sapien
agatggggtttcaccatgttgcccaggctggtctcaaactgacctcaggtgatccgcccacctcggcctcccaaagtgctgggatgacaggcacgagccactgtgcctagccccttctttctttaatgacagttctggagaccaaagagactgggaacacagggttttgggaacgtgggagttctgggaggtgacggacaggcttgagagcgggcccgcactgaagggctagagtgagctgcatttctgggtcttggatggggcaggggctgtgggcacttgggacctggggaaagctttcaccacatccctgggccctgtggctcagctgtgtgacatcgactccccgccacaccctcgggggcaggatgtcacgccccatccagagccctgcagccgggcaggatcctaggccacagtgtgtctcccgggatgctaaaacaggacagaggtcattccttcgttcattttgggggtgtttcccaagagtgggtggcagagtcctccatccgacccttcccacctggggcagccatgtcggttggtggccaagcctccctgtgatggcagtgcccgggcccctaggcaaggcatggcatatcccaccatgcagctcacactttgctcacgtcacggcacagatgcctggaggccttactgtgtcagcccacatggctcttctggacctgttccattacagaggaaaggttgccgagggaggcagatgttagcaaatgagaacactccagaaagcccggctccgggaggggccccaggtccatctgtgaagttctagtctgggctttggggatgagggactgaagactggaggccaatccctgtcctgctagcaaagtgatgcagggcacacagaatcattgagcccagcaaacttgaccttggggatgacagagacttcacaggagacacgccataacagaaggggcactaaagggctggaggcaccggctttccctaggcagggaccaccccattgaagagatgcctttgggttcagtcccagtgggaggagcaagaggactgtaagaagatgaggacgaggagccatgtgggaggaggaggggccacttgtgggaggaggaggggccccttgtgggcggaggaggggtcactggtgggaggaggaggggccactggtgggaggaggaggggccactggtgggaggaggaggggccactggtgggaggaggaggggccacttgtgggcggaggaggggccactggtgggaggaggaggggccactggtgggaggaggaggggccattggtgggaggaggaggggccacttctgagagttgtgaaaaggccttgaggcctgaaaacctcccactttcagctactgtggcacccttaggccaagctgactcaggagccctcgtggattccacaaggatggtgttttgtttcatgctcacagtggggtctaggagggcttgcaggcagtaagtgccaggacccgtgttggcgcccgaggatccctggcatgttcggggacggtgaggtcagtccagcagcggtgaggtcagtctagtagcagtgaggtcagtctagtagcggtgaggtcagtctagtagcggtgaggtcgtcagtccagcagtagccttgctggctgcatggcatgcccgggcctgggcccctacccagccagggctgtcacagagtgagtagcagcagcctagggcactgcaggaggctgtgacgtcactgacgttcccataagaagctaagtgacagggaccaagggtggctgcaaagtgaaccccagaatctgaagccctggccctgggaaggtctccccatgggcacgggagctgctccaggacccctttggccactctcctggttgtcttccagttcccagtcaggggcgtcatcttggccctcacacaggcaggtggtgagttggagtcctgaggttaaagagattcacgctaatcacactatagcacggagtgttaaagagaggcggataccgggccgtgaggacctcaggaagccctcagccctccccggattatccacgtgcttctcacagcggtccttccggcaggtgcctgcccggggaatgcgcagtgcgccgagggcgggactggaaccctccgctctcaggaggcgcggtccgggcgccaaaaggtaagcctctgggggccgccaggggacgctgccccgccgcggaggccggcacgactcggggcgtggcctccagcctcgcccaccgcccacggggcggggctctggctccggcgcgtgcgcactacgcgccctcccgcagggcct

SEQ ID NO: 41337 - DNA, 2300 bp, Homo sapien
ttgagagcgggcccgcactgaagggctagagtgagctgcatttctgggtcttggatggggcaggggctgtgggcacttgggacctggggaaagctttcaccacatccctgggccctgtggctcagctgtgtgacatcgactccccgccacaccctcgggggcaggatgtcacgccccatccagagccctgcagccgggcaggatcctaggccacagtgtgtctcccgggatgctaaaacaggacagaggtcattccttcgttcattttgggggtgtttcccaagagtgggtggcagagtcctccatccgacccttcccacctggggcagccatgtcggttggtggccaagcctccctgtgatggcagtgcccgggcccctaggcaaggcatggcatatcccaccatgcagctcacactttgctcacgtcacggcacagatgcctggaggccttactgtgtcagcccacatggctcttctggacctgttccattacagaggaaaggttgccgagggaggcagatgttagcaaatgagaacactccagaaagcccggctccgggaggggccccaggtccatctgtgaagttctagtctgggctttggggatgagggactgaagactggaggccaatccctgtcctgctagcaaagtgatgcagggcacacagaatcattgagcccagcaaacttgaccttggggatgacagagacttcacaggagacacgccataacagaaggggcactaaagggctggaggcaccggctttccctaggcagggaccaccccattgaagagatgcctttgggttcagtcccagtgggaggagcaagaggactgtaagaagatgaggacgaggagccatgtgggaggaggaggggccacttgtgggaggaggaggggccccttgtgggcggaggaggggtcactggtgggaggaggaggggccactggtgggaggaggaggggccactggtgggaggaggaggggccactggtgggaggaggaggggccacttgtgggcggaggaggggccactggtgggaggaggaggggccactggtgggaggaggaggggccattggtgggaggaggaggggccacttctgagagttgtgaaaaggccttgaggcctgaaaacctcccactttcagctactgtggcacccttaggccaagctgactcaggagccctcgtggattccacaaggatggtgttttgtttcatgctcacagtggggtctaggagggcttgcaggcagtaagtgccaggacccgtgttggcgcccgaggatccctggcatgttcggggacggtgaggtcagtccagcagcggtgaggtcagtctagtagcagtgaggtcagtctagtagcggtgaggtcagtctagtagcggtgaggtcgtcagtccagcagtagccttgctggctgcatggcatgcccgggcctgggcccctacccagccagggctgtcacagagtgagtagcagcagcctagggcactgcaggaggctgtgacgtcactgacgttcccataagaagctaagtgacagggaccaagggtggctgcaaagtgaaccccagaatctgaagccctggccctgggaaggtctccccatgggcacgggagctgctccaggacccctttggccactctcctggttgtcttccagttcccagtcaggggcgtcatcttggccctcacacaggcaggtggtgagttggagtcctgaggttaaagagattcacgctaatcacactatagcacggagtgttaaagagaggcggataccgggccgtgaggacctcaggaagccctcagccctccccggattatccacgtgcttctcacagcggtccttccggcaggtgcctgcccggggaatgcgcagtgcgccgagggcgggactggaaccctccgctctcaggaggcgcggtccgggcgccaaaaggtaagcctctgggggccgccaggggacgctgccccgccgcggaggccggcacgactcggggcgtggcctccagcctcgcccaccgcccacggggcggggctctggctccggcgcgtgcgcactacgcgccctcccgcagggcctgctgggctgcgagacgctaagcggcgccgggcgggagaagagcggagcagtggtcggagatgtggcgaccggtgaggactctcccggcccggggcgcccgagatcctgcacaccagccccagagacccgagacccgcaagtccccagaccccgccctagagaccctcggggctttttccctctttttttttgaggcagggtct

SEQ ID NO: 41338 - DNA, 2300 bp, Homo sapien
ctagagcccaggaattcgagaccagcctgagcaacacggcgagaccccgactctgctaaacagagtcggccgggagcggtcacgcctgcggtgtcagctacttgcggggccgaggcgggaggatcgcctgagtccgggaggcggaagctgcggtgagcggagatcgcaccactgcgctccagggcgacagagcgagaccctgcctcaaaaaaaaagagggaaaaagccccgagggtctctagggcggggtctggggacttgcgggtctcgggtctctggggctggtgtgcaggatctcgggcgccccgggccgggagagtcctcaccggtcgccacatctccgaccactgctccgctcttctcccgcccggcgccgcttagcgtctcgcagcccagcaggccctgcgggagggcgcgtagtgcgcacgcgccggagccagagccccgccccgtgggcggtgggcgaggctggaggccacgccccgagtcgtgccggcctccgcggcggggcagcgtcccctggcggcccccagaggcttaccttttggcgcccggaccgcgcctcctgagagcggagggttccagtcccgccctcggcgcactgcgcattccccgggcaggcacctgccggaaggaccgctgtgagaagcacgtggataatccggggagggctgagggcttcctgaggtcctcacggcccggtatccgcctctctttaacactccgtgctatagtgtgattagcgtgaatctctttaacctcaggactccaactcaccacctgcctgtgtgagggccaagatgacgcccctgactgggaactggaagacaaccaggagagtggccaaaggggtcctggagcagctcccgtgcccatggggagaccttcccagggccagggcttcagattctggggttcactttgcagccacccttggtccctgtcacttagcttcttatgggaacgtcagtgacgtcacagcctcctgcagtgccctaggctgctgctactcactctgtgacagccctggctgggtaggggcccaggcccgggcatgccatgcagccagcaaggctactgctggactgacgacctcaccgctactagactgacctcaccgctactagactgacctcactgctactagactgacctcaccgctgctggactgacctcaccgtccccgaacatgccagggatcctcgggcgccaacacgggtcctggcacttactgcctgcaagccctcctagaccccactgtgagcatgaaacaaaacaccatccttgtggaatccacgagggctcctgagtcagcttggcctaagggtgccacagtagctgaaagtgggaggttttcaggcctcaaggccttttcacaactctcagaagtggcccctcctcctcccaccaatggcccctcctcctcccaccagtggcccctcctcctcccaccagtggcccctcctccgcccacaagtggcccctcctcctcccaccagtggcccctcctcctcccaccagtggcccctcctcctcccaccagtggcccctcctcctcccaccagtgacccctcctccgcccacaaggggcccctcctcctcccacaagtggcccctcctcctcccacatggctcctcgtcctcatcttcttacagtcctcttgctcctcccactgggactgaacccaaaggcatctcttcaatggggtggtccctgcctagggaaagccggtgcctccagccctttagtgccccttctgttatggcgtgtctcctgtgaagtctctgtcatccccaaggtcaagtttgctgggctcaatgattctgtgtgccctgcatcactttgctagcaggacagggattggcctccagtcttcagtccctcatccccaaagcccagactagaacttcacagatggacctggggcccctcccggagccgggctttctggagtgttctcatttgctaacatctgcctccctcggcaacctttcctctgtaatggaacaggtccagaagagccatgtgggctgacacagtaaggcctccaggcatctgtgccgtgacgtgagcaaagtgtgagctgcatggtgggatatgccatgccttgcctaggggcccgggcactgccatcacagggaggcttggccaccaaccgacatggctgccccaggtgggaagggtcggatggaggactctgccacccactcttgggaaacacccccaaaatgaacgaaggaatgacctctgtcctgttttagcatcccgggagacacactgtggcctaggatcctgcccg

SEQ ID NO: 41339 - DNA, 2300 bp, Homo sapien
tcatctcttctggaagggggtgggtaagatgcgtgtcaaggcctctgccccgcccccccgcagtcctaaccgcagggacagagcaacgggacccggcggcgacgtgggagcggggagacgccgagagcctgagagagggggcctcggagccatggggggcgcgcccctgagacgacgcaggggcgctcagagcagagcccggcctgcagcccccgcccgcccgccgcctcagggcagggcaggcccggcggggaggcgagcgaaggaggtccggggcagcaggctgggcagggaggcgtccgtgattccgggaggccgcctcgcgaggggaacggcgcctgaggcttccccgcggggcccctgccctctggagatcgcgctctccggggcgccgggcacccgcctccgggctgggcggaggggcccctgcggctcccggtgcaggcggcgtcagggctgcgggcgcggctcccgcctgaaatcccagctctcggggaggctgaggcgggcggatcgctagagcccaggaattcgagaccagcctgagcaacacggcgagaccccgactctgctaaacagagtcggccgggagcggtcacgcctgcggtgtcagctacttgcggggccgaggcgggaggatcgcctgagtccgggaggcggaagctgcggtgagcggagatcgcaccactgcgctccagggcgacagagcgagaccctgcctcaaaaaaaaagagggaaaaagccccgagggtctctagggcggggtctggggacttgcgggtctcgggtctctggggctggtgtgcaggatctcgggcgccccgggccgggagagtcctcaccggtcgccacatctccgaccactgctccgctcttctcccgcccggcgccgcttagcgtctcgcagcccagcaggccctgcgggagggcgcgtagtgcgcacgcgccggagccagagccccgccccgtgggcggtgggcgaggctggaggccacgccccgagtcgtgccggcctccgcggcggggcagcgtcccctggcggcccccagaggcttaccttttggcgcccggaccgcgcctcctgagagcggagggttccagtcccgccctcggcgcactgcgcattccccgggcaggcacctgccggaaggaccgctgtgagaagcacgtggataatccggggagggctgagggcttcctgaggtcctcacggcccggtatccgcctctctttaacactccgtgctatagtgtgattagcgtgaatctctttaacctcaggactccaactcaccacctgcctgtgtgagggccaagatgacgcccctgactgggaactggaagacaaccaggagagtggccaaaggggtcctggagcagctcccgtgcccatggggagaccttcccagggccagggcttcagattctggggttcactttgcagccacccttggtccctgtcacttagcttcttatgggaacgtcagtgacgtcacagcctcctgcagtgccctaggctgctgctactcactctgtgacagccctggctgggtaggggcccaggcccgggcatgccatgcagccagcaaggctactgctggactgacgacctcaccgctactagactgacctcaccgctactagactgacctcactgctactagactgacctcaccgctgctggactgacctcaccgtccccgaacatgccagggatcctcgggcgccaacacgggtcctggcacttactgcctgcaagccctcctagaccccactgtgagcatgaaacaaaacaccatccttgtggaatccacgagggctcctgagtcagcttggcctaagggtgccacagtagctgaaagtgggaggttttcaggcctcaaggccttttcacaactctcagaagtggcccctcctcctcccaccaatggcccctcctcctcccaccagtggcccctcctcctcccaccagtggcccctcctccgcccacaagtggcccctcctcctcccaccagtggcccctcctcctcccaccagtggcccctcctcctcccaccagtggcccctcctcctcccaccagtgacccctcctccgcccacaaggggcccctcctcctcccacaagtggcccctcctcctcccacatggctcctcgtcctcatcttcttacagtcctcttgctcctcccactgggactgaacccaaaggcatctcttcaatggggtggtccctgcctagggaaagccggtgcctccagccctttagtgccccttctgttatggcgtgtctcctgtgaagtc

SEQ ID NO: 41340 - DNA, 2300 bp, Homo sapien
tcccagggctcccaccctgatatcctcctaactggggccaggcctggggacacccctctaccccatcctcttgcctaaatctcccccaggagcccagtacctgctcaacagatacccaggatgtcccccacttcctgccttaactgggctctcttccctgcagaccttgcctccccaggccttggagacccaccctcctggtgtcctcctctcttcctagtggacctcaggctgcaggtgaccttgaccctcctgtgacctctgctgcctcagccctgcccccttgctgccatcctttaccttcacagacagccttggaaccccatctctccagaggatgccaccgtccatactgtcccctaccccatctcacctgggcacccttgagggtggcagggagtgagggtggcatggacacaggctgcccattctgcagatctttttttgttttttgagacggagtctcgctctgtcgccaggctggagtgcagtggcgcaattttagctcaccgaaacccgcctcctgacttcaagtgattctcctgcctcagcctcctgagtagctggcactacaggcacgcaccaccatgcccagctaatttttgtatttttagtagagactaggtttcaccatgttggtcaggatggcctcaatctcttgactttgtgatctgcccgcctcggcctcccaaagtgctgggatcataggtgtgagccaccaagcccagcctcttttttttttttttgaaaccgagtttcgctcttgttgcccaggctggagtgcaatggcgcgatcttggctcactgcaacctctgcctctcgggttcaagcaattctcctgcctcagtctcccgagtagctgggattacaggtgtgcaccaccacacccggctaatttttttgtattttaagtagaaatggggtttcaccatgttggccaggctggtcttgaactcctgacctctggtgatccactcacctcggcctcccaaagtgctgggattacaggcgtgagccactgtgcccagctctgcagatcttttttggacggagtctcgctctgttgcccaggctggggtgcagtggtgcaatctcagcttactgcagtctccacctcctaggctcaaacgatcctcctgcctcagcttcctgaggagctgggaccacaggtgtgcaccaccgtgcctgcctaatttttttgcatttttggtagagacagggtttcaacatgttgcccaggccagtctcgaactcctgagctcaagtgatcctcccagcacagcctcccaatgtgatgggataattgacatgagccaccacacctggccccgttctactgatcttgagctgagactgacctgcagggccacaggacaccccacgagctcagcagcaccccttgtgctcacacaggcctacgcggctgtaggctggaccctggcttggcctcacccttgggacatgaagggctggccggggtgaggctagaccatgagggctctgacaagaggaccaagcaccggggccccgagcctgccccgctggagactgaggccacctctgcccgcaggtctctgaaggtcggcctgcagatctccctggactactggtggtgcaccaatgttgtccttcgaggggtggaagaggtttgtcctggtgccctgggcacacagtggtgggcatgaggtggtgggctgggtgggactgaggaggcagccacctgtccccatgtgttctccccatgcctgtggtcagaacagcccaggctacttggaggtgatgtctgcgtgtcaccagcgggcggctgatgccctggtggcaggggccatcagcaacgggggcctctacgtgaagctgggccaggggctgtgctccttcaaccacctgcttccccccgagtatacccggaccctgcgcgtgctagaggacagggccctcaagcggggcttccaggaggtgagtgtgcgctcaggccgagggaggtggggcctccagcagtggccccaggctgctctgagcacctgtccttccaggtggatgagttgttccttgaggacttccaggccctcccccacgagctcttccaggagtttgactaccagccaattgctgccgccagcctggcacaggtgcacagagccaagctgcacgatggcaccagcgtggctgtgaaggtatatgggggctgccttgttcagcagtgggctggggcggggcacagtggggccccaagttctcaccacaccctcgcccagtgcaggtgcagtacatcgacctgcgggaccgctttgatggggac

SEQ ID NO: 41341 - DNA, 2300 bp, Homo sapien
gctgggatcataggtgtgagccaccaagcccagcctcttttttttttttttgaaaccgagtttcgctcttgttgcccaggctggagtgcaatggcgcgatcttggctcactgcaacctctgcctctcgggttcaagcaattctcctgcctcagtctcccgagtagctgggattacaggtgtgcaccaccacacccggctaatttttttgtattttaagtagaaatggggtttcaccatgttggccaggctggtcttgaactcctgacctctggtgatccactcacctcggcctcccaaagtgctgggattacaggcgtgagccactgtgcccagctctgcagatcttttttggacggagtctcgctctgttgcccaggctggggtgcagtggtgcaatctcagcttactgcagtctccacctcctaggctcaaacgatcctcctgcctcagcttcctgaggagctgggaccacaggtgtgcaccaccgtgcctgcctaatttttttgcatttttggtagagacagggtttcaacatgttgcccaggccagtctcgaactcctgagctcaagtgatcctcccagcacagcctcccaatgtgatgggataattgacatgagccaccacacctggccccgttctactgatcttgagctgagactgacctgcagggccacaggacaccccacgagctcagcagcaccccttgtgctcacacaggcctacgcggctgtaggctggaccctggcttggcctcacccttgggacatgaagggctggccggggtgaggctagaccatgagggctctgacaagaggaccaagcaccggggccccgagcctgccccgctggagactgaggccacctctgcccgcaggtctctgaaggtcggcctgcagatctccctggactactggtggtgcaccaatgttgtccttcgaggggtggaagaggtttgtcctggtgccctgggcacacagtggtgggcatgaggtggtgggctgggtgggactgaggaggcagccacctgtccccatgtgttctccccatgcctgtggtcagaacagcccaggctacttggaggtgatgtctgcgtgtcaccagcgggcggctgatgccctggtggcaggggccatcagcaacgggggcctctacgtgaagctgggccaggggctgtgctccttcaaccacctgcttccccccgagtatacccggaccctgcgcgtgctagaggacagggccctcaagcggggcttccaggaggtgagtgtgcgctcaggccgagggaggtggggcctccagcagtggccccaggctgctctgagcacctgtccttccaggtggatgagttgttccttgaggacttccaggccctcccccacgagctcttccaggagtttgactaccagccaattgctgccgccagcctggcacaggtgcacagagccaagctgcacgatggcaccagcgtggctgtgaaggtatatgggggctgccttgttcagcagtgggctggggcggggcacagtggggccccaagttctcaccacaccctcgcccagtgcaggtgcagtacatcgacctgcgggaccgctttgatggggacatccacaccctggagctcctgctgcggctcgttgaggtcatgcaccccagctttggcttcagctgggtcctccaggtacagccccaccccttccccggccagcaggagcaaacacgtaggcagagctggtaggagcagctggtaggcagagctggtcttcaaccgccatctggcccccaggacctgaaggggaccctggcccaggagctggacttcgagaatgagggccgcaacgcagagcgctgtgcgcgggagctggcgcacttcccctacgtcgtggtgccccgcgtgcactgggacaagtccagcaaggtgggctgggccaggcccttggggtgggcacagcgctgggcctgctgagcccagcctcttgctctccccagcgcgtgctcactgccgacttctgcgccggctgcaaggtcaacgatgtggaggccatcaggagccaggggctggcagtgcatgacgtgagtgcgggggggcgggggcgggtcagggcgggctggtgctgtgtccactgcaatgcctctcctctccccagatagcagaaaagctcatcaaggcctttgctgagcagatattttacaccggcttcatccactcggacccacatcctggcaacggtaggaatttaccccaggggtgggggtctcggggtgggcgcagcgcgacctaagaggctgtatccctagttc

SEQ ID NO: 41342 - DNA, 2300 bp, Homo sapien
cctgcatggctactacgagcctaccctcctcatcctgtttgagcccaaccagacctggcctgggtgagccccctaaggaggcccctctgcactgtgggccccctagctgcctctgcctggggtggggcccatggggtttagggcggggcctatggggtgtggtggggcttgctcgggaggagctgggcctgggtctctgcggggaggcaaggcccttggctgacccactggcgtccccaggcgcgtggccgtgcggcaggacacgtgctccattgtggccatctcactgaacatcacgcagaaggtgcaccccgtcatctggtccctcaccagcctgccctttgactgcacccaggctctggctgtgcccaagcccataggtgtgtgtcctgggagtggataggggagtgtgtggagagagcactgagcctgcccaccagcctgtgtccacctccaggtggggtggtggtgtttgccgtcaactcgctgttgtacctgaaccagagcgtccccccgtatggcgtggctctcaacagcctcaccacaggaaccacggctttcccgcttcgtgagtgtggggtggctggggggggggggggggggccggggacggcttgggcctgcctagtcggcctgaccacccaccccacaggcacccaggagggtgtgcggatcaccctggactgcgcccaggccaccttcatctcctacgacaagatggtcatctccctcaagggcggcgagatgtgagcccctcccccgcccatgaactctgcccacaccgccccccacaagtcctgtagggtcccctggcccccttcactcccccagggtccccatccccaactcagaattctccctgcccccagctacgtgctgaccctcatcaccgacggcatgcgcagtgtccgagcgttccactttgacaaggcggccgccagcgtcctcaccaccagcgtgagttgggactaggggttgggtctgggtccagacccggcccagccatcacacacctgccctccctcagatggtcaccatggagcccgggtacctgttcctgggttctcgcctgggcaattccctcctcctcaagtacacggagaagctgcaggagcccccggccagtgctgtccgtgaggctgccgacaaggtgggtttcctgggcccattgggccaccacccttcatgtgggcactgctgtggcatgccactcagtgcccctcctgcctcacaggaagagcctccctcaaagaagaagcgagtggatgcgacggccggctggtcaggtgagggccggtccagggctggtcaggagcggggccaggtgacccagggctgcgctcaagtgggctctctgtgtgcagctgcgggtaagtcggtgccgcaggatgaggtggacgagattgaagtgtacggcagcgaggcccagtcgggaacacagctggccacctactcctttgaggtgagattgaggcagcagggcccccgtcccagccagcgcccccagcgggcccctgactcttgctgtgccgcaggtgtgtgacagcatcctgaacattggaccctgtgccaatgccgccgtgggcgagcctgccttcctctctgaagaggtgcccagggttggggtcggggctgggggcaggggctggagtgtgagggggggtggggggcatagtcctcacccccgagtcctgtgcagtttcagaacagccccgagccggacctggagattgtggtttgctccggccacgggaagaacggggctttgtcggtgctgcaggtgtgtgggcaggtagggggcgggcgcctcctggtgggacctgggtgggctcacacccccatcacacccccaccccatcatcattctagaagagcatccggccccaggtggtgacaacctttgagcttcccggctgctatgacatgtggacagtcatcgccccggtgcgtaaggaggaggtaggtgcgagcctgctgcagggaggccctgggatgggaccggcgctgccttctcataggccgggggtgcccaggtcgcacctgcgtgcctgccttcactggactgtggcttccagcctgcccccctttggccctgacaggaggacaatcccaagggggagggcacagagcaggaacccagcaccacccctgaagcagacgacgacggccgcagacacggattcctgattctgagccgggaagactccaccatggtgaggggcagggcctgggacctgggacctggggctggggtcccctgcggggggcgcctccctcacagctgtcgcccgcagatcctg

SEQ ID NO: 41343 - DNA, 2300 bp, Homo sapien
gaccttctttcttgtgtttctgtctcttctgattatttttattgtatgtgactcttgtcactcaggctggagtgcaatgacgccatcttggctcactgcaacctctgcctcctgggttcaagtgattctcctgcctcagtctcctgagtagctgggattacaggcatgcgccaccaccctggctaatttttgaagggagccagcccctccacacgtgtgagtatttctcatcaggtgggacgagagactgagaaaagaagacacacagacgaagtatagggaaagaacagtgggcccagaggacccagcatacggaggacctgcatcagcaccggcctctgagttcccacagtattgatcattatttttaccatcttagcgaggggagtgtagcagggcaacaagtggggagaaggtcagcgcggaaacatgtgagcaaaggaatctgtatcatgaataagttcaaggaaaggtactgtgcccggatgtgcacgtaggctaaatttatgtttctctttacccaaacatgtcattgtagcaaagagtaacagagcagcagcgctagatttatgtttctctttacccaaacatctcagtgtaggaaagagtaacagagcagtattgctgccagcattcttgcttccaggcagttttctcctatctcagaatagaacaaaagggaatggttggctttacaatgagacattccattcccaaagacgagcaggagacagaaggcttcctcttatctcaactgcaaagaggcctccctctttacgactcctcagcacagaccctttataggtgttgggctgggggacggtaaggtctttcctttcccatgaggccatatctcaggctgtctcagtggggggaaaccttggacaattcccaggctttcttgggcagaggtccctgcggcttcccgcagtgcattgtgtccctggttaatcgagaatgaagaatggcgataacttttaccaagcatactgcctacaaacatattaacaaggcacatcctgcatagccctaaatccattaaactttgattcattacagcacatgtttctgtgagcacagggttggggctaaagttacaggttaacagcatctcaaagcaaaaacaatttttcttagtacagatcaaaatggagtttcttatgtcttccttttctacatagacacagtaacaatctgatctctctctctttcccccacagtttttgtatttttagtagagactgggtttcaccatgttggccaggctggtctcgaactcctgacctcaggtgatccgcccacctcggccttccaaagtgggattacaggcgtgagccaccgcctcctattgacttttaaaaggcggttgagtgtggctcaggggtcacacgcctgagcatccaagtggcccttcccccactgcccaatgagcaagtagatttggatgcaacaaaaacacatatttccacgccattttcttgggcgtaacgatactttcttgttttatttctcatgattccgtttctaggtcctaggcccgtgcctgatccaggatccaagctcccggaagctggcactgggcccgccctgggtaggcagcagtgagcaaggcgggcggacagcgctgggctcgcggggtcctgcgtcctccgcgggagtgttggcggcgggggtcgctctgcgcggggacactgggcagagggggcgtgcggcctctctaggaagctttctcggagccccagacactggcgaggcgccgcgccccctcttctggattccggcgcgccccctgaacccgggagctacgagcggagtcgcttctccctgcagccgtcctgggtctggcgcggacgcaccccccggccgaccccgagccgctgcagccggcgcccctgcggcttccaacccgcgctgctccgcccgcagcggaggccccgcacttcgcgcgctaggggtttgggttccggacgcccagcccggagccgagccgccagccgcccgcatcccgggccactagggcccgctgtcgcccctgcagccacgctcacgcggcggcgctgcgcaggcgcagaagcccggaaccttcccgcccagcttctgggcccggccggactgagttcgctgctgtcccggttcctctcgagtcggctccaactgccaggtgggcggccgggcgggcggccgaggcggcagcgcgaggccggggaggggcgcggtgcggggccgggctcctgcgtgggcgaccccgctcacccttcctctcccggccttgcgcagcccgggttggcgccatgtacgcc

SEQ ID NO: 41344 - DNA, 2300 bp, Homo sapien
tgcggctggggattcacaacgtggggctcactactgggcagttgggagcctgtaggagccccgggagggacctcatgagggaggaacccagaggcctgagtgggagcctgaagcagctgggcccggcagggagggctgtggctccagggaggggcggggctggtgggggcagatcctgtagttggggtgggagatgcatccaggggcagcggggtggatggcagaaggtcacaccaaaggctgaggcggaggccccctcttccccaggcctgcgtagatatccctcagctgctggaggaggcggtgggggcgggggctccgggcagtgctggcggcgtcctggctgccctgctggaccatgtcaggagcgggtcttgcttccacgccttgccgagccctcagtacttcgtggactttgtgttccagcagcacagcagcgaggtccctatgacgctggccggtgaggcctgggctgggctgtggaggggggcacccccgagtccccagcctccacgtccctggggggcagggccggagcccacacagactcgcggtgccaactcttctccctgccagagctgtcagccttgatgcagcgcctgggggtgggcagggaggcccacagtgaccacagtcatcggcacaggggagccagcagctgggaccctgtgcccctcatcagctccagcaacagctccagtgtgtgggacacggtgagctgcgccctggggtaagatggggcctcaccggggtctgcttgggcccctgagcctgtcctgccaccccccaggtatgcctgagtgccagggacgtgatggctgcatatggactgtcggaacaggctggggtgaccccggaggcctgggcccaactgagccctgccctgctccaacagcagctgagtggagcctgcacctcccagtccaggccccccgtccaggaccagctcagccagtcagagagtgagtgcccacgccgacattgtgctggcagcacagaggtggagcccgtgtaggaaggaaggagtggctgcccaggatgagggatggagagagtgagcaggggctggaagtagaaacaacagacacaggggaaggtggcgtcgccaggagagtggggctttgaggcaggagggtcagcctgagtgagggcctggcccacactgacggcctgcagctctggtgagcagcgcccgggaagcaggggctgagtctggaagaaaagctctcacagccgcctcacccgcccccagggtatctgtacggctccctggccacgctgctcatctgcctctgcgcggtctttggcctcctgctgctgacctgcactggctgcaggggggtcacccactacatcctgcagaccttcctgagcctggcagtgggtgcactcactggggacgctgtcctgcatctgacgcccaaggtctgcccccacaaacccgcgaccctggccctccgttccccaccatggactcccaggccatgccctcccagggaccttacccaccccacctcctgacccctctccctgggtcttggtgggaggcaccctgggacctcccccccagcccagcgcccctactccccaggtgctggggctgcatacacacagcgaagagggcctcagcccacagcccacctggcgcctcctggctatgctggccgggctctacgccttcttcctgtttgagaacctcttcaatctcctgctgcccagggacccggaggtcaggcttcttgggaaggtacccggcgggtgggtgtgctgggggcctggtggacactgagcacctaccctcacaggacctggaggacgggccctgcggccacagcagccatagccacgggggccacagccacggtgtgtccctgcagctggcacccagcgagctccggcagcccaagcccccccacgagggctcccgcgcagacctggtgagtgggcgccagatgccccatcccgcgcggagcccctcccaccgaccccttcccacgcccacactcccagccccaccccaggcctgcggctccgcctcccgcggtgatctggggccccgccccgccccaccgcgttcctcctccacttccgggcgggacttactcaaggctcctcccaggtggcggaggagagcccggagctgctgaaccctgagcccaggagactgagcccaggtgagcccagggggcgaccccggaagggctgggggatctggggtttgtgtggagcgcgggtggggcccaaggcttggcggtaggcgacaggccacgcgaacccacgggcctctgcgcccgcagagt

SEQ ID NO: 41345 - DNA, 2300 bp, Homo sapien
cgtgatgcgatcgtggctcactgcagcctccacctcctgggctcaagcaattctgcctcagcctcccgagtcgctgggactacaggcacccaccaccactcagggtgccttaatttgtttttgtgtttttagtggagctcgggtttcaccatgttgcccaggctggtcttaaactcctgactttaagtgatccccccgccccggcctcccacagcgctgggattacaggtgtgagccagcgtgaccagccggtgttgtttttaagatgggccagttgcagtgagcttgttggatgacagagtgggcctgaggggcaggagagtgcaacccgtctgctctggggaagccggccttaggctggggcatgggcaggtgaaaccctcaacagctgctcctgggctacggaagagagtttctgctgggaggggtggggtcacatgaatggagggaatggaggaggcctgtagcccagcactgaggcctactggggaggcagctcaggaaggccacagagtcaggcccaggccaagacctttgcccagaagctaaagtaggcccttgagcctattttagcatgggtggcctccagccagcccattggtcctggggtggtgtgggagggaaagggccagtttgggtccgcagcatcttcaggctgtgtgtagagcagccccctcatggtcctgggacccagaaatcatctgcacccccagcaggctctgcacccccggcaggatctgcacccccggcaggctcccctaagggcccccagaaggataccactgcgggtgggcccagccagaggagcaccatgagatccgcttggtggggtgaggccggcaggggaagcaccctgaccccaggacactgggctcaatgcccgccctgccccgtcccaccctgtgtatggcgggacagagtccttgggcctcaggcacccagctccccaccccagccccacccacaatgctcagggtcaggctggctggaccgggcgggaggtggcatctggactcccccttcagaaggcaaagctgccctgagatctgccttccccttcccccagacttcctgccatcaccaccacggtagagataaggcctctaggctcaaaggccagagagggagcccacagagagggcagggctgggagccacagcctccctgcccccggggctagagctggggtcttgccccaatcttatcctgacccaagctcggccaggtggctgccagggcccagctccgtcttcctgtttgtctgtgttggagcttcctggggctgtctccggcctaagggagcatgatgcagcaggcaccttttcagtttctttgactccatcgcagtccccaacagggaccacagcccaggacccaggaggagggaggtccatgtccccacccccaacaggggccaccgagggtgtctgggcagcctctgttgggaggggcagaggcagggacctgggagctctcaggctctgggggcatctgtgcacctctgccctgtgtcccccagcttggaggcagcccccagatggacagccagaaggggacaccccagccctgccccacagcttggggggcagcaggcagaggacagaagcccacccaggctggcctggcgtggtgagccacgccggtaatcccagcactttgggaggccaaggcgggcgaatcacctgaggttgggagttcaagaccagcctgaccaacatggagaaacactgtctctactaaaaatacaaaagtaaccgggcgtggtggcgctgcctgtaatcccagctactcgggaggctgaggcaggagaagcacttgaacccgggaggcggaggttgccgtgagccaagatcacgccattgcactccagcctgggcagcaagagcaaaactccaactcgaaaaaaaaaagaccaccgaggctgcctgtccaggggaaggggcccagccctcgacccccacaggcagtggctccaggctgttggggaggatctgccactggaatggttaacccaggcatctccagcagccaatcacagagctctgcaggaatacctgggagaggtcctcatgcagcccgggcgggtcctagcccagccccagtctggccctggacaaccccagcaaagccgccctcagccagcccagaagcactgggccttggccacagcaacacccactgagcacgctgggagctgagtatggcgtccctggtctcgctggagctggggctgcttctggctgtgctggtggtgacggcgacggcgtccccgcctgctggtctgctgagcctgctcacct

SEQ ID NO: 41346 - DNA, 2300 bp, Homo sapien
gcggtggctcacgcctgtaatcccaacactttgggaggcccaggcgggcggatcacgaggtcaggagatcgagaccatcctggctaacatggtgaaaccccgtctctactaaaaataccaaaaattagccgggcgtggtggtggaagcctgtagtcccagctactccggaggctgaggcaggagaatggcgtgaacccgggaggcggagcttgcagtgagccgagatcgcaccactgcactccagcctgggcgacagaccgagactccgtctcaaaaaaaaaaaaaaataaaataaatgaagctgctgcctccctccccgtggctgcctggcaggcgggtgggcggggtaagaccgggcttcgagtctgctgcgccggttacgtcccgggggctgcgcggctggagggaatgtcccgaagtccgggcgggcgcgggcgcaggcgtgagggctgagcgccgagctgccgatggggacggaggggcggggggtcgccccgacgcgcgcaggcgcagacatgaggggcgaatgccgagtcgctgaccgagcgcaccccgcccccggcgccatcttcccgaccgcgagccgtccaggtacccggggcccggccggtgggcggggaaggggcagagtggggagaggcgactcagggcctggcaccctctgggcgcgcctaggccccggcacagcttcggctgagcgccgcaaaagtcacgttattggcatgttctagaaactggctttccttgctcgttgtccactctgcgaggttgttttgcacatttgcttgtggccgcagaacgtccgctttcgctgttaggcagaagctcctgcgtggttggggcggttggctcctcggcgctctcctgcctggcggctccgtgacggctgccgagcagcctcggtccccaccccgcggctcgcaatggcctcgaccctcggagagcttgacccagacgttccctacctacatgagcggcgacgccctttcccggctcttcctcggctggggcgccccagggcttcggcgcgggcggccttccctcacttctgctcttctcccatccccggtagcaccgtccactcccagttagccggctcagcgctgctctcccgggcctctccaccgagagcttcctgcgcctgcccgccaggcccgctcctcctcccctctccgtctgagtttatcttactgcccggcccattgggccaaaaacaggggtgtcgttcgtaactcctttattttaatcctatctcaaatccctcggcggatctgacggctccactttcaaagagagaacgtctggagctggcccagcttccgtgctaggcaggaccctcccacgggccccgctcccattgtttctccacagctcgctgcccaactaggggcacctctccatcttcattccctaggaccccctctttcgagaagctgcaccttcagcttgttggttcctccaagttcatgcctacttaaaggcgggctgttaagtgtgttgtttcctgtgccccaaactctcctcgtgggccatcaaacagctgcctgccgccctcataacctccctcaacctccagcttgaaccacactccactgcagcccccgccccgctctcctgagtgtccatagtacctcactttttctggtagcccctatagcaccctgtgtgttcaccattattgagcttaggagagctcttcatggagccctgggtctccaggacctggcacttacgggctgtctttttttgtcggttttttttgttgttcgtttgtttgttttgagacagggtcttgctctgtctcccaggctggagtgcagtggctcagtcttggctcattgaaaccttcacctcctgggttcaagcgattctcctgcctcagcctcctgagtagctgggattacaaccgtatgccacaacgtccggctaattttgtaattttagtagagacagggtttcaccatgttggccaggctggtctcaaactcctgacctcaggtgatccgctcacctcggcctcccaaagtgctgggattacaggtgtgagccagcgcctggcttaggggccatctttgagtcggccctggctctgctccccaggtctcagtgctgtgccccccccagagcctagaggatgtttcatgggatcccagccacgccgggcataggaggtgagtgtggctggaagggcgcaggctttcagccgcttctgcaggggctgacgggcagtattgggtattggggatcgggggtggggaggtatctgaccctgctctcgtacagccttgggggtggccag

SEQ ID NO: 41347 - DNA, 2300 bp, Homo sapien
tctggcccgaggctccctgagctggcatttgtctgggcagctttcctagtgttggggcacagcctctctggaagccaacctttgcacttcttcccatgttatctcagatgtctctctctgtgcccctcactcatctcactggatctgtctgccaaccctgagatcagctgtgccagcttggaagagctcctgtccaccctccaaaagcggccccaaggccttagcttccttggcctgtcaggtgagtgctggtatggtggccacgcctgccatgttcggccttttcagggacctgcctgagacccaggtgcctcctcctaaggggctgtcactgctaccagccaggcagcaaggctgggctccatgaggctggggcagcagggggcagagtgacagtgacagaaaaggggcatgatcccagctcctaaaaccatgggttagggggcgaggtgggtatctgcctctggtctctccaacccaaccttcagagcagactatggtaggcaagaccctgttccacagggactttcttcttgtccctggcaggaaaagggatcccaaggtcagggtgttgaaagctgccaagggaccctcctacttcctggcaggggctcctctgacacaaccctgcccagggctgtggtctgatttagcttgttctctcttgagccacatcagggcagtccccaacctgagctgtctggaagacaaccccaggaagggctttgatgacctggcttgccccactggggccggggcaggctgtgccctccaggggatgagggcttaagtgaatgtgcacgaagcggggctctgctttcttcctgtgccccctccccttcacctcccagggccaggccgccttttccaggaaggcccccgagtgctggtgtgagaccccttccccacacctcagttcctggcatctgtaccttcccacccagctccctgaattcctgagcttagtgttctcttgatccactcaggcccacgatgtacagatttgcaagcagatccattatgtccttcttatgggtggggagactgacgtgtaggcatggactttgagatcgggcactgtcagaggtaaagaagggagccacccttcctcctgtctgaccgctggctgtgcagatgatcccaccccttcctggagagtcatggggcctctccggagctctgcccactgcccctcgctacagccctggggccctcagcgaaagcgagtttgttccctggagcctgccgcgggcaccaggacgccgccggcccccgcagcgctgaggtctgccctcttcccctccgcaggctgcgccgtccagggtcccctgggcctgggcctgtgggacaagatagccgcgcagctccgggaactgcagctgtgcagcagacgcctctgcgctgaggacagggacgccctgcgccagctgcagcccagtcggccgggccccggcgagtgcacgctggaccacggctccaagctcttctttcggcgcctctgaccctggcgctgcctttccccaccctcaccgaagcccctaataaatgaagctgctggccgggcgcggtggctcacgcctgtaatcccaacactttgggaggcccaggcgggcggatcacgaggtcaggagatcgagaccatcctggctaacatggtgaaaccccgtctctactaaaaataccaaaaattagccgggcgtggtggtggaagcctgtagtcccagctactccggaggctgaggcaggagaatggcgtgaacccgggaggcggagcttgcagtgagccgagatcgcaccactgcactccagcctgggcgacagaccgagactccgtctcaaaaaaaaaaaaaaataaaataaatgaagctgctgcctccctccccgtggctgcctggcaggcgggtgggcggggtaagaccgggcttcgagtctgctgcgccggttacgtcccgggggctgcgcggctggagggaatgtcccgaagtccgggcgggcgcgggcgcaggcgtgagggctgagcgccgagctgccgatggggacggaggggcggggggtcgccccgacgcgcgcaggcgcagacatgaggggcgaatgccgagtcgctgaccgagcgcaccccgcccccggcgccatcttcccgaccgcgagccgtccaggtacccggggcccggccggtgggcggggaaggggcagagtggggagaggcgactcagggcctggcaccctctgggcgcgcctaggccccggcacagcttcggctgagcgccgcaaaagtcacgttattggcatgttctagaaac

SEQ ID NO: 41348 - DNA, 2300 bp, Homo sapien
ccgagacctctcctcctttgagcccctgcccagaacccccctctaatagcactagactcccagaggcctctcaggcccatgtcagggtctccccagggcaggcggcaccagccatggccaggcctcggaggagcaggcatgggccagccagcagcagcagcagctcagaaggcgaggacagcgcaggccccgcacggccgtcccagaagaggcctcggtgctcggccacagcacaacgggtggcagcctggacgcctggccccgccagcaacagggaagcagccacagccagcaccagccgggcagcctaccaggcagccatccggggtgtgggcagtgctcagagccggctggggcctggcccaccgcggggccacagcaaagcccttgccccccaggcagcgctcatcccggaggaggagtgcctggccggggactggctggagctggacatgcccctgacccgcagccgccggccccgcccccggggcactggagacaaccgcaggcccagtagtacctctgggtcggacagtgaggagagcaggccccgtgcccgagccaagcaggtccgcctgacctgcatgcagagttgcagtgcgccagttaacgcagggcccagcagcctggcttcagaacctccagggagccccagcacccccagggtctcagagcccagtggggacagctctgcggcaggccagcccttggtgggtatgcagacctggagcagagccctctccccactccgggcaggcaggtgtagggtggagcccactgtggctcctgactcagccctgctgccttcacctgccagggtccggccccgccccctcccatccgggttcgagttcaagttcaggatcatctcttcctcatccctgtcccacacaggtgaggcatcgcctgccctaccccgcagcccacctgtgcagctccatgccagggtgctcgtgtttgcatgtcagggtggggcgtgtgacgagggctccctggtgtgttccaggaggatcctgtggcccccaggaatagcagaggggctggtggtgtgctgggctgcagggagaggaggggccggctacctgggaatgggagaagcagctgagggggcttctggccctgggcagggatggcgggtccctggggcattaccccggctgtgtgcaggcagcagcagcagcgcctctgtccctgcagcagtgacacccactctgtggcctggctggccgagcaggcggcccagcgctactaccagacctgcgggctgctgcccaggctcaccctacggaaagagggggccctgctggccccacaggacctcatccctgatgtgctgcagagcaatgacgaggtgagccgcagagcggagggggagccagggcctcaggcaccgggagcccccgggtggctcatggctgcagagcaatgatgaggtgagccgggggagcccccaggtggctcatgacggtgccttccaggtgttggctgaggtgacttcgtgggacctgcccccgttgactgaccgctaccgcagggcctgccagagcctggggcaaggtgagggccaggagagctgcagtttctgggtgaggtcgtacaagggggttgggcacacaggctccaccagcccggttcattcctgggcctcgggtgttttggggtgcacctcccccagcctggtgggtgctgtgtcctgcacttggatgtgtgggtggaagggagaggacagccctcagcccccatgatctgctgacagggagatggcaaaaagcagccgaaagcctggaaagtcaaacccaaggaggagggcctggcatgggctgggagctgctggggaagcttcccagaaagcttgtcccggggggtgtggaatctggcagtgactggtggagctcagggtgctgcagacccaccccggcccccagggcctcacagtgctagacccacaggcatgtgcgagtgggctctacagcaagtctggtgggtgacccctggggctgttgaaaaggggctgcctggtttgccctctgggattcagagggcagaaagggccggccttaccctggtgacatcacatccctcccgcaggggagcaccaacaggtgctgcaggccgtggagctccagggcttgggcctctcgttcagcgcctgctccctggccctggaccaggcccagcttacacccctgctgcgggccctcaagctgcacacagcactccgggagctgcgcctggcagggaaccggctgggggacaagtgtgtggctgagctggtggctgccctgggcaccatgcccagc

SEQ ID NO: 41349 - DNA, 2300 bp, Homo sapien
ctgcacaggtgtgcaggcttggcctggtcccacccctgcagccttggaggcaccgaggcccaaatctgcccagtccaggggccacgccaggaggccagcgctctgccgtcagcctgaggagggctccagcagcctttactggacccagggacctgtcagtgcatcacaccactctctccccaacagatctctctggctgagttttgcccaacgacttgctgtaattacgatggaaattaactcatctatcttccactcctgaggctcctcagttggactctgtgcacccagcctcctctggggcctctgggaaaccagccactgcacctgagtgcagtgctgggtgtgctgtgtagccgggagtcagatacccaaggcatggcaggtgtttggtcctcaaggtaatgggggatagcaagggtattttagaggcctgggtgccccatgtcacaggattctagacataattttgcagttgttttctctctttcttcctttttttttttttttttgagacaagagtctcgctctgttgcccaggctggagtgcagtggcgccatctccgctcactgcaagctctgcctcccgggtttacgccattctcctgcctcagcctccccagtagctgggactacagacacccgccaccacgcccggctaattttttgtatttttagtagagatggggtttcaccgtgttagccaggatggtctcgatccactgaccccatgatctgcctgcctcagcctcccaaagtgctgggattacaggggtgagccattgcgcccggccctctctttcttcctttctttcttttcctccctccctccctttcttttttttaaataaagatggggtatcgggctgggcatggtggcttacacctgtaataccggcactttgggaggccgaggtgggcggatcacaaggtcaggagtttgaaaccagcctggccagcatggtgaaaccccgtctctactaaaatgcaaaaattagccgggcatgctggcacgcgcctgtagtcccagctacttggaaggctgaggcaggaaaatcgcttgaactcgggaggcggaggttgtggtgagccgagatcacaccattgcacgccagcctgggtgacagaacgagactccgtctcacacacacacacacacgaaagatggggcctcactatgttgcccaggctggtctcgtactgctaggctcaagcgatcctcctgaccgggcctcccatagcgctcggattacagtgcgggccactgtgcccgggctacttctgcagctgaagcacaggttcactgactcttccgagaatacagctggcatacacattgctgaaacaatacttgttcactatggaaagcacattcccctcccaaaacagtccttggggccgagtccccaaatgtgacccagctgcgttctgcggaggaggagcgcgcctgacaccttattacgtccccacagccaaatgctcgtgaatttatcgtcagtctatctggacactacgttcgtttttaatagttgcgcctgtgagcaggctgtgtgtgtgaatttcgggaggaattggggcggcggcacagctcgtccaccatgagtagcgcgggcggcacgggggctgcagcccagaagaccccacccagggcgcgctgcgaccccggacgggctggctccgggcccccggcctcccgcgtccccgccgcctacgaggaggaacggggtccccaccaggcactccccgggccgggcagagggctccacgcgcgggccaacccggcgtccgggaagacggcccctagggtgggacgccccagttgtcgccgccaccccgccccagctcctcccgcacgagaactccgaggatgccgcgggcgggccgaccgtacttcccggaatgccccgcgcccgccgccgccgtcgaggggcggggcctgcgtgtcggcggcgaggggcggggcctgcgtgtcggcggcgaggggcggggcctgcgtgtcggcggcgaggggcggggcctgcgtgtcggcggcgaggggcggggccgcggcgcagcgcgggaagtccggatcccgcggcgatccgagcatgagcctggagcgcgagcttcgccgtaagttcctcggggaccccttcctccgggggcgcggaggctggggagggcttgggactcggccccggccccggaccccgccgcggaggcccagccctcctcttcctcccacagagctgagcaaggcgaaagccaaggcgcagagggccgggcagcggcgcgaagaggccgcgctgtgccaccagctg

SEQ ID NO: 41350 - DNA, 2300 bp, Homo sapien
ctgtgagaggacagtggtgtgggcccttggtctgtgcctcccacaggacagctgcttcaatagcatctgtgccccctcctgcctgtagtccacccaccactgacccctggacttggctggcggattttcacaccttctcctgggggcaggtctcagcttgtccccaacccagtcagagccagtctcactccctgcctcaggcaactgtgtatgttttaatttttatttatttatgtattcatgagatagagtctcactctgtctcccaggctggagtgtagtggcaccatttcggctcactgcaacctccgcctcccgggttcgagccattctcctgcctcagcctcctgagaagctgagattacaggcgctcgccaccatgcatggctaatttttgtatttttagtagagatggggtttcaccatgttggccaggctggtcatgaactcctaacctcaggtgacctgcctgcctcggccttccaaagtgctgggattacaggcatgagccaccgcctgtaattttaatttttaaccaaactgagaacttgaggattgaatgcaggtaacgggtggtgttcatgtggatgtggattccatgaaagagggctttgtcctcactgtcggttctccacatgtaggtcctttgactcagcaggccttaggcctagtccacaggtgctgagtgaacagccccagcgtctgacagctccttagcttggggtgcacaggcagctgaagcagtaggatggcagctcagacttcccagggccccacgtgtgcagggctggcctcccagcaccaccaggcagggccggcctcccagcgccaccaggcagggccctgtgagtgtcccctccctgacacacaccttgtagagaggctgggcctgggcaggctgctctgctgcaccacatcccattctcaagagggtcccaggtcccaaaggaagcctgtagcccagtggctttctggaggtttgcatggctggcaagcctgggccggctgctggagaggcatcaggacaggagcaactctgctgactgctcccctcagcgagctctaagagtctttgggtgggaggcacatcacatccctgtcactcctggctggccctggaatgcctcagcccacacaccccactccagccagggctgtgggaactgtgtctgctcaggtacaaaaggctttgtttgttcttggacctcttggttctggtctgggcttcccacctcccatgctgtgagcccccacgggctgggaccgcagcttgccatgtgtctctcagtggcaccaagtggacgctcgaggcttatgttgagggagtgagagccaggataggccactgggcgtgctgggagcccacacaggcagggagcccagcgggaggtgccctgctcctgccagccccggttaccccagcaggctcggcacccactcagagcccccatttctgctccccaggcactccctgtgtgcctacctgcccttgtccttgtcctgggccagcttggctcctgcctcccagctctgaggaggtctctgcaggtagccaacctccctggacgagggggcagctgcctcctctcacctgggctcaccctgagccaagtcctctcaacccaggataaatggcctttctgaaggcccagagagcatgcctgccccagtgtgggagctgcatccgctccccacctgacagtgatggccaagagcccagtgttcctggagggctcccaaactctggacctgtaggggggtcagggcagtcgctggtccctaagggaaaagcgtgaccctcggccccaggtggctgaacccgtcactgccagggcgagctgtcacctctgtgagctgatgaggccttgcttttaggacctctaatctctgcaagaacccaagctggctctgcctgtttctcctgagcagctcgcagtgttcaccacactccagcacgactcgggacaggcacgtgcgcccctctgcaccagctggagtccctcaggacacctggctggagctgatgggcatgggcgggtgtgtgcgagcatgagcccgcaggtctgtgagcttcgtctccctttccttcttcgcagtgtactaatggtcacttgatgtgcgctggctgttttatccacctactagcagatgcccggctgaaggaggagcaggccacgtgccccaattgtcgttgtgagatcagtaagagcctctgctgccggaacctggccgtggagaaagccgtgagcgagctgccttcagagtgtggcttctgcctgcgccagtttccccgctccctc

SEQ ID NO: 41351 - DNA, 2300 bp, Homo sapien
gctgagctttgtgtgttctccctggcactggggctgtgggggacaactccatgggcctctggaattggctgggtcctcagtaactcgagagcttgtcatccagataccagatgccaccagtgctggcagggaagcctcgggtggtgccccaggtctgagcctttgggcctgcagggccagctgacccatgggcctgtgcccgtacgatgatgcctcacaggctgggaaacctgcttgggtgtcagactgaggccctcatgcaaaaggtttccgccaccgccgagtcctgcctcacgtcaggttggggctgcagccagtacagcaagactcagcttttatgttctctgtgtgggtgttagatatgttctgggggactggcctgacaaggtgtgcagccaccttctggagtctcaggtgggtggcaggagggctggtggggcagcagttacacctgtgcaggagcttctggcctgaccaggccgcgcaggtggtcaggtcgttcctgccggctccctgctctgcggcccgagggcagtgtggcctgttggcacctctgcccatggggcacctcctctgggaagagacagcctcagcggtgcccgggacgttgcagccgcagcctcatccctgacttctctccctccattttggcccttcagacgaggcccagtgtgatgctgcgtaagacagacctggccctgacccttcctgctgctgtcagatgaggccctgggccttggtgctggcacctggaggaagggactgcgcattgttcccacccctcatggggcattcttaaggcaaaaacgggctcactcgggtgtaagtgccgggcaggggcctctcacagatgtggtccagccgctccctctaactcggccctgcacagtgccctgccattcccatgctctcctgcctgaggtgtcctctccctgcccctgcccacctcttgggcccggcagaggcagcgcccccactttgagactttgttctctccttgctacaaggatcccctcctgccccatctgaccagggtgtgtccactctgttctgtgggtgggttggtgtgtgccgtggccctcccgcctgtagcgcccatgtctctatgccacatgttgacagtccattgataacagcccaggaagcagagatggctcctctctgcccgagccccacacccccaaccaggccaacagtgtgcagtcctgggggggtggagtcaccatccacatgtccaaggagcttcgggcccctcttccccagtctcctgggcagcagtacaggactgcagctgactcgttctttgaggtgaggaaagtggcagaaaacatctttgtaaatacgtctgcttaggtatctaaaacacaggagcaaggaagatgttctggaatctctggctagttggaatttttgttttctgtggtggttatcatttgagttacttttagatctaagcagccttgttctgaatgtgggcccgactctggggattgattggccaccgtttgaggtctgacagcagtagcaggtgagggacttcaaatccagcctgggtggagggttcgagtcctggcttcatgcttaacagctgtgcggccttggacaacgtgccagtccctctcagacccatgtttgattcgggaggttaggggccgagcacgcggggtgcatggggtgtgccctgaagcaccactggccctggtgaggccttgcctgcatgcagatggcagaggaagggggacctccaactggctgagcagcgcttttggggtttgtgccacagggaagccctttggctgcattttggctctgacgacctctgtcaagggcctgtgggtccctgacccctgggtgagcgagggcactgctcccatgggcctgggcactgtgccatcctccagtggcaaacaggaggtccccagggtctgagagaaccatgcagtccaggtgtgaaaggggtcctacaaggtcagctgaccatagagaccttgggaccaccaggaaatcgtgggggccctcagccaggggatggggtcagggctccttgagcctgttccgcccatctagctcccctttaaccccagggaagaagtagctcaggtggagaccctgggtctgcatgggggtcacgtgagctgcctgtagccagcaggggggagggctgggtgctgtcctgaggatgcaggtgcaaatggccatttctgggccacctgtgtgtatcagcatctgcagaggggcctggggtctggctcctggggttggcagccccaggggctctgccatggctgcccaaggtggtg

SEQ ID NO: 41352 - DNA, 2300 bp, Homo sapien
ggcctgccacacccagcatcgcccccccccacatcccataagtgttggccgtgaagacagctacaatgaggatggtcactgcgaccaccaacagcattgcctgaccagccacagagcggccctcagggccgaggtggccgccagccactgccagcaccatgcctcctcccaggagcaggttggcagaggagcggtccccattcacccagtggaaatcgaaggccagaaggggaaggccgatgacggtggccacccaggctccagcaaggcagtcttcgtgtgtgctcagccctggggccagcgtggtggtggcagccaagacctggagcaggaagccagcagcagcccctcgacttgcctgtcaacacagggaagggagaacacgtgggaaaaagaggccggggtcacccttttaaacaggaaagggtttggggcttccatggagacctggtcttagacgcacttcccaccaacctctctctaattcaggaaactaggtccttggggtttgggaggtatggggatgcgcccctgctcagccccagtgtactcacctcggctgtgctcacggctgcgtgcagagacaccactcccagcaccagatgggacagggctgtgctccactcggcccccggcttgggggccatggcacctcaggcggcagtatgtacgaggacacagataggagatactcaactttggagaggaaggaagcgcagaagccagcgacctggagccctacgcgcggcactctagtaagcccaggttccaggtccccattactggatgttaggagaagttcagtcctagactttccggatccctgaggccactgcacacacctgtggagaagaagaacctaattcagccgggaaacgggggaaaacgactcagggtctaagctggggggaacgtcagccctggggccctggagcccaagtgggagtgcgggcctggggaagagagagcggcgaggcgctgcaggcccacgcggcggcctcggcctgctccctgcgttccgggaggcgttgtcctgggaacccgggtccaggaggagcgacggcgcaggactccgggaggccagccgtgcgcagttaccgggctgcgcggtcccaacgcagcggcgagcgggaggcccgagcctgcgcaacgcaccgcccaccgccgtcggccctgcctcctctgccgtgcccccagttgcgggagcgagcgcggtcgggaacctccaccagcgagaggagcggaggctagagcggccgggcggggctagagcggctggggggggagggtcgaggcctgggggagagggtcgagacctggggggggccggttggaggccgtaggagcgggtggggtcgggaggagctcggggaccagaaaacgctctgtttgggtgggtgcgtgcgtgggcatagtggtttggaaggagcgtgatgaggggagaagggccggggcggggctgcgaggggcggggtctgggcggggctgcgaggggcggggggtctgggcggggctgagggagataaggtttaggcggggctgagagcggcgggtctgagagggagggggcctgggtggggcggggcctgggcgaggatgcgatgggggggtctgggcgtggctgcgaggggcggggcctgggcggggctgcgaggagaggggtctgggcgagactgagagggaccgagaggggaggagcctgggcgaggctgcaaggaacggggtttgggcggggctgcgaggagggggggtctgggcggggctgagatgggcggggctgagatgggcggggctgtagggagaggaaggagaaccccggcgtgttgaaggctccgcgaaaccggagcggtgggggactacgcggagggtgggagggattccgagaggagggtcgcgggagccgtgggcgctctcagcccggtgtccgcggtgtaggggttggggcgcgccgggcggcgccgtgagaaacggcgggtctccaggtgcggccgcgggcacctgtttctagtacccccgtccccgcgctcgccttccagccgtgggagccgggccgtgggggcggccgtcgcgagcatgcgcaccggcactgcggcgggcgggcgccgagtctgggcgcggggacgcggggcggcgcgaagcggggccctctgccgccccgcgctcccatgtacgccttttactcgttgctcatctacatcttctacagcctcttccgcagggatggtggcgccgcggcggccgcggagcccggggaccccgcccaggtgagcggggctggccgtgcagcccgtcgtctcccg

SEQ ID NO: 41353 - DNA, 2300 bp, Homo sapien
cagcagccccctccgccgcgctcacctggcccaggtccgccgggcccccgcagctctcttccgcccccagctggacggagaggaactcggcgaggcgcagtagggcctcttccagggacaccgcggccgcgcggccctcggctgcgccttccgacccatcctcaggctcggagctggctgccggtcagggaggagggcgggagacatttcgggtcacgtgcttgagccaggcctccgcccctccctgggaggtcccggcaccgccctcgcaccgcgggactcccagcccgcacctaccggccaggccggtcagctcggtccacagctctggcgcgggcaggtctgggcgccggcgaccccggggcttgcgggctctctagggagggggcaggggcgcccctgaggaggggggcaggcagcctgctggccccttccctccgcgaaccgggccggaggattggggccgaagtctacgcttccagcatcggggccgagccgagggtcctcggcacggccccgtcgccccgcgccccgtgcccgcccccgccccgggaacctcggcgtgggggtggggcaggcggcgggagacgacgggctgcacggccagccccgctcacctgggcggggtccccgggctccgcggccgccgcggcgccaccatccctgcggaagaggctgtagaagatgtagatgagcaacgagtaaaaggcgtacatgggagcgcggggcggcagagggccccgcttcgcgccgccccgcgtccccgcgcccagactcggcgcccgcccgccgcagtgccggtgcgcatgctcgcgacggccgcccccacggcccggctcccacggctggaaggcgagcgcggggacgggggtactagaaacaggtgcccgcggccgcacctggagacccgccgtttctcacggcgccgcccggcgcgccccaacccctacaccgcggacaccgggctgagagcgcccacggctcccgcgaccctcctctcggaatccctcccaccctccgcgtagtcccccaccgctccggtttcgcggagccttcaacacgccggggttctccttcctctccctacagccccgcccatctcagccccgcccatctcagccccgcccagaccccccctcctcgcagccccgcccaaaccccgttccttgcagcctcgcccaggctcctcccctctcggtccctctcagtctcgcccagacccctctcctcgcagccccgcccaggccccgcccctcgcagccacgcccagacccccccatcgcatcctcgcccaggccccgccccacccaggccccctccctctcagacccgccgctctcagccccgcctaaaccttatctccctcagccccgcccagaccccccgcccctcgcagccccgcccagaccccgcccctcgcagccccgccccggcccttctcccctcatcacgctccttccaaaccactatgcccacgcacgcacccacccaaacagagcgttttctggtccccgagctcctcccgaccccacccgctcctacggcctccaaccggccccccccaggtctcgaccctctcccccaggcctcgaccctccccccccagccgctctagccccgcccggccgctctagcctccgctcctctcgctggtggaggttcccgaccgcgctcgctcccgcaactgggggcacggcagaggaggcagggccgacggcggtgggcggtgcgttgcgcaggctcgggcctcccgctcgccgctgcgttgggaccgcgcagcccggtaactgcgcacggctggcctcccggagtcctgcgccgtcgctcctcctggacccgggttcccaggacaacgcctcccggaacgcagggagcaggccgaggccgccgcgtgggcctgcagcgcctcgccgctctctcttccccaggcccgcactcccacttgggctccagggccccagggctgacgttccccccagcttagaccctgagtcgttttcccccgtttcccggctgaattaggttcttcttctccacaggtgtgtgcagtggcctcagggatccggaaagtctaggactgaacttctcctaacatccagtaatggggacctggaacctgggcttactagagtgccgcgcgtagggctccaggtcgctggcttctgcgcttccttcctctccaaagttgagtatctcctatctgtgtcctcgtacatactgccgcctgaggtgccatggcccccaagccgggggccgagtggagcacagccctgtcccatctggtgctgggagtggtgtct

SEQ ID NO: 41354 - DNA, 2300 bp, Homo sapien
tcctgctgttccagctgctgcttcagctcctccagctggggagaagtaagagagacagggtggacctcctttttctggcgtcccagccggcaatcccttctggctccagggacctcacctgtcccaggatgagctgctccagccgctgccacgccctctgatcctcctccaactggaggggctgctgtccctgggtctcatcccccagtggctcgcctgggactgcggtgaagtgggaagggctttcttcttgggatgtggatcctggagtagggtgggcccagttagcactgaagaggtctctagtccaaatcttccggaacatgaccccgaactccaggccgcccaggttctaccgggatttgctccctccagagttcttcttcaacttactgtcctttactcaccatctggagaggggggccggacccgaggggctggctgagtcccctggagcagggcctgcctccccctggggcttcgaagccatgccagaagggccaagagctgactggtcactgtcaacagtgaggggacctcgccagactgcgaaggagacaagaatccgagcagggctgtgaaagccaggaaggccggggcaggtggtacctgccagcagccccctccgccgcgctcacctggcccaggtccgccgggcccccgcagctctcttccgcccccagctggacggagaggaactcggcgaggcgcagtagggcctcttccagggacaccgcggccgcgcggccctcggctgcgccttccgacccatcctcaggctcggagctggctgccggtcagggaggagggcgggagacatttcgggtcacgtgcttgagccaggcctccgcccctccctgggaggtcccggcaccgccctcgcaccgcgggactcccagcccgcacctaccggccaggccggtcagctcggtccacagctctggcgcgggcaggtctgggcgccggcgaccccggggcttgcgggctctctagggagggggcaggggcgcccctgaggaggggggcaggcagcctgctggccccttccctccgcgaaccgggccggaggattggggccgaagtctacgcttccagcatcggggccgagccgagggtcctcggcacggccccgtcgccccgcgccccgtgcccgcccccgccccgggaacctcggcgtgggggtggggcaggcggcgggagacgacgggctgcacggccagccccgctcacctgggcggggtccccgggctccgcggccgccgcggcgccaccatccctgcggaagaggctgtagaagatgtagatgagcaacgagtaaaaggcgtacatgggagcgcggggcggcagagggccccgcttcgcgccgccccgcgtccccgcgcccagactcggcgcccgcccgccgcagtgccggtgcgcatgctcgcgacggccgcccccacggcccggctcccacggctggaaggcgagcgcggggacgggggtactagaaacaggtgcccgcggccgcacctggagacccgccgtttctcacggcgccgcccggcgcgccccaacccctacaccgcggacaccgggctgagagcgcccacggctcccgcgaccctcctctcggaatccctcccaccctccgcgtagtcccccaccgctccggtttcgcggagccttcaacacgccggggttctccttcctctccctacagccccgcccatctcagccccgcccatctcagccccgcccagaccccccctcctcgcagccccgcccaaaccccgttccttgcagcctcgcccaggctcctcccctctcggtccctctcagtctcgcccagacccctctcctcgcagccccgcccaggccccgcccctcgcagccacgcccagacccccccatcgcatcctcgcccaggccccgccccacccaggccccctccctctcagacccgccgctctcagccccgcctaaaccttatctccctcagccccgcccagaccccccgcccctcgcagccccgcccagaccccgcccctcgcagccccgccccggcccttctcccctcatcacgctccttccaaaccactatgcccacgcacgcacccacccaaacagagcgttttctggtccccgagctcctcccgaccccacccgctcctacggcctccaaccggccccccccaggtctcgaccctctcccccaggcctcgaccctccccccccagccgctctagccccgcccggccgctctagcctccgctcctctcgctggtggaggttcccgaccgcgctcgctcccgcaactg

SEQ ID NO: 41355 - DNA, 2300 bp, Homo sapien
cgggagcgagcgcggtcgggaacctccaccagcgagaggagcggaggctagagcggccgggcggggctagagcggctggggggggagggtcgaggcctgggggagagggtcgagacctggggggggccggttggaggccgtaggagcgggtggggtcgggaggagctcggggaccagaaaacgctctgtttgggtgggtgcgtgcgtgggcatagtggtttggaaggagcgtgatgaggggagaagggccggggcggggctgcgaggggcggggtctgggcggggctgcgaggggcggggggtctgggcggggctgagggagataaggtttaggcggggctgagagcggcgggtctgagagggagggggcctgggtggggcggggcctgggcgaggatgcgatgggggggtctgggcgtggctgcgaggggcggggcctgggcggggctgcgaggagaggggtctgggcgagactgagagggaccgagaggggaggagcctgggcgaggctgcaaggaacggggtttgggcggggctgcgaggagggggggtctgggcggggctgagatgggcggggctgagatgggcggggctgtagggagaggaaggagaaccccggcgtgttgaaggctccgcgaaaccggagcggtgggggactacgcggagggtgggagggattccgagaggagggtcgcgggagccgtgggcgctctcagcccggtgtccgcggtgtaggggttggggcgcgccgggcggcgccgtgagaaacggcgggtctccaggtgcggccgcgggcacctgtttctagtacccccgtccccgcgctcgccttccagccgtgggagccgggccgtgggggcggccgtcgcgagcatgcgcaccggcactgcggcgggcgggcgccgagtctgggcgcggggacgcggggcggcgcgaagcggggccctctgccgccccgcgctcccatgtacgccttttactcgttgctcatctacatcttctacagcctcttccgcagggatggtggcgccgcggcggccgcggagcccggggaccccgcccaggtgagcggggctggccgtgcagcccgtcgtctcccgccgcctgccccacccccacgccgaggttcccggggcgggggcgggcacggggcgcggggcgacggggccgtgccgaggaccctcggctcggccccgatgctggaagcgtagacttcggccccaatcctccggcccggttcgcggagggaaggggccagcaggctgcctgcccccctcctcaggggcgcccctgccccctccctagagagcccgcaagccccggggtcgccggcgcccagacctgcccgcgccagagctgtggaccgagctgaccggcctggccggtaggtgcgggctgggagtcccgcggtgcgagggcggtgccgggacctcccagggaggggcggaggcctggctcaagcacgtgacccgaaatgtctcccgccctcctccctgaccggcagccagctccgagcctgaggatgggtcggaaggcgcagccgagggccgcgcggccgcggtgtccctggaagaggccctactgcgcctcgccgagttcctctccgtccagctgggggcggaagagagctgcgggggcccggcggacctgggccaggtgagcgcggcggagggggctgctggcaggtaccacctgccccggccttcctggctttcacagccctgctcggattcttgtctccttcgcagtctggcgaggtcccctcactgttgacagtgaccagtcagctcttggcccttctggcatggcttcgaagccccagggggaggcaggccctgctccaggggactcagccagcccctcgggtccggcccccctctccagatggtgagtaaaggacagtaagttgaagaagaactctggagggagcaaatcccggtagaacctgggcggcctggagttcggggtcatgttccggaagatttggactagagacctcttcagtgctaactgggcccaccctactccaggatccacatcccaagaagaaagcccttcccacttcaccgcagtcccaggcgagccactgggggatgagacccagggacagcagcccctccagttggaggaggatcagagggcgtggcagcggctggagcagctcatcctgggacaggtgaggtccctggagccagaagggattgccggctgggacgccagaaaaaggaggtccaccctgtctctcttacttctccccagctggaggagctgaagcagcagctggaacagcaggaggagga

SEQ ID NO: 41356 - DNA, 2300 bp, Homo sapien
tagcaggttttggttaatctggaagggaggggcagagagcattctagtgggggcttctcctgaggcctcagtctccacccctgagttgcctttgggtggccaggcccggcttcaaaggggctgcgatgacccatggctactttatcccgtcttccctggtcaggtttcaggaccccatttaacaaatgggggagtatttagcccatgccaagctcccaaggcgtggggcgctcctggagttcaagatctagcagctgctagtaggccctgaactatgggggctggatatccacccaggacatgatcaggtggagcttcctggaggagaaggccatgaagcccgcaccctaggaacaagagggggacacattgactcaactgatttcctgggagttgcttcaggagcccaggtggaccgctcacctcctcctccctagccatctctgctcctccacccaagcaaggctggtattgtgtatcctgccccaaagcccaggttctcctccctcacaaggggcaagtttgcccaagaggatagcagctctgggaattagcagcggtggttggtgctggcaccaggccaagggcccccagacacacgggggcccagggatatgcttttgcccttcactctgagaattcagcttttcttgtgcagcctccaccatgataacctcaaagggctgaaaatctgcagcatacggtggggtccagcacaccctgaggtgtggaggggagggacaggcagcaagtgtccaggaggaggaggcctgggccgcaaggggccttgtatgtggggtaccacactgctcctgccccccacacccccggtcgggtggtgccccttttccttctatctctgactctcccctcagacgccacgtggtttccctcaggactcctgccaccacctctctgctgtgttccctaggttatggctgcacaatcctgtgcctcatgaggctaatacttgtggccacttcaccccattcggtcagcaaggcgtcgttctttcctacaagtgtttgttgttgttgttgttttgagacaaggtctcactctgttgcccaggctggagtgcagtggtgcgatctgggccccgtgcagcctccacctcccccgctagggcgatcctcccgactcagcgtcccgggactacaggcgtgcgccacagagcccagctaatttcttaatttttggtagggaccgggcctgcctatgttgctcaggttggtctcccgggctcaagtgacccactggcctcggcctcctcccaaagtgctgggatcacagacgtgagccaccgggccgggcctttcccataattttttttttttttttgagacggagtctcactctgccgcccaggctggagtgcagtggcgtgatctcggctcactgcaagctccgcttcccgggttcatgccattctcctgcctcagcctcccgagtagctgggactacaggcgcccaccaccacgcccggctaatttttttgtatttttagtggagacggggtttcatcaggttagctaggatggtctcgatttcctgacctcgtgatctgcccgcctcggcctcccaaagtgctgggattacaggcgtgagacaccgcgcccggtctcccgtaagttttaaggcacccccctctccactggcgcttccttggtggggcgctggaggctccccaagttctgaccgctcttctccgaccgcactgtcctgggcccgaaaccacccccaaagctgccacccattccgctggcgcccgtcccgttgcccgcgatgactcggttttgtccagcataaatcaatgaccaccgtcccgggagccttggagcactttgagccattcccgtcccacccacgccccaaggaggtcccagccgcggaggactcgcccggccgcccgcagctgtccgcgttggcccccacccccgaccgtccctccccaggccccgcccccgacatttcctcctcccaggctccgcccccggctcccacggggcaccgcggcttccggctatgggtaccgcgggccggaagtgtagcgttgccatggcgagggccgggtgcggggcccgcccccgcagcgcctcagggagcgcggggcccactgacccgcggaagccagcggacccacttgtgcggcggtcggcgcggggcgcgaggtgaggcgcggactcccgggtcctgcggcgggagcggagcgagggagaggggccccggccagggagagcagtggcgggcccgggaaggaggggcactgggtcgacaccgagagaggaggccgggccggg

SEQ ID NO: 41357 - DNA, 2300 bp, Homo sapien
tcagccagcaacgcccaaggcggcccggcgggacctgtgccctgggcgcccgcgtgccggcagccgcgtctcccgagggcccctccccggcctcctccgtcgccagcctcctctctcccttcggtctcctcctcctcccgcccttcccggcctcctccctctcctctgcctcatccttccccggcccggcctcctctctcggtgtcgacccagtgcccctccttcccgggcccgccactgctctccctggccggggcccctctccctcgctccgctcccgccgcaggacccgggagtccgcgcctcacctcgcgccccgcgccgaccgccgcacaagtgggtccgctggcttccgcgggtcagtgggccccgcgctccctgaggcgctgcgggggcgggccccgcacccggccctcgccatggcaacgctacacttccggcccgcggtacccatagccggaagccgcggtgccccgtgggagccgggggcggagcctgggaggaggaaatgtcgggggcggggcctggggagggacggtcgggggtgggggccaacgcggacagctgcgggcggccgggcgagtcctccgcggctgggacctccttggggcgtgggtgggacgggaatggctcaaagtgctccaaggctcccgggacggtggtcattgatttatgctggacaaaaccgagtcatcgcgggcaacgggacgggcgccagcggaatgggtggcagctttgggggtggtttcgggcccaggacagtgcggtcggagaagagcggtcagaacttggggagcctccagcgccccaccaaggaagcgccagtggagaggggggtgccttaaaacttacgggagaccgggcgcggtgtctcacgcctgtaatcccagcactttgggaggccgaggcgggcagatcacgaggtcaggaaatcgagaccatcctagctaacctgatgaaaccccgtctccactaaaaatacaaaaaaattagccgggcgtggtggtgggcgcctgtagtcccagctactcgggaggctgaggcaggagaatggcatgaacccgggaagcggagcttgcagtgagccgagatcacgccactgcactccagcctgggcggcagagtgagactccgtctcaaaaaaaaaaaaaaaattatgggaaaggcccggcccggtggctcacgtctgtgatcccagcactttgggaggaggccgaggccagtgggtcacttgagcccgggagaccaacctgagcaacataggcaggcccggtccctaccaaaaattaagaaattagctgggctctgtggcgcacgcctgtagtcccgggacgctgagtcgggaggatcgccctagcgggggaggtggaggctgcacggggcccagatcgcaccactgcactccagcctgggcaacagagtgagaccttgtctcaaaacaacaacaacaacaaacacttgtaggaaagaacgacgccttgctgaccgaatggggtgaagtggccacaagtattagcctcatgaggcacaggattgtgcagccataacctagggaacacagcagagaggtggtggcaggagtcctgagggaaaccacgtggcgtctgaggggagagtcagagatagaaggaaaaggggcaccacccgaccgggggtgtggggggcaggagcagtgtggtaccccacatacaaggccccttgcggcccaggcctcctcctcctggacacttgctgcctgtccctcccctccacacctcagggtgtgctggaccccaccgtatgctgcagattttcagccctttgaggttatcatggtggaggctgcacaagaaaagctgaattctcagagtgaagggcaaaagcatatccctgggcccccgtgtgtctgggggcccttggcctggtgccagcaccaaccaccgctgctaattcccagagctgctatcctcttgggcaaacttgccccttgtgagggaggagaacctgggctttggggcaggatacacaataccagccttgcttgggtggaggagcagagatggctagggaggaggaggtgagcggtccacctgggctcctgaagcaactcccaggaaatcagttgagtcaatgtgtccccctcttgttcctagggtgcgggcttcatggccttctcctccaggaagctccacctgatcatgtcctgggtggatatccagcccccatagttcagggcctactagcagctgctagatcttgaactccaggagcgccccacgccttgggagcttggcatgggctaaatactcccccatttgtta

SEQ ID NO: 41358 - DNA, 2300 bp, Homo sapien
ggctggagagagactggggatgggcaagggcagcctgccttgctcttggcttgtgatctctttgggttggggtgggggtgagtagctactgcccaggtgggttctctggcaggtccagagatgctaatgacagaaaggtgaggatctcctcttgccagccctgtcaggaagagggtgtgggctgtgagtggctggcagggagggagggctctggcatgccaggtgtggtctgcctcctctgtcctcatggatgcggacctggcagcatgcctgcaagactggctctcctgcctctctggtacccatgctgtgtctctagagggcaaggggaggacttgggagcctgggcagggtgtctggccagtgtgtgcttgccctggcctctgcggtctacagagctggccaggcttaggagcaggctgctcggagggagagttactgcctggaaaagctctttacttggcaggcagaaagccaggtcagggccactggccttattggccgtgtcctcaggaagcctctgaggctaggcctacagggggggactatgtctagagtaggctgaacctgtaaagtggggctcccagataaattgggggcccctgagcaggaaggacctgactggcttaatttgacctggcccaggacagttccctttctgaaagaagggggcattctatgaaacacctgggtagaagtccagcagtgaagagttgggtcagtgtgtagatggccatgaggcctggctgggtggagaataggactcctggcaggcatcttctgcagagcacggagtgccttctttcttttctttcttcctttctttctttctcggagtctcgctctgtcacccaggctggagtgcagtggcgtgatcttggctcattgcaagctctgcctccctggttcacgccattctcctgcctcagcctcccgagtagctgggactacaggcacgtgccaccacgcccagctattttttttgtatttttagcagagatggggtttcaccctgttagctaggatggtctcgatctcctgacctcgtgatccacccgccttggcctcccaaagtgctgggattacaggcctgagccaccgcgcctggccaagcacagagtgccttctgaggtgaggcctgtggccagcccagcaaccacacttagtgtgtcgggcaggactagggccatagcaggtacataggcagggttgtgccccagccgaagctgtctgcctgcctgtctgtccccataggcctcaagccaggcaccaggtgggggcttttattgcagcctaggatggcagaggcattgtgggagcccatcaaggaagaggtctagagactgggcagtgagaggctggggtatcagtcaggacaggaggaggcggggcctacccttggaaggcaggagaggtggaggcccaggaggcggggcctgcccttggaaggcagtagcctgcaaagccctcaaggctgttccacgagacctcaccctgcccagccttagggcagcgcctggccctggaggagcagcctagcagggaacgcctcgctggggtgggcggccctttctggaaagggtgggtgggaggagcctgacatgcctttcccccgcccctctctgaacctggggcagaatgggggcagagtagctccccgtacccccaggactgttgacctgcagtgctctctgtggacaaagggtgggcctcacacagggcaggacctgagacagctggaagcctggtctcacctgaggcccagggcaggggctcccccgggccaccctgcctcaagccggccttgatatgcttccttgttccccacttctcaggtgtgagcagctgctggaagaggaggtgctcctgaagacactgcggccggcccgcctgtgcccttggtgccctggctgcctagagagcctcacccctgggccctggggccaggactccaggactctgactacctgccctcccccagcctcagcggctgcacctcctcgttagtactgatgcactgacctcggcacacagctgggaggggttgggggctgggtcatggctgctcccaggccccacccaggctcctgagcctagaaggtgaaaagaggactctcaggggctcacaggggctctcactgctggttggccctgccctcccttccccctcagcagggtgcccggaagctggaaccttgttatctgggtaattagtttcagaccctgcactgaggccggccaggtctcggggctgcctcccataggttgtgcaccctgaccccgagagggaggcgaggcgc

SEQ ID NO: 41359 - DNA, 2300 bp, Homo sapien
gaccccgcccaccccctcggactctgcccccagttcggctggcactccgcccggggctgacgtccgcggggccaagcccggggcggggcctgctgggggcggcgctcacccgcggctgccggcgctggaggtgcggcggcgcagcaaggagcgctggcggctctgggcgcgcaggagggcgtcgtgcttgtgcttcagctccagcagcttggcccgcacctcctcgtccccgcacacatctgagaagtgggcgcaggcgtcaggggcgccctccccgcctgtcctctcccccaggtggaggtgggccccgcaagctcaccaaggggcgtctcgtccatcagggactttgcgttcaggtcggccccgtgcgccacgagcagctccaccaggggcacctgtggacggcaggccggagctgcagactgctgcgctggaagccccctcccacctgctcccgcccgcactcacctggccccagtaggccgcggcgtgcagcggctcccagccgtcttggtccttagcgctcaggctggctcggtgttccagcagcagggcagccgcctcgctgaacccgttggcggctgcgacgtgcagctgcaggcaagcgcccggcctgaattcggccccatcccccacctccaagtagcgaggcccccagccccgtgtgcccctcaccccccagccctcaccagcgtggccccgtggtccaggggggcatggaggtctgccccggcctgcagccggctccggatgtcgtccagcatgcgcagttctggcacggcccgggcggcctcgatgctgtcctgggtgatgcctgcgaggcggcaggctcagagggagcgcgaccggcagccctcccacagccgcaccgccgcacctaccacggtcggccatggcagtctccaggcagtccagcgtctgctcatcatcacacaggtcatagggcatgttcccgtcggtgttgaccgccaggagattggcgccactgcagggaagacggacggggtgctgggcacaaggcccttccccgcttgccaggctcctcacttggagaagtccccgccagggcccctcagcccagggctgcccctcaggaggcaccctgtccacctgctgctgggagaggcagccttggggcccatcggctgtcctagatcctgtcattaagccagacaggcctcctgcagtctctatccatccagggatccaggttcctggcacctccaggggcagcggtgcccccataaacatgcattggatgggcctgcctgctggggagcagggagcacagggtggcgggggtgcaggaccaggcagccacgctgaggggctgctgagctgtggggagcatggccccagggaagaagggcggtgaaggggagcccagaacacagaagggggtgtctgtgtgcagtggaggagcaggcctacctgtggacaccccacatccccgcctgccccgcagcgcctgtgtgtgacgcgaccgccatgcacaccccacccggcctcacaggggcactcgagaatgaccgcagccctgacctctctcccactacagatgcctggagcaaaggggaagggaggaggctcatggaccctccctgctcagagttccccccgctctacgtccctctgtgttaaaggtaaaggccctacctgtgctcaggtaccctctcctcccaagccacctggcctcctcactctgcttccctccttagcagttctgccctcctcactgaccaagacatttctctgtgcacactctgggggggggcccgaggcctgccctctcggcaggaggacgaatgctggggaggcagggaccgcgctgccctgggcacatgcccattcccctggagccccaggccctgctctccatgccaggacacaggcagggtcagcaaaggtgaaggcgggaacacaggaggccgagagccacagatactgcccaagaggagcctcctgagcggccatctgagaggaagcctctccctgccaaggacgcccaacaggccctacctggcgatgagcagctccaccaggtgcaggtggccgcaggtggccgcagcatgcagaggcgtccagcactcactgtcacaggcattgatgttggccccagcctccaggagctgctgcaccatctctcggaaatcatcaatgcagcactgcaaaccgtgccacgtgagcgaccagagcacgggggccagcccccaccctgcccacacccagtgcaggctgacctggtgcagggccgtcaggccgtcctcgttggccaagtcagggctgaccccactcccaag

SEQ ID NO: 41360 - DNA, 2300 bp, Homo sapien
cacctggctcctctcaggagagcaaagggttacggaggaggctccaggaggctgagcatgggagggagtgggtgaggcccaggcttccagcccagtggctgtgagcctcactcccacacagccagggctgccacatgccccagcgcgcacctacaggctttcatgctcacaggcacgggtggcaccccagccaaacagcacaacccactccccactgtgggacagcgacccagctgagacacacaacacacaacgaggctccatggcaaaacagccctttatcaagagttgcaggataaaaatagtctttgcagccagacatccctccaggcatgtcttctgacctgagaggggccagtgtcctgtacagtagaagccggggtttccgtgctgcacccgcagcaccagggcacgcaccgtggggaggcagccttgggctgtgcccgcgacagggcccctgcatgctgagcaacagcctcacatgagcaggcagcacggcctcctctccacgggagcctccaccgccggggctgtgagcttgagcaggggtgggtccccgcctgccctgaagccacagtcaggctggggggtcaccgtgtcaccaggcaggccaggctcagctgtctcagggctctcgggcccctcaggtgggggtcgctgcagcttggcagcagctcgctggcgcttcaggtcagccagggtgtggtgggccttgtcgtggaccagggtgtggggggtggtgctgtccagggggctcagctggtaggagacactccggtctagtcgcttggagtatagatgccgcactggggagccccctactcggccattgtgcggcctgaccacttcggggttgtcctcctgcgggcagtgaaggtcccagagccatcaggaggctcctcccccctccctggccttgggttcaggctgtatggtcatgaagggacagacaggagagatggggcaaaagctggcccctgcagggcaccattcctgacacaggcaggagggggtccaagcggagagagaaccagggcagagccaggcccacccctgcgctgggcggagcagggacggggcgctcacctccgggggcggcggcctgagctctgcgcctgtctggcggtcatcgttgtcctcgggcggctccgggctggtgggcggcggctgttgccacacgatggcctcctgggcgtgctgcttgcggtacaggtcggtgcgctgggttaggctcacccgcctcaccaccttcctggggaggagagaggagagggagtgaggggaaggggagtgcccggaggaccccgcccaccccctcggactctgcccccagttcggctggcactccgcccggggctgacgtccgcggggccaagcccggggcggggcctgctgggggcggcgctcacccgcggctgccggcgctggaggtgcggcggcgcagcaaggagcgctggcggctctgggcgcgcaggagggcgtcgtgcttgtgcttcagctccagcagcttggcccgcacctcctcgtccccgcacacatctgagaagtgggcgcaggcgtcaggggcgccctccccgcctgtcctctcccccaggtggaggtgggccccgcaagctcaccaaggggcgtctcgtccatcagggactttgcgttcaggtcggccccgtgcgccacgagcagctccaccaggggcacctgtggacggcaggccggagctgcagactgctgcgctggaagccccctcccacctgctcccgcccgcactcacctggccccagtaggccgcggcgtgcagcggctcccagccgtcttggtccttagcgctcaggctggctcggtgttccagcagcagggcagccgcctcgctgaacccgttggcggctgcgacgtgcagctgcaggcaagcgcccggcctgaattcggccccatcccccacctccaagtagcgaggcccccagccccgtgtgcccctcaccccccagccctcaccagcgtggccccgtggtccaggggggcatggaggtctgccccggcctgcagccggctccggatgtcgtccagcatgcgcagttctggcacggcccgggcggcctcgatgctgtcctgggtgatgcctgcgaggcggcaggctcagagggagcgcgaccggcagccctcccacagccgcaccgccgcacctaccacggtcggccatggcagtctccaggcagtccagcgtctgctcatcatcacacaggtcatagggcatgttcccgtcggtgttgaccgccaggagattggcgccactgcagggaagacgg

SEQ ID NO: 41361 - DNA, 2300 bp, Homo sapien
gctgctggagctgaagcacaagcacgacgccctcctgcgcgcccagagccgccagcgctccttgctgcgccgccgcacctccagcgccggcagccgcgggtgagcgccgcccccagcaggccccgccccgggcttggccccgcggacgtcagccccgggcggagtgccagccgaactgggggcagagtccgagggggtgggcggggtcctccgggcactccccttcccctcactccctctcctctctcctccccaggaaggtggtgaggcgggtgagcctaacccagcgcaccgacctgtaccgcaagcagcacgcccaggaggccatcgtgtggcaacagccgccgcccaccagcccggagccgcccgaggacaacgatgaccgccagacaggcgcagagctcaggccgccgcccccggaggtgagcgccccgtccctgctccgcccagcgcaggggtgggcctggctctgccctggttctctctccgcttggaccccctcctgcctgtgtcaggaatggtgccctgcaggggccagcttttgccccatctctcctgtctgtcccttcatgaccatacagcctgaacccaaggccagggaggggggaggagcctcctgatggctctgggaccttcactgcccgcaggaggacaaccccgaagtggtcaggccgcacaatggccgagtagggggctccccagtgcggcatctatactccaagcgactagaccggagtgtctcctaccagctgagccccctggacagcaccaccccccacaccctggtccacgacaaggcccaccacaccctggctgacctgaagcgccagcgagctgctgccaagctgcagcgacccccacctgaggggcccgagagccctgagacagctgagcctggcctgcctggtgacacggtgaccccccagcctgactgtggcttcagggcaggcggggacccacccctgctcaagctcacagccccggcggtggaggctcccgtggagaggaggccgtgctgcctgctcatgtgaggctgttgctcagcatgcaggggccctgtcgcgggcacagcccaaggctgcctccccacggtgcgtgccctggtgctgcgggtgcagcacggaaaccccggcttctactgtacaggacactggcccctctcaggtcagaagacatgcctggagggatgtctggctgcaaagactatttttatcctgcaactcttgataaagggctgttttgccatggagcctcgttgtgtgttgtgtgtctcagctgggtcgctgtcccacagtggggagtgggttgtgctgtttggctggggtgccacccgtgcctgtgagcatgaaagcctgtaggtgcgcgctggggcatgtggcagccctggctgtgtgggagtgaggctcacagccactgggctggaagcctgggcctcacccactccctcccatgctcagcctcctggagcctcctccgtaaccctttgctctcctgagaggagccaggtgctttgaaggagcctccatgggggccagggcctagggtgtctgtgctgaggggcggaaggtgggggtcccagggaccatggcttggaaagggaggtggtgttttccacaagactcttgtgtcagagccagaggggcaaaacaagcacaaggctgtgtcagaagctccctgggggggttgtgggtccccagttcctggcacgcagccttaatcctggggcctggctgccagcttccgcctgggctggcataggggacacgcagttggccactctggctctgagctggcttggcacaatgtgtcagggtgagggggccccttaggggcctcaagcaggagggctgagggcaccgctggttcgtctgttcatggtgggcggctttgtgtggccaccagtgctgggtggtgtgggtttgggctgttctccctcctggctcagcacgggcccgtcagcccagtgtcctttgggcctgcccttcccctagcatccctggttggaagggtgtcctcacagggctgtgggcgggccagggctggctgctggttaaatttagtgtggggggtggggcagctgcccaaggtccacctgccaccagggctgccacttggactcccttgccagggggcgggcaggggctggctctgcctggggccaggcccatgttaacctgtgccccggcctgggggccagaggggcaggcctgcgcacggggaggctgttgtggcagcggaacagagacgtgcacggtgagaggcctgggggccggctgtccagggctcccgatggcttttct

SEQ ID NO: 41362 - DNA, 2300 bp, Homo sapien
agcccaaggctgcctccccacggtgcgtgccctggtgctgcgggtgcagcacggaaaccccggcttctactgtacaggacactggcccctctcaggtcagaagacatgcctggagggatgtctggctgcaaagactatttttatcctgcaactcttgataaagggctgttttgccatggagcctcgttgtgtgttgtgtgtctcagctgggtcgctgtcccacagtggggagtgggttgtgctgtttggctggggtgccacccgtgcctgtgagcatgaaagcctgtaggtgcgcgctggggcatgtggcagccctggctgtgtgggagtgaggctcacagccactgggctggaagcctgggcctcacccactccctcccatgctcagcctcctggagcctcctccgtaaccctttgctctcctgagaggagccaggtgctttgaaggagcctccatgggggccagggcctagggtgtctgtgctgaggggcggaaggtgggggtcccagggaccatggcttggaaagggaggtggtgttttccacaagactcttgtgtcagagccagaggggcaaaacaagcacaaggctgtgtcagaagctccctgggggggttgtgggtccccagttcctggcacgcagccttaatcctggggcctggctgccagcttccgcctgggctggcataggggacacgcagttggccactctggctctgagctggcttggcacaatgtgtcagggtgagggggccccttaggggcctcaagcaggagggctgagggcaccgctggttcgtctgttcatggtgggcggctttgtgtggccaccagtgctgggtggtgtgggtttgggctgttctccctcctggctcagcacgggcccgtcagcccagtgtcctttgggcctgcccttcccctagcatccctggttggaagggtgtcctcacagggctgtgggcgggccagggctggctgctggttaaatttagtgtggggggtggggcagctgcccaaggtccacctgccaccagggctgccacttggactcccttgccagggggcgggcaggggctggctctgcctggggccaggcccatgttaacctgtgccccggcctgggggccagaggggcaggcctgcgcacggggaggctgttgtggcagcggaacagagacgtgcacggtgagaggcctgggggccggctgtccagggctcccgatggcttttctcccagccagcaggatcagaggagccaaggtccgacttgggcctggctggttgcccacagccctgctcagagggccggctccctgacccccatggttcaggtttcggtgcccgacgctggggtgggccagcgtggagcctggcctttcagctcagcaggcctgtggaggtggggctctgacggcctatcccagctcgtttcctactctctcctccaatcgggaacaagagggctggagagctcaggtcacccctagcctcgggtgtgtcccaagggcaacccccagctggtgcctggtgaaagggcatgacagcagccacggtgtgagctgtcccagggctcagggctggactgcctggctccagccccctcccccagcccctcgcagtgctcatcagggaccaaggtccagctacagagctcttgcagcctctgggccatagctgccagctctggagggtccagatggaacccagagcctgaacacccctcccctccccccagcaccccctggattcctgaggcctggctcagttaataggagacaggtccgctggcccaagcaaagatgcgggtgccacgagggccaggcctcggccaagccctgctggggtaaatcccagcagcccaggctccagtctcgcctcgggggtccctccttgccagctctgccagcccctcagggctgctgggcaccccttcacctcctgagcaccccaggtgctcagccctctccccctccccccatgtctagtccctcagagctgtccggactgacgtctgtacctaccccccatgtgggtctcctgctctcccttcgtggggacactaggcaggcactgggccttgccccaagccccgcctgccacctcacccactgcctctgcctccctggggcagagctgttcccagacgggtggggcggggcccaactgtccccagctccttcagccctttctgtccctcccagtgaggccagctgcggtgaagagggtgctctcttgcctggagttccctctgctacggctgccccctcccagccctggcccactaagccagacccagctgtc

SEQ ID NO: 41363 - DNA, 2300 bp, Homo sapien
gccaagttcaccctcgagtactcctgagcaccccagctggggccaggctgggtcgccctggactgtgtgctcaggagccctgggaggctctggagcccactgtacttgctcttgatgcctggcggggtggggtggggggggtgctgggcccctgcctctctgcaggtccctaataaagctgtgtggcagtctgactccagggaggaagcgttggcagctgcgtggcccgctcccacctgcctacccttcttgcaggcctgagtcccttcagagaagggaccttccacggccaccacccacctcttcctcctgaagaccccgtgcccaccataggctgggtcttccctctggcctctggttgtggggcagagcccgtcagatcacacagaaatgggttgagagggtccagagtgtgaggaaagcgcaggccccacacccctttgtggaagcccccaagaatctagggagccaggggcccaggtggccacccgaagaaacacagcctttcctgaggaaggcacagtgaactgcctccttcctggctccctttcctgtgaggtccatgtcttccctggggcagggggaaatactaaaccagcatggtgctggctggtcagggtgactgacagctcaggaaggaagtcttggttctcttacccaaggaagcaggggtggggccactgtctggggggccagagaccacctttggtgtcattgtgtggtgcagtccttcggctgggtggagtgggaggcagagggagaggataagggagcgtcccaggggagggctggggctggaggaggcaggggctgggctgagcgggagtgggcagcgctgtgtcctggcctggggagcatggctgagcacctactacatgcagacactgctggggggtcactcaatctgcacagatgctcttctgaagtaggcatgatagtccccatttgatagacgtggaaacctgcaacccaaaaacctgctgagctgacaagaaaccccctcagaggcctcggcagccagaaaaatgcgttgggtccagtgccctcaagtccgccaaggacagggctggctttagagactcacaaacttgggagataggactggccaagggcacctggtttttttcgctctggagatggttcttaaccacaggccacacacacttcacagcctcatctggccctcgggagccccagagggcacagctctgggcaggagacacagcaggtgggcccctcccttggcagggcgggctcgaatcaggcagggtgctcctagccttgtcaccggacaccgaagggcgtcacgggcagtggctggcggtgtccttctgagctaagctgggtcctgacctttcacacttccctcctaacttccatggctctgtcaccgccttacggaggagctgaagccacagacacagcaaggttggggtccgcaccggaagtatccagtggtagacggcggaacccttaagaaacggacgccttcatgcgggcggctggagaagcgggggctgggcactgcagcaaccacgcttcggctgacaccaggaaggaagcacgcctggagcggatccgaaactactgagaggggccagggctggccgtgggcgcaggccgatccttacattcgaggccggcccagctctgtagcttccccctctgggcctctcacccgcgcaggacctcggtgggagcgcgcacgtggcggggcggggggccgcgggcccgagcccggactggccaccgggggcgcccgcgagctgacgctctggcccgttgcggtctctgtggcccgcgcgaccttccggccctggagccggtggccgcggggctccagcgacgccgtgtggtccgtgctccgctctgtggctccagggggccgagaaactgctgagagtccggcccggccggcagtgctgggcgcgggccgagggccccgggaggcagcggccccgccctctttacctgcggcctcgcagagcatgctgggagccgcgggaggcagtggccccgctcccctcacctgcggtatcgcagagcatggtgggagccccgggaggcagtggccccgcccccttccctgcggccgcgcagagcatgccgggagccgccggccgccggtgtccggaccgctcgcccccgtttggacccgacttcggttcttctggggtgttgatgctcctaaagcccgagagcacgtgtccagaccctagcctgtacgacgctgactctgcccggtcccagaaccaaagccatgccggggtgtggcctctgaccccacgcggaggggacct

SEQ ID NO: 41364 - DNA, 2300 bp, Homo sapien
ctgagccagcggctgggctccctagatcctggctggttacagcgatgtcacagtgaggtcccagattttctgggggcccccaaagcctgcaggcctgatctaggctcagaggaatcacaacttctgatccctggtgagtcggctgtccttggtcctggtgctggctcccagggcccagaggcttcagccttccaagaagtcagcatccgtgtggggagcccccagcccagcagcagtggaggcgagaagcggagatggaacgaggagccctgggagagccccgcacaggtccagcaggagagcagccaagctggacccccatcggagggggctggggctgtagcagttgaggaagaccctccaggggaacctgtacaggcacagccacctcagccctgcagcagcccatcgaaccccaggtaccacggactcagcccctccagtcaagctagggctgggaaggctgagggcacagcccccctgcacatcttccctcggctggcccgccatgacaggggcaattacgtacggctcaacatgaagcagaaacactacgtgcggggccgggcactccgtagcaggctcctccgcaagcaggtaagacagcgacgggccaggacaggcattccctttccctcccctcagccctcccgtatttcccgcccagtgaccctcctatgtgggcaccccccaggcatggaagcagaagtggcggaagaaaggggagtgttttgggggtggtggtgccacagtcacaaccaaggagtcttgtttcctgaacgagcagttcgatcactgggcagcccagtgtccccggccaggtgagacatctgccctggagggtgggtccggccaacactgtggagagggcgcagtgctcttttgggggacacttatgttccaagcaacaggccttccaggtacccctggtccaggccctaccctagctcccctgaaggagggtggcagggacgacgatggctgtcactcttttctgctttggaaaaagtagcccagaggaagggcactgcctgctgccaaccccctttgggggaaggagaggttgtggccagtggttgtcttgcccgacctggagctcccattctaccctctcctgcctgccccagcaagtgaggaagacacagatgctgttgggcctgagccactggttccttcaccacaacctgtacctgaggtgcccagcctggaccccaccgtgctgccactctactccctggggccctcagggcagttggcaggtgagcagtcagcttctggcccagagccttcactgaggggttggggtgactcaagtcatggtgatcaacatctgtgtctgcagagacgccggctgaggtgttccaggccctggagcagctggggcaccaagcctttcgccctgggcaggagcgtgcagtcatgcggatcctgtctggtgagcgtggctgccagggctgaggctgggctgaggccaggctgcagaaccctgctgctgactcccgccccatccaggcatctccacgctgctggtgctgcctacaggtgccggcaagtccctgtgctaccagctcccagcgctgctctacagccggcgcagcccctgcctcacgttggtcgtctctcccctgctgtcactcatggatgaccaggtgtgcacacagggccctgggcacacgtacacagccaagaaccagcacttgtgactcccaagggcaactgctgcttgtcccctaaccaccccctcccctgggagcttcaaggtgtctgtggcctcagtcccagtcttggcagcaggtcaaaggcagcccagctccacaggcaccacagccacccctacgggaaatgtgctgggaaaggagccatccctacttcagtctgtctgctctggggctcctgggccaaggcccacaggtggctctaaacccttagccctaggacccaggacctggttctcctctcccctgagggactaggatggacatggcagcagctctgggatgacttggggaagggccagggctgggctggcgtatgacggctgtcgctcctgcatttgcaggtgtctggcctgccaccgtgtctcaaggcggcctgcatacactcgggcatgaccaggaagcaacgggaatctgtcctgcagaaggtgggggcctcatgggcctaggggtgagggaggcagcgggcgggcacctgggctgtgcctctgatcttgctgccttcagattcgggcagcccaggtacacgtgctgatgctgacacctgaggcactggtgggggcgggaggcctccctccagccgca

SEQ ID NO: 41365 - DNA, 2300 bp, Homo sapien
cgccgtggggcacagaacttgggagggggactgggcaaagtgaagaagggccgggcctcgctccaggtgcgggaggggtggctgggagcgcttctgccgccacaacagccttttctggcctgtgcccctgttgtctcctgcaggcgccagagccccgctgctgggggccccatctgaatcgggctgcgaccaagagtccacagtctacgccagggcggagccgccagggctcggtgccggactacgggcagcggctcaaggccaatctgaaaggcaccctgcaggtgaggagtgggcaggcagtgagtccacgctaggtccacagctgcttccggtccgggtcgccctcttgtcattttttccacacagacaggcacgggcccctgtgccaaccagggcacgagtcttcagggagcttctcggggccttcgcccttgactccctttctagtccagccttgtgctaattagcctgctctacaattgagcgtggggactcaggtaggttttagagtctacagtagctcaggggcctgagttcctcctgctgttctgttgttcccctcccaggccggaccagccctgggccgcagaccgtggcctctaggaagagcctcatctaaggcatccaccccaaagcccccaggtacagggcctgtcccctcctttgcagaaaaagtcagtgatgagcctccacagctccctgagccccagccaaggccaggccggctccagcatctgcaggcatccctgagccagcggctgggctccctagatcctggctggttacagcgatgtcacagtgaggtcccagattttctgggggcccccaaagcctgcaggcctgatctaggctcagaggaatcacaacttctgatccctggtgagtcggctgtccttggtcctggtgctggctcccagggcccagaggcttcagccttccaagaagtcagcatccgtgtggggagcccccagcccagcagcagtggaggcgagaagcggagatggaacgaggagccctgggagagccccgcacaggtccagcaggagagcagccaagctggacccccatcggagggggctggggctgtagcagttgaggaagaccctccaggggaacctgtacaggcacagccacctcagccctgcagcagcccatcgaaccccaggtaccacggactcagcccctccagtcaagctagggctgggaaggctgagggcacagcccccctgcacatcttccctcggctggcccgccatgacaggggcaattacgtacggctcaacatgaagcagaaacactacgtgcggggccgggcactccgtagcaggctcctccgcaagcaggtaagacagcgacgggccaggacaggcattccctttccctcccctcagccctcccgtatttcccgcccagtgaccctcctatgtgggcaccccccaggcatggaagcagaagtggcggaagaaaggggagtgttttgggggtggtggtgccacagtcacaaccaaggagtcttgtttcctgaacgagcagttcgatcactgggcagcccagtgtccccggccaggtgagacatctgccctggagggtgggtccggccaacactgtggagagggcgcagtgctcttttgggggacacttatgttccaagcaacaggccttccaggtacccctggtccaggccctaccctagctcccctgaaggagggtggcagggacgacgatggctgtcactcttttctgctttggaaaaagtagcccagaggaagggcactgcctgctgccaaccccctttgggggaaggagaggttgtggccagtggttgtcttgcccgacctggagctcccattctaccctctcctgcctgccccagcaagtgaggaagacacagatgctgttgggcctgagccactggttccttcaccacaacctgtacctgaggtgcccagcctggaccccaccgtgctgccactctactccctggggccctcagggcagttggcaggtgagcagtcagcttctggcccagagccttcactgaggggttggggtgactcaagtcatggtgatcaacatctgtgtctgcagagacgccggctgaggtgttccaggccctggagcagctggggcaccaagcctttcgccctgggcaggagcgtgcagtcatgcggatcctgtctggtgagcgtggctgccagggctgaggctgggctgaggccaggctgcagaaccctgctgctgactcccgccccatccaggcatctccacgctgctggtgctgcctacaggtgccggca

SEQ ID NO: 41366 - DNA, 2300 bp, Homo sapien
ctgcttccatgcctggggggtgcccacataggagggtcactgggcgggaaatacgggagggctgaggggagggaaagggaatgcctgtcctggcccgtcgctgtcttacctgcttgcggaggagcctgctacggagtgcccggccccgcacgtagtgtttctgcttcatgttgagccgtacgtaattgcccctgtcatggcgggccagccgagggaagatgtgcaggggggctgtgccctcagccttcccagccctagcttgactggaggggctgagtccgtggtacctggggttcgatgggctgctgcagggctgaggtggctgtgcctgtacaggttcccctggagggtcttcctcaactgctacagccccagccccctccgatgggggtccagcttggctgctctcctgctggacctgtgcggggctctcccagggctcctcgttccatctccgcttctcgcctccactgctgctgggctgggggctccccacacggatgctgacttcttggaaggctgaagcctctgggccctgggagccagcaccaggaccaaggacagccgactcaccagggatcagaagttgtgattcctctgagcctagatcaggcctgcaggctttgggggcccccagaaaatctgggacctcactgtgacatcgctgtaaccagccaggatctagggagcccagccgctggctcagggatgcctgcagatgctggagccggcctggccttggctggggctcagggagctgtggaggctcatcactgactttttctgcaaaggaggggacaggccctgtacctgggggctttggggtggatgccttagatgaggctcttcctagaggccacggtctgcggcccagggctggtccggcctgggaggggaacaacagaacagcaggaggaactcaggcccctgagctactgtagactctaaaacctacctgagtccccacgctcaattgtagagcaggctaattagcacaaggctggactagaaagggagtcaagggcgaaggccccgagaagctccctgaagactcgtgccctggttggcacaggggcccgtgcctgtctgtgtggaaaaaatgacaagagggcgacccggaccggaagcagctgtggacctagcgtggactcactgcctgcccactcctcacctgcagggtgcctttcagattggccttgagccgctgcccgtagtccggcaccgagccctggcggctccgccctggcgtagactgtggactcttggtcgcagcccgattcagatggggcccccagcagcggggctctggcgcctgcaggagacaacaggggcacaggccagaaaaggctgttgtggcggcagaagcgctcccagccacccctcccgcacctggagcgaggcccggcccttcttcactttgcccagtccccctcccaagttctgtgccccacggcggcctggccgcgactccgtggctcccgccactccgccaaacagggaagtgggaggaggctggggcggcggggcctgggtacctcttcggccgccgcggggagcgactcggagctgcggagcccgccgccggcctggcccgtggtacgcttcagagtgcggtattcccggtagagcgctgcgtgggcgagcgggaggcggggtcagggtggggcctgggcccctgccgacccggtgtcttctcgcccccgccgccccgccgcgcgctcaccgcgggtctcctccggcgccgcctccacgtcgtcctgtaaagggaacgcgtcagccgcgggccgcgccctcagcccctcggcccctgggcagcccgcacctggctcggtcgccgcccgcgctgccgtcggaacgcgcgctcccacgcctgcagccgctcccgcacgtcccgcagccgctccatggcgcgcgcgcccgcccggcctccgcgcttgcgatcgtccagcgaatctcccgcgcagccgtcgcgggggccgacagccaatgcggatgcgcggcgggccgggggcggggccaccgcccctgggcagccagtccgtcgggcctcggacaagcagccaatgggaggcgtcaacgtcatcgcggggcgccgcggcgccgggcggggagcggcggacggtctaggcggggctggaggcggtggctgcggttgcgggaccggtgagcgcgggcggccgggggggtgtctgagcggggcggcgcacgcccctggccctgcctggcctcaaggggcggggcaccggtcgctcggggcggcctggccgagggaggcagtggctgcatttgggagcccgggg

SEQ ID NO: 41367 - DNA, 2300 bp, Homo sapien
cacggctgcagtgggcacactcctgtagcagctgctggaaactgagcagcgggaagggccacgtgtgtaccaactcgcgcagtaccactgtcttcttgtccatgaaggccaccttgaacagcagggggaagagttcgcgtggcagcaagggcagggcctggcaggcagctggctggcactgcagcacctgccgtgtgctcaagaacacaagcgtgtgcatggtgctgggccgggcagacggccacctgcaggagagggacttcagcagggaggagagaccctaggccactaccaagccacacacaagtggtaggaaggcccagcatagtgcctgaaacaaagtcagcagttagcagtggccatggcacagagaagcacctattagatgcctagcgctgggctgggtgcagtgaactggcagacaaactcacaactcagccccagccctccagatgcacaggatctctttagagaaactaagcgtcaagcagtgtggcatcgtcaacaactcgcttgcttgggtatgcttttgacagatgcctgttgccttgcagggccccccatgggtacttcaggcctctcaaattacaaagctgcttcacaaaaccttcttcgaaacctgaataaagcccaggactctccccaccaaccttcatcagcattagtattgacgggacactctaaggagtcaagcagccaaatcacctttccctcccctctcctcacagatgctctccagggctacacttggactccacaaaacaccaaagagctggaagcacagaagcagcttcataagcaacaaggcaggttgaaaagaccgagacccagggaacaccgagtccagatgatgtagcctataaaatacaagcccccgcaaaagctactattctccagagcgtcaccaagcacggagaccccgaaagaaagcaaccctcacctttgttggcccttaccactggcctaaacctctccctcttccctggagagccactgtggaaagaccaagtcttaagtatgtgggattcagaaggtgcaaagctacagactgctcagacaaggcaaagaaagctgcctcagcagcacccaagctgcagagatgcacaaacactcccaaggccacaaggtacctgtgacacagggtgccagccctgctgctgcctgtagcatcctcaaaactaaatcgcagccatctccctgtgacagattagaaaatgaaggcctcggcctggcccaaggtcacagcctgagtgacaagccagggaagggggccggggaagacactctggccccaaggcccttctttttgtcgacttttccacatacaagtaagtccttaaggcaccggttcctgaaaagtcccagacaccaaccctcggcctagttctgccggtggacagatctcaacgatcatactcgctctgacaggacagaccaaccgagcacttgtcacgggagaacaccaaagcagacggcctgcccaccaagggaggcaggcacctccgtgcgacgccccctcccctcccgccggccgcagggaacgcgacggtcctcggtcgcctgcgtttcgcgaagacgcccccgcccggctcctccgggcctcgagccgcgggaggcgctggaccctccgctctttcgcctcccgagcggggcctgctcctccaggtcggatgcgtctcccaccagggcctgacgccgctccgaccggcccggggactcccagtccttcccggcccgcggtggcacctcccaggctcccggcctcggccccgggctcccaaatgcagccactgcctccctcggccaggccgccccgagcgaccggtgccccgccccttgaggccaggcagggccaggggcgtgcgccgccccgctcagacacccccccggccgcccgcgctcaccggtcccgcaaccgcagccaccgcctccagccccgcctagaccgtccgccgctccccgcccggcgccgcggcgccccgcgatgacgttgacgcctcccattggctgcttgtccgaggcccgacggactggctgcccaggggcggtggccccgcccccggcccgccgcgcatccgcattggctgtcggcccccgcgacggctgcgcgggagattcgctggacgatcgcaagcgcggaggccgggcgggcgcgcgcgccatggagcggctgcgggacgtgcgggagcggctgcaggcgtgggagcgcgcgttccgacggcagcgcgggcggcgaccgagccaggtgcgggctgcccaggggccgaggggctgagggcgcggcccgcggctgacgcgtt

SEQ ID NO: 41368 - DNA, 2300 bp, Homo sapien
gcgcacccgactccggcgccctccggattggcctgcgctcgagacgtcaggcactggcggcgggcgcggggctctggtgcgcgtgcgcgagcgtcccccgccccctcccagcccggcgactgctcgggcccggccgccacctgcacggcgggggagccgctcgccgcgggagcgtcaggtgaggggacgcccgacccaaggtcaccaggcgtgggggcgctgggggatcggggaccatcccggctctgaccctggtgcgctccgagaagggcgtgggtcctggagggggatggggaacgcggaggccacgccctccctgagcccggccgaaaatcaaccggctctcgtgggtagcagaggaggccgtgggggatacaggcaccaggtcgcagcgctgcagaggtgcgcaagggccgcccaaagaccagcttgggcctcgcactgcgcccgaggcagacacagggcgttccatcctcttccctccccgctcccgcacagaggggcgcccaggaggcagtgacagtcgtcgcggaatcctgcgtgtgacaccccgcccctgcccagcggattagggagttgtcctctggtaaaaggatttctgggctgcttccagcttggggccctcatccctgccctggcaggcctttctacaccgatctgcatctagtggggggtcagcgtgagcagcagcgccgtgagttctgaggccaagaaccttctccacttgagaagccttcctgggggaggctgagtgggccaggcctggagccacgtaccaacactttatacccaggggaatggatcccaagggcccagataacgcccccaacttcttggggttcacacgcgtcctgagacatctgggaactgcctctgcctgggccaaagctattccattaaaactttattgctgtgcttacttatttctagtgactttaaataatcatgtgagttacaatttagggcaagatttaaacaccaaggccacttggtcctgtccctttccacatgactcgaaaggaggaagagctgatggacaggcaaatgtttggggaggccggccagatgaggctgggagacaggacacctgcagccctgttttccctggcttcgggtgggctggctggcttagcccagatccctacttttaaaactgggctccttgttcctgaaaccagaccccagccttcccatttctttacgacaagtacatgtatatggtcccccagcaaactccctgctccttgctgatctcagaggtcacactgctcccagagcccacttgggaagccacaccagaaacccagttggtggcccaaggcgtcccctgtcccaccccagctttcccagggccccatctatccccaaagacaggacacctttctggggaccggcatgggaagcacagacccatggctcctgaaccgaatttcctattatttttctcatcccccaattctctgacaggttacctgagaaaaaggcccaattctagttaagctggtcccacccctaggccagcaggagcaggtgctggacaaagctgtgccttgacttccctggggctcgtagctcctctgaggccagctctgcccaggcccccacaggataacaaggaggcgtgtctgcccagggcctgctctccccctcctagccatgcttgggtaatgggaccccgggctttgtcacctaagcaaagttctcaagccataccctgtacttccagcttcttgcaccctagaaccaagcagcagccacttgcctgggggtagagtcgggggcagcaagcgacacacatccacgtcctgagcaggaagctcctgacctgctgggcatgggtggagaaggagaaggtgacagggttgggtggctctccctacatggtcacatcctgtgaagacactgaggacaccaggaattctaaatttgaacctgatgccccagagctttaagaaaatgtttttgtcaaaggagaaaaccagaacgttttattagtttcttgaacctatttatagcgtcaaaagttagacgcaggtgcaggcctccattccatctattggctggctctcgactgccgagactggcctgccaacctgtgtttcaggagggcacgcgtctgcggctgaaccgcggaagggccggtgaggaaccgggcctcgggagatggccctgagggcccccgcactgctgccgctgctgctgctactactgccgctccgcgccgccggctgcccagcagcctgccgctgctacagcgccacggtggagtgtggcgccctgcggttgcgcgtcgtcccgct

SEQ ID NO: 41369 - DNA, 2300 bp, Homo sapien
gccgtgcctgctatgtctagcccactccccacctgctgctctctgccctgtgcccttcagctgtgcctgctctgcagacaccccctcacggtggctacacagacgactcctgagaaaaatcctgttttgcacaactctgctggcgtgacccacatgcctccaggatcgagttcaggcccccaggagccgaaaggccctctggggtcagggcccagcctggccagatgggccctgtccagaatgagccggccctcccagcctgtcccccacagcacccctccatgcatgtccgccacgggaccccatttggcccaggggtgcccgccgagcagggccgctgagccccgtgctgtgtccccagcgtccctgctgaagctgtggtaccgggagctggaggagcccctgatcccgcacgagttctacgagcagtgcatcgcgcactacgacagccccgaggcggcggtggccgtggtgcacgcgctgccccgcatcaaccgcatggtgctgtgctacctcatccgcttcctgcaggtacttccctccccgggggtccccgctgctttcccctccccgccccgcccccgcccctccgcgcccaccctcgctcctccaccaggtcttcgtgcagccggccaacgtcgcggtcaccaagatggatgtcagcaacctggccatggtgatggcgcccaactgcttgcgctgccagtccgacgacccgcgcgtcatcttcgagaacacccgcaaggagatgtccttcctgcgggtgctcatccagcacctggacaccagcttcatggagggtgtgctgtagcgggggcgcccggggacaggagggatgtcctgccgcccccagccaggccgaactccgcactcgctctcccggcagaggggccagaatcgcccggcccagccctggagccccctccactcccccaggcccctggccccggcgctccccacgtcttctgcctggtctgagggtgcagccagggcacagcagcggcggggagggcgcctctggccccccacctcacggccagttcccgcgggcaccgcctcgccctccgctggccgcgggtcagctccgagaaagtgccttctgtgtcctggagccgagcgacgctgcctccttggggccgggctgcctccctgtggctcctgcgcgccctggcctgggccttgcccagccgccccggtctctccttccctttctcctgtcctcgtcctggcctgcagctcttcccagccccgagagagcttcccgacctgtccccgcctcctctccctccctcggcccgtggtccccagctggtgactgctcaggagtttgggggctccaggacagtgggcccggggcctggcaggctctcggtgggtggggtgggggcccccaaaccaaagtcctctggggtagggagcagggctgggcaggcattctgggggcagggtgggggaggggcgagagtatttttttcttcgtgtaactgtaaatccagaatctatcctgcatcgcagcccaccgtgtatagagatataaatagagggaaagatataagaactaaatttgctaatgacatagttttaacctaaatgctatttatctctgagccgtccccgtcctccgtgcagagcaagttgaggtcattccttcttttcttctccgatcttttttcttggcttctgaccaaaaaccaagctctaccccatccccatcccagacctgcaggagacgagcgagcgggaaggcgccgggcccgggactgtccgttctcggggccagagctgctgggggaccgagtttgtacattttccattttggaattttgagttccaattgttgtaaaacttaatttctccccagtttttatatatatattttttagagttccgtttttatttattaaaaacaaaagccccagccctgccgaggcctgggcggcgtcctcagtcgggtggtcccggggcctttgcggtcccgcccggctgagacgctcgccccgacgcatggacccgagaggcgacgacacgagtgaataaagtgcacatggaccctgcgcgtcctcccgttccttgtgggcgcggccgggggcgggaagagacgcggggcggaccggaaggggcgtcaccggcacacgcctctcggaaggccagggcgggcgagcccccgaggcccgagggagagggaagagcgccgggcccgggtcgcggaggcgggcgccgccggaacgcgaagcgcggggctactgcgggcaggcgcgagttcgcgcagcaccgcccccggcgtgacctgctggtcgctt

SEQ ID NO: 41370 - DNA, 2300 bp, Homo sapien
agctctaaggtccccggggcaggcctggcccccgagcagagtagcacaggccttaggagagctgctgctgttggtgcctctgtgggcagccgtccctcctgggcttgcctacagccggagggggatggagatgagggctgaggtccaggcaaggccggatcagggcagtgggctcagagcagagcaccccacacaggtgagggtctccctgggctggcgatgggcactgcccactatcccactgcaggtcagcagacaccttggtgcctggccctgtgcctgaggcagcgtgagtgcagtcatccccaccttcctagaccttagggcacaggcagcctgacccccagagtgaagttgcaggtgaagtagtgtggcctcagtccctggcctgcccactacagttgtgacaccggcagctgcctgctgagcactgcaacagacaggcattgtcacagtccccatcctacagaggagtaaactgaggcacagagagactgcattatgatcaccttcatcagctgagaggcggtggccccagtgtatcccagtcacagagtgttggagggtgtcccagtcccaagcaggctcaggctggggtgtttgtcccaccaggggcctggggacaggagatcagggcctgtcttcccgcagggacagcaagcaggaggcccagccctgccgtctgccccaggccccccagcctagtgactacatgtcccagctgctgagctgaggccctgggtttctgccgccttcctgcaaagctcattccctccttgccttcttgaggctctgaagcctgggtccagtgtgcgtgggcaccatccattctagaaaaacaagggtacctcatagcctgcccagaggggcccttggttccacatggtcccacgctggaggctggggccacatcctctgccaagacctgtggtcccaaggaccatgacagattttctaggacctaaacgtctatgaaaaaaaaaattcattttggttcctctaaaaaagagtctccttagcagtcacatgtcaactattctgtgataattagagatggactcaagacacgtgtgcacttttttttaacctggtccaaggaccccatgccctcagctgtccaccagaaactgctccttcaaagaagacaaaggtgttccgattgggggtcaggatccagaggcccccctcaccctggcaggcggtaggcgctgggcgctggggcaggtctcatgtccagaagcacagggtcctgtccatctgtccgaggtccatggctcccctggccccagacagcttctcttggcgtgttctctcatctgctgcttcccgacctggagcaggaaggtgccgcgccttccagacccagcctgggaatcctctcccctctagcaccttcccctgggctctgtgtctggagactccccaggctgaggtccctgagtccctcatcaggtgctgactcaggcacactgcccctcccctcagggaccctgctgtcgggctgagttttaggaagcccctcctttgagaaaggagactgggccctctcattgctgcctcagtccttcagaagagcccagaggtggtacttcaggcccagggctgcagcagagctgggcttgctgtgcagatagctcagtgcctgcctcccccagcactggctgcgggtgctgggtaggtggaaatgactcctccaggggctcctgcccacagcctaaaagccagggaggggcctgaagcagagaagagtcaaatacctggacagctccctgggtcaggccccggggagggagcagtggggtctagaggccctcagacccaggtcctgcccttcctgttcctgcgtggccgtaggagggcaggtggagctgccaggcggttcctcccaagcctgtccctctgcaggtggggaagtgctccttgggcctctgctctaaaggacactgcctgggagagtgtgaggacccgctgtgctgggcagggggtgaccggggcaaggccagcccagccccccagggccctcgaaggagctgtgtctgctcacccctctcctggccccacacccacacacccacatcaggctgatcaggcccctttcctttccaggggtggcgataagcacgtatgccaagtactgttaccacaagctacagaaggcagccctgaccggggccaagaaggtacgggtgcgcctggggggccggggagggcaggcggggacacagagacccttggtggacagccccaggagccccgcctgcagtttggtatggggcagcagcgcagagggtgccacatgg

SEQ ID NO: 41371 - DNA, 2300 bp, Homo sapien
gcagcaggcccacttccacatgaagcagaggagcagctgggactcccagcaggacggctctggctacgagagcgacggcgccctgccactgcccatgcccgggccggtggtgcgggccttcagcgaggacgaggcgctggcccagcaggagaacaggcactggaggaggggcaccttcgagaagctaggcttcccccagatcctgctggagaagagcgtctccgtgcagaccaacctggcctcaccagagccctacctccacccctcacaggtgagggcccaatgggcgcggctgagcttgagagcctggggccagcccagtcagagtggaccccgtgggccaggcacaggagacctggcgtccagggcgtgcacgcagcacgcagagttctgaagccccgtgtctccggggccctgggcactccagcgggctgtcagggctcagctgggagtccacgaggaggccccgtggggtgtgggctgctgggcgttccctggcagtgccttcctcatcctgggggcacctgggagctggaggccacaccctgactccagacacagaacagagaaggcctcagcagcctgggagggtggtggccaccggagccgtggcctgggcccctgaggagcaggcagccaaggtgtcgggggttccctggtggttctcaaagccagtccccgaggctccctcgggtaggaagaactgccgggaggacagaggccgcaggaattccgggatgttgcgcccagcctggggcctctggcacgttccccatctggctcctggagctgatggaggctagatcccgtggaggccacgtgcacctctgtccagcatctccatccttgttctcacctccttgttctcacagggtgaggcagagggcaggcctagcgtctgaggacccgggagggtggaggaggaacacagggagcttccttgggtggggagacctcgagggcctgggtggccttcgtggtctccagggtggagaactcagagcagcttccggtccgtgattctgtccacttctcaagatgcaggacaagagggcagagaggcccagggtgcatggaccaggttctctcagagcagcaggcagggaggggcctcctggaggtcggcctggggtgaaggctggagggaagggcctggggtcccagcagtgaagggattgggaaccagacagcacttttacctggtgtgaactgcagccttccgtgcctgaacaagggcactgacacttcctcagggggcggcagaatgaggtcagccccctgggggtgccagcggatgctccccttcctcccgcctcaccctcagccaggtcacctgggtcacccatcagcaggctgccctgccacaccctgggagtacagggctccggcgtcccagctgcatctgtggacgggctgggctcccctgggcctcccacctcagacagctttgtggtgagcagggcagggctctcacctggctggctctggtggggccccagctcacacttctggggactgtggcccagtgggcccacctgcctggccctcccccacccccaacagcccagccgcatttgtccttctcagtctgaggacctcgctgcctgtgcccagttcgagagcagccggcagagccgcagcggcgttcccagctccagctgcgtcttccccactttcacgctgcgcaagccctcctcggagacggacatcgagaactgggcctccaagcacttcaacaagcacacgcagggcctcttccggcggaaggtgtccatcgccaacatgctggcctggagcagcgagtccatcaagaagcccatgatcgtgacaagcgaccggcacgtgaagaaggaggcctgcgagctcttcaagctgatccagatgtacatgggtgaccggcgggccaaggccgacccactgcacgtggccctggaggtggccaccaagggctggagcgtgcagggcctgcgggacgagctctacatccagctgtgccggcagaccaccgagaacttccgcctggagagcctggcccgcggctgggagctcatggccatctgcctggcctttttcccgcccacccccaagttccactcctacctggaaggctacatctaccggcacatggaccccgtcaatgacactaaaggtaaggccatgcacgggctttgccaccagctcaggtaagggcagtggagagggctcctgctgtgctgggcggcagctggtgaagtccctggcggccctccacacagggccatggttcgacacacacctcccaaaacgccccacactctggg

SEQ ID NO: 41372 - DNA, 2300 bp, Homo sapien
atagggaacaagatttaatccacaatgggcctaaggaatagccatggcaaaggagggtgtcggccagacgggaagcagtgacagccatatcaggtctccagcaggctgggtttttgtttaacaagaatggatttttggagatagcattgatgagtattttaaaagaatggggttgtgtctcggggagctgagtataggcagacatctggcaagatgaggcagaaggcccacgtgcttcacttttctgtaagatacagacttgtttttttttttctaatttttagagaagggggtctcactttgttgcccaggctagagcgcagtgccacagtcatagctcactgtagcatcgaccttctggggtcagcgatcctctcaccttagcctttcaagtagctgggaccacaggcgtgtgccaccacgcccagctaatcattgtattttttggtagaggtgaggttttgccatcttgcccagctggtctcgaactcctgagctcaagcagtcctcctaccttggtctcccaaagtgctgggattataggcgtgagcctctgcccccatgatccagactcgtaaggggtgaaatggggaatgaaaggatgggctgaggattcctcttagtttttcaacatcatactgatcattgtgttcatataaggaaactaccagagaacaggaaggattagagggaacagtaagggaacacctggaaggattagagggaacagtaagtactcagagctctcaaaacactaagaagagtgcctgttgccagcaggctgactgagaaacctcataactcacagggcatgtggtagcgtacccagtggagaacagttagccctagaataaatgctgctctgctgctgtgtgacaatctcagaagcaagagtcaacattttcagtttccaagtatctggatccaaaacaaagctcaagaatagtaacgggccaggcacggtggctcacacctgtaatcccagcacttgtggaggccaaggtgggcggatcacctgaggccaggagttcaagaccagcctggccaacatggttaaaccccatctctactgaaaatacaaaaattagctgggcgtggtggcatgcacctgtaatcccagctacttgggaggctgaggcaggggaatcacttgaacccgggaggcggaggttgcagtgaaccgggattgtgccgttgcactccagcctgggtggcagagcgagactccgtctcaaaaaaaaaaaaaaaatagtaacaggaacacaaaaaatatgcagctttccaagaggtaacattcataatgtctggcatccaaccaaagattatcaggtgtggaaagaaacaggaaaatagaacccatactggagtgaaaaatccatcaaaactgacatagatgttagggttagcagacaggttattaaagtaattattataactgtattccatatgttcaaagagcaacaggaaagactgaacacattaagtagagacatggaagtattttaaaagatccaaattagagttgaaacgaaaatgtccaagtacaaaatatgctggatgggattaatggtagatcagagattgcagatgaagattagtgaacttaaagatgaagcagtagacactctccaaactgaaacaaggaaaagaaatactttaaaacaaacaagagcatcattgagctgtaggacaactttcagaggcctaacaattatgtgattggagtccctaagtgggaagggagggacagaagaattgtttgaggacatgatagctgaaaagcttcccagtttgatggaaactataagcctagatctgaccatctttcttttttctttgttgaccaatggattcatgtcacatgatctgaccatcttaaggacccctgagcacaagaaatgaagaaaatcacacaaggcacatcatcatcgagttactcaaaaccagttacaaagagataaatctcaaaagcagccagaaaaaaaaaaagcaaggccttttgtgtatgaaggaacaaagacacagatgacagcagatttctcatgagaaacaatgcaagtgcgaagacaatggtgtagtgtgtttaagatgctgaaagggaaaaaaaaaaaaactgtccaccaagaattctatacctaaatatcttttaagtgaaggtgacataaagatgtttccaaacacacaacagctgaactagttcattaccagcagaccttcactgaaagaaatgttacagatgctttaggctgaaggaaaacaaaaccatgtggaagtctggatctatacagaaaattgaagag

SEQ ID NO: 41373 - DNA, 2300 bp, Homo sapien
tccagcgtgggcaacaagagtaaaactccacctcaaaaaaaagaaagaaagaaacaatctctatcttttgtgctcattgctgatcaaatccatgtaaatatggcaaaccagcctagcatctgtggcagttgacgccggtaaccctgtcagctgctggattgctgcctagggactgcttggatgcttggcagttggtagccctgtaaataggaaatatccattaggagagcctgcagccaccagtcacagagtgattacacgccccctgtaggagatgtgaaaaagaaaaagaggaaatcaaatattctgcaatcttacaactagtatgatgtatttattttcagctttttatatacgtttttcaagcacttcccaagtatttatagagtacttactatgttccaggctggtggctgagcagtgaacaaaccaacctaggtccttatatctggaaaccttaagtttgtgaacttaaacacccatatatacaattgagatcatatcataaatataattttgtattctatttttcacattctatttcataagcattaccctctgccaatacttttttttcaaataccacacataatggctgcataatgttcaactgagtgtacagaagacaatagatttatctatttctgtgctgcaaaaagcataattatcttccatttccccttctatgaataactagctattttccaaattctccccattatttaaaaaaaaccacacacacaacaaactctggaatgggcacccttctctttgtaatttttgttatttccataggatagattcctagattaattgaagtgtttaaggctctttatgtacagcttaattcattttcaacattgtactaaacacgcttcctcaagcatagcagtgcgtaattctccacaatctccccagcactgatattaataatgtaaggcatcttcttaatcatgtgtgactttgcatggtgctttagacttctagacattctccatcctcgttgatcgtctcaagttcagatataaaatttctgccttgattctaacacagtgtacagggcctacactatattctgggtgacaagatggcttggctttcctttccttctccccctgctcctaagctggtctcctcacctttatcaagtgctattttttcaaccatgctttattgtgtaggggccaaagggaaagttcctctttgccctctgaaggttcactgaaagccaactcataaaaggcagatttttggagaaaaggcaaataaatggattatttatttatttattatttatttttgagatggagtctcgctctgtcacccaggctggagtgcagtggcgcgatctcggctcactgcaacctccgcctcccgggttcaagcgattctcccgcctcagcctccggagtagctgggactacagacgcccgccaccacgcccggcctttaccgccagttttcacacagaaaagcggggggaacatcagagtcgtgtttttaggttttgtggctggctttgggggtctggcctctgggactcgccttgggtaaaagggattcactctgtgaggagcctcgcgggagaaaagaactgagactggagggctgggaaggtcagagggaaactgcctcccaggccttcattttggggcgttgtgttctgagccccgataattgtaacatcttcataagcgactttctggtggttatggtgaatcgggacacacgatgtatggtgaccgacgggggagccgggagcccagcggggttagggttcaggtgagggtttagggtcggggcgagcgcggcgcggcccggatgcgcagcgtcaccgcgccagaccctccgctcagctgccgtgggctctccccctccccgaccatagacggcgcaggcctccagtcatcccagagcggccccggaagaatccgggcggaaccgcggctggcttccggttcccggcgttctcggaggcgtactgaggccccgcagggggcggggaagcctgcgtgtgcgcagctcggcccggcccgccctcttcatcctagcccgccccctccccggctctggacccggttctgtgggagggtccgttccgggctcggtgcgactgcgcagctcctcggcgcttcctcggtggcttccccgggtcgagcaaacaggtggggcagtgtcggaccaggaaggagcgccaagcgggcaggcaggcggggagggcgcggggagggcgcggggaggcggcggccagtccaggaggagcctgttctgggtgccgcgggagccaccgacgggctgca

SEQ ID NO: 41374 - DNA, 2300 bp, Homo sapien
cagcactttgggaggccaaagcaggtggattacttgaggtcaggagtttgagaccagcctgggcaacagagcaagaccctgtctctaccaaaaaaatacaaaaaattagcccgatgtggtggcacgcatctgtgatcccaactactcataaggctgaggtgggaggattgcttgagcccggggaggtgaaggttgcagtgagctgagattgtgctactgcactccagcctgggtaacagagagagaccttgtctcaaaggaaaaaaaaagcccactggttttagaaacagggaggtcagtggagtagggaacagctctgttctgggccctgaggaccttggacatcttcacatagctgtgtggcaaggtccatcaccgtgtgaactgagtttggcagaatgcttggaggttcctcctgaaactaagggagacaagcaaccttgtaagaaacgacagtgacagcagcgcccctgggcccctggttggctgcgtctgggatgctccctttgcccctccttggggtacagctgcggacacaccactgcctggctgcagtgtggagctggcgcctcagcagcaccgtggccaccatctgtgctttctgtcatctggcccctatggtttgctgtcatcttgtgtgtctagggacacaggctgctgatcatgctgtagctgtttgagtaagaaataaacaatctaggctgggcacagtggcacacacctgtaatcctagcactttgggaggccgacgcaggtggatcacttgaggtcaggagtttgccaccagcctgactaatatggtgaaaccccgtctctacgaaatacaaaaaaattagctggacatggtcctgcatgcctgtaatccgagctacttgtgaagctgagacaggagaatcacttgtacctgggaggtggaggttgcagtgagccaagatctcaccattgcgctccagcgtgggcaacaagagtaaaactccacctcaaaaaaaagaaagaaagaaacaatctctatcttttgtgctcattgctgatcaaatccatgtaaatatggcaaaccagcctagcatctgtggcagttgacgccggtaaccctgtcagctgctggattgctgcctagggactgcttggatgcttggcagttggtagccctgtaaataggaaatatccattaggagagcctgcagccaccagtcacagagtgattacacgccccctgtaggagatgtgaaaaagaaaaagaggaaatcaaatattctgcaatcttacaactagtatgatgtatttattttcagctttttatatacgtttttcaagcacttcccaagtatttatagagtacttactatgttccaggctggtggctgagcagtgaacaaaccaacctaggtccttatatctggaaaccttaagtttgtgaacttaaacacccatatatacaattgagatcatatcataaatataattttgtattctatttttcacattctatttcataagcattaccctctgccaatacttttttttcaaataccacacataatggctgcataatgttcaactgagtgtacagaagacaatagatttatctatttctgtgctgcaaaaagcataattatcttccatttccccttctatgaataactagctattttccaaattctccccattatttaaaaaaaaccacacacacaacaaactctggaatgggcacccttctctttgtaatttttgttatttccataggatagattcctagattaattgaagtgtttaaggctctttatgtacagcttaattcattttcaacattgtactaaacacgcttcctcaagcatagcagtgcgtaattctccacaatctccccagcactgatattaataatgtaaggcatcttcttaatcatgtgtgactttgcatggtgctttagacttctagacattctccatcctcgttgatcgtctcaagttcagatataaaatttctgccttgattctaacacagtgtacagggcctacactatattctgggtgacaagatggcttggctttcctttccttctccccctgctcctaagctggtctcctcacctttatcaagtgctattttttcaaccatgctttattgtgtaggggccaaagggaaagttcctctttgccctctgaaggttcactgaaagccaactcataaaaggcagatttttggagaaaaggcaaataaatggattatttatttatttattatttatttttgagatggagtctcgctctgtcacccaggctggagtgcagtggcgcgatctc

SEQ ID NO: 41375 - DNA, 2300 bp, Homo sapien
gatcctggaatgaagtgcaggctaacagggtcccccctagtttggccccatctctagtctcacctgtacctcttcctccccaacttagcctcaggcttttcctgacttgccacactgtcctgtgccatggggcctctgccacacagttccatggcttaagccactctctacctggctacagcctcagaatggcctccctgaccccacagatcaggctggcttatgtcgtgtgctcctggggcactcggctcccctttttctgctgtgtcttgtttagtattcgtatgtctccagcccagcagactgtgcactccacgaggagaaagccccagttcctgcacacagcctggcgcacaggtggtacccaatacatacttgctgaatggacaaggaggctcttttaagccctagaggcatttgctaggtagagaagctccaggcagagtagaaggcactcactggaaggatggacagctcacctgacgtccagtctttgagggcacagctgagattcccagcttctgggctgtggcaatgggcagacatccagaacagtaggggctaggggacagacggaccaagagagtccagcggggactgtggggggcagacggaccaagagagtccagcggggactgtggggggcagatggaccaagagagtccagcggggactgtgggggacggaccaagagagtccagcggggactgtggggggcggacggaccaagagagtccagcggggactgtggggggcggacggacgaagagagtccagctgttacctgtggctcctccactgaccaggtctcttctcttcccctgtcctcccgggcttgcttggaacaagttcttttggtgacattaagctgcctctggcacacattctaaagtggctgtggtcactccaggccagcctgagggctggaggccgccccagggtttgtgtgcgtctcagtgcgggatgtgaagtggtcactccgggccagcctgagggctggaggccgtaccagggtttgtgtgcgtctcagtgcgggatgtgaagtggtcactccgggtcagcctgagggctggaggccgcaccagggtttgtgtgcgtctcagtgcaggatgtgaagtgggccccccatgggacttcttttcccagcaacaatggaggcctggctgatccaggcaggatgcagtgcggcagctggccacacccagccaggacaaagatggggataggaacagccctagttgccctcactgctcattacacgcaaattgtaattaatacattagcataagacatgcccgccagcgtgtgactgtttacagatgccatagcagcaccacaggttccccttatacggcttaaaagagagggttcctccgttcagggaactgcccactccttttgtagaaaacttgtgaataacccactccttcttttttgtttttgaaacagagtctcactctgtcgcccaagctggagtgcagtggcacaatctcagttcacctgcgcctcccaggttcaagtgattctcctgcctcagcctcctgagtagctgggattacaggcacgtgtcactatgcccggctaatttctgtatttttagtagagacaggttttgccatgttggccaggatggtcttgatctcctgacctcgtgatcctcctgcctcggcctcccaaagtgctgggataacaggtgtgagccaccgcacctggccaacccaccccttctttagcatattgcattagtccattctcacactgctataaagaaatatccaagactgggtagtttataaagaaagagggttaattggcccatggttctgcaggctgtacaggaagcatggcagaacctgcttcttggcagaaggcaaagggggagccagcactttacacggtggaagcaggaggaagagagaagagagggggtagaggtgccacacacctttaaatgaccagctctcaagaactcactcactctcagaagagcattaagggggaaatccaccattgtcatccagtcccctcccaccaggcccaccgccagcattggggattaaatttcagcatgagatttgggtggggacacagatccaaaacatatcacatataactcaggagtagctatgaagactgctagccagccgtccaccagtgctgccctgcctgtggggtagccctgctctgtctacagagcaggcattttcctatactctgttgctctgataaatgtgctttgctttcactttactctgtcaactcactcttgaattccttcctgtgcaaagccaagaaccctc

SEQ ID NO: 41376 - DNA, 2300 bp, Homo sapien
gttactgggattacaggttcacgccaccatgcccggctaagttttgttttgttttgttttgtgtcggagtctcactctgtggccaggctggagtgcagtggtgcgatctcggctcactgtaacctctgcctcccagtttccagtgattctcctgcctcagcctcccgagtagctgggattacaggtgcccaccaccatgcccagctaatttttatatttttagtagagacggggtttcaccaagttggccaggatggtcttgatctcttgacctcgtgatccacccgcctcagcctcccaaagtgctgggattacaggcgtgagccactgcgcccagccccaagttgtgtattttttaggagagatggggtttcaccatgttggccaggctggtctcgaactcctgacctcaagtgatccacccgcctcggcctcccaaagtgctgggattatagacgtgagccacagcctgcatttgatttcttgctgaatacttatttatttcaggctttcctgttaaaatgagtctattaaggatgcacaattttctttaggtaggcttggttctatttccactttagtttccatttctatatgtctctggggagagggttacttttcatatatttctaatataacaacaatatggatagaaattgttttgccaaatgatatattcttttgggatttgttgaaactttctctgttgctttgttttttttggtaatgttcagtatgttgaaaacaatgtgtgttctctatgttttaagcatgagattgtttacttgacccacttgtttctgagggaagtatgttaaaaatctcgactggtcatggtggctcctgcctgtaatcccagcactttgggaggccaaggcgggcagatcacaaggtcaggagatcaagaccatcctggccagcacggtgaaactccgtctctactaaaaatacaaaaaaaattaaacgcacctgtggtcccagctacttgggaggctgaggcaggagaatggcgtgaacccgggaggcagagcttgcagtgagccaagatcgcgccactgtactctagcctgggcgacagagtaagactccgtctaaaaaaaaaaaaactcactccagaggaggatttaccagttcctgtttggtagatccatactgtttgtaattattacagctttttggtgggcttttagtaatatgcagtgttttatttttatttttatttatttatttatttatttatttatttgagatggagtctcgctctgtcgcccaggctggagtgcagtggtgcgatctcagctcactgcaagctctgcctcccggttcacaccattctcctgcctcagcctcccaagtagctgggactataggcccccgccaccacgcccggctaattttttttgtattttcggtagagacagggtttcaccgtcagccaggatggtctcgatctcctgacctcgccatccacccgcctcagccacccgaagtgttgggatttcaggggtgagcaaccacgcctggccagtaatatgcagtgttttttttattcctattagtgattttcgctttctttgcttttctttttttggagatgaagtcttgctcttgtcccccaggctggagtgcgatggcgcgatctcggctcactacaacctccgcctcccgggttcaagcgattctcctgcctcagcctcctgagtagctgggattacaggagcccgccaccacgcccggctaatttttgtattttagtagagacagggtttcaccacatggtggccaggctggtctcgaactcctgacctcaggtgatccacccgcctcagcctcccaaagtgctgggattgcaggcgtgagccaccacacccggccagttctgttctttcttgactgtggtgctggttccatgggcttgtgcaatttgtcatggtccactgaactgtgtactcaggatttgtcaacttttatgataaaaatatacttaaataaaaagctttaaagatacagaaaagatatatagctaccacagcttcattttaactagtgtttgatctaatattaactaatacttagcctttctgtgttattttattttaggccaaatagttgcatcacatgtatctaatccgagagtctcatgcttctggtaggtgagtcaatcttattttacttatttattttgagacagggttttgctttgttgcccaggctggagtgcagtggtgcgatcacagctcactgcagcctctacttcctgggcccaggtgatcctcccacctcagcctcccaagtagctg

SEQ ID NO: 41377 - DNA, 2300 bp, Homo sapien
gtgttctggaccataccctcactctgtcagctccctgctaactttctcagcacctgaggcagtcctttgcccagggtcttttagcgacaccctttccctccatactggctacagccctgctgatgtcagtgtgtttaagtcactgccagggatacctggcttgcaggtgtctgccttgcactgggaacttgggatgggccctgaaggaatgtgggacaggcaccctgtctacagccaggaagccattcctagcctggcttttaccattctgttctgcatgcattcccaccccgccatggtggggagtggtcactgactggagggttctgggtgctttttcctgtgggtggtgggtggggcctcatgcctttcctcattttctagcctgatagtgacaggtgaggttgagggtggtgattgagtgtggggtcccaggtcactgctgggattgctgaacaaagggatgaatgcatgcagtgtgtgtatggggaatcccagaccacccaagtcccttcacccacccacccagagccctacactggactggagctggcaccagcagtaggttggtctgctccttgagtcctgtaactccacagcttcgcagggcatgtagccccctcttccctggggcagagaaactaaccaggaacagcccccaaagctgcattgattaccttaaagcacatggcctttccctgctggcaggggctgatactttggttctctctagctttggtagtgatgaggctgacagtgatgattgagtggaatcaggttggaagtgttggggaaccccccctgcaatgggagggcaagtaagctggtttccgtcacaaggcagagtggaggggcttcctgtttggccatagcccatggcatcttgtcccttaaccatgatccaatgaggagatcccaggacagcatcctatcagcactttcacacgaggaagttccaccagcgaatgcagcagctgcagatcactgcccctaacaacactcctgtggaactgcagcaggcaggatgaggcacggtctctccctatagacttggttggagggtgcctggcaggtgagaatagtcaccttaggcttccgtggtcactccgggatgacaagtcctaactggctgcgcggtggttcctggctgtcatggtccacgctgtctctagagaaccttaccccccatttcgtgatcttgctttcctgatcctgctggtatggccccacctgtctttgggcgcccaccacacctaggcagtgacccagcagggcctgtttattttagacaggctctcgctattgccaggctggtctcaagcccctggcctcatgtggtcctcccactccagccccgcctccccgccagtaactacgggacctggttttgatctcgtcattcgcagggccggtcccagggtcccagctgacttgtcgagaaagaatccaggagggcggtgtttcctcctgaaggatggaggggcatctggaaagagggttttgggaaagcactagatgcttagcttggccataagcggtcactgtttttctgctcccttctgggcaaagtggacggcagggcttggccgatggaccggccatgagggaaagtttgttccagaagcagctcaggcacccgaaaaaccctttctccagagtggacactgggccccatttacaggagttaaggatgaggagcaataggttaaacccaagacaggcttctttggccagtaagcatcctttcttggccctaaggaagggtgcggttcccgtttctctgtaaatcgaagggcctagttcttgtttgcggcgcctttcgtgcatcattagggagagaatttctcagaaaaagggaaagactaatatgttttcgcctctgaccatcgccccagttctgaggcctctgggccgtggcttcggactgccacccggtggcagcattcccgctttacggctttgccattcgcgggtccccggagccttactgcaagccagggaggtgggcagccgacacgcggcgtcctagcttcccagagcggcccggacggcgcctcggacccagacagtcggctgacgtcacttccggatcggttccgattggcggggagggagggccgaacgggcgaggttgggctgccgtgctgctcggcggcgctgaggtgagtgtgagcccggcgggggcgggcgcgcggggcgcagaccctcccggcgcagaccctcccctgcgcgttgcccctgtgcccggtcctctcgcggtgctgcaggcgtgggtccgtcccgccatcagcggcacttcc

SEQ ID NO: 41378 - DNA, 2300 bp, Homo sapien
gtgtaccaggctgtgtggtctcccgtgaaggtcaagactgagcccagtcacacagtcctcaggactgtcaggtggatgctggcagggccatgtctcttccagccttaaagcggcctggtcagtctcctggctgcacgtagggtcttggtagccgcatctcatcccagagacccgtgagaccatcttggggaccccacagcctgtgtgtccaagcactcttctcacctctatcccgcacccaactctccttctgctcctccagagaagcagatttgttcaggagtgacggacaggctgggcctgtgggccaattttgggctgaccccagaacccctcaccctgcccccagggtccagtcctgcccctcagcccctggccctagctgtgggctgtgctgcttcctgagtccccaccgggcagctcctcctccatccccctgccgaccctaggggagggcctcctgcagcagcccctcctctcccctgtgagcaacagcgggcacaggacacccttccaccctctcctgtctccttctcacgatgtcaaccctgcctcagcccctgcagggtctaggaaacaccccacctcccagtaccgacagcaagcctctcccgcccactgggacccccgccttcacctccttgctgcctccccacccacggcctcgcgtgtgctcgacagtgctcactcagccagggactctctcctggaaaacctcttccccaccatcccccacccgcggcctcggggtcccacccgttaggggcccgattccgcgaagcccctctccacagcacgtaccgcaggacacccccagtcgggctgactctttccagctcaggcccccacagcccctcccagcctccatttcttgctccttccccacctctcccgcacagggttctggtcagggtacggtccagtctcccattattcgtccactccgcagcatgtgacccagcccatccccgctccttcttcctcgacccgggaccctccagcttggccctccccacttcctgggccggccggccctcaccctcggcaaggatcccggggctcctctcctcgacgcccgacctctccaagggcctacagtggataaggtccccgcgtccagaagcgcccgttcatcagggagacggacatttgccacctgcaaaccatgacgttccacgagtgggtccacgcgtctcccctgcccatctcctgctctgcaccagcgagaaccccctcggcctacacggaagcccctcaccaggcaagccgggagccccagaccccgtggcccggagtgggtcgctctgtgacaccctggacaggtcactcaaccacttggcgcctcctcggccactcagaaaacacctgccctcccggagaccccggtgaaagccgagcactcctgcaccctccttccgagcccacgcacaccaggacaccttcagccgcgtctcctggtgcgcctgcgcgggggccctggaggaggagaagtaggcggggccggcggccgctggtgactacaagccccggcgtgcaccgcgctaggctggccgtggcgcgcccggaaggtgtcgcggccctgggccccgccccggaagataaggccgctcgctgacgccgtgtttcctctttcggccgcgctggtgaacaggtaggtcatccttgcggccttgcggcatgggcagtatccgccgccatcctcttccgtgaggcgcgctgagacccggaccggccctcctgagaggatgccggtgcgggcgcccgcggagagggtagggagtggtgggcgcggcggcctcgggggcggggtcccggaaagccgggctggcgggggtacccgggccgcccggccgcgctaatcgtgagtcgcccccaggacccgtcgccatgggccgtgtgatccgtggacagaggaagggcgccgggtctgtgttccgcgcgcacgtgaagcaccgtaaaggcgctgcgcgcctgcgcgccgtggatttcgctgagcggcacggctacatcaagggcatcgtcaaggtgcggaacgctggccggggcgggaggggaagggacgcccggccggaacgccgcactcacgccgcctctgcccacaggacatcatccacgacccgggccgcggcgcgcccctcgccaaggtggtcttccgggatccgtatcggtttaagaagcggacggagctgttcattgccgccgagggcattcacacgggccagtttgtgtattgcggcaagaagggttagcatcgcggcggggaaggaaggtcggggtggggaggggtctgggtgttgcct

SEQ ID NO: 41379 - DNA, 2300 bp, Homo sapien
tttgcgcttgtttcccaagctggagtgcaatggcacaatctcagctcaccacaacctccacctcctgggtttcagtgattctcctgcctgagcctcccgagtagctgggattacaggtacctgccaccatacccagctaacttttgtatttttagtatagacggggtttgtccatattgatcaggctagtctggaactcctgacctcaggtgatccgcctgcctcggcctcccaaagtgctgggattacaggcatgagccaccgcacccggccggaaataaataatttctaacaataaagtttgaacagcaggttggggtgacgtcggatggcataagggaggtcaccaggccactagcacaagcagaggcactgtgtggggagggactaatcctggcctaagaaagatggctccaccccagaaggctggaaaaccccatgtccagtgcttgcggcctcgtctggagtggctgtcaagtgacccagaactgcatagcccctgctgtgtaccaggctgtgtggtctcccgtgaaggtcaagactgagcccagtcacacagtcctcaggactgtcaggtggatgctggcagggccatgtctcttccagccttaaagcggcctggtcagtctcctggctgcacgtagggtcttggtagccgcatctcatcccagagacccgtgagaccatcttggggaccccacagcctgtgtgtccaagcactcttctcacctctatcccgcacccaactctccttctgctcctccagagaagcagatttgttcaggagtgacggacaggctgggcctgtgggccaattttgggctgaccccagaacccctcaccctgcccccagggtccagtcctgcccctcagcccctggccctagctgtgggctgtgctgcttcctgagtccccaccgggcagctcctcctccatccccctgccgaccctaggggagggcctcctgcagcagcccctcctctcccctgtgagcaacagcgggcacaggacacccttccaccctctcctgtctccttctcacgatgtcaaccctgcctcagcccctgcagggtctaggaaacaccccacctcccagtaccgacagcaagcctctcccgcccactgggacccccgccttcacctccttgctgcctccccacccacggcctcgcgtgtgctcgacagtgctcactcagccagggactctctcctggaaaacctcttccccaccatcccccacccgcggcctcggggtcccacccgttaggggcccgattccgcgaagcccctctccacagcacgtaccgcaggacacccccagtcgggctgactctttccagctcaggcccccacagcccctcccagcctccatttcttgctccttccccacctctcccgcacagggttctggtcagggtacggtccagtctcccattattcgtccactccgcagcatgtgacccagcccatccccgctccttcttcctcgacccgggaccctccagcttggccctccccacttcctgggccggccggccctcaccctcggcaaggatcccggggctcctctcctcgacgcccgacctctccaagggcctacagtggataaggtccccgcgtccagaagcgcccgttcatcagggagacggacatttgccacctgcaaaccatgacgttccacgagtgggtccacgcgtctcccctgcccatctcctgctctgcaccagcgagaaccccctcggcctacacggaagcccctcaccaggcaagccgggagccccagaccccgtggcccggagtgggtcgctctgtgacaccctggacaggtcactcaaccacttggcgcctcctcggccactcagaaaacacctgccctcccggagaccccggtgaaagccgagcactcctgcaccctccttccgagcccacgcacaccaggacaccttcagccgcgtctcctggtgcgcctgcgcgggggccctggaggaggagaagtaggcggggccggcggccgctggtgactacaagccccggcgtgcaccgcgctaggctggccgtggcgcgcccggaaggtgtcgcggccctgggccccgccccggaagataaggccgctcgctgacgccgtgtttcctctttcggccgcgctggtgaacaggtaggtcatccttgcggccttgcggcatgggcagtatccgccgccatcctcttccgtgaggcgcgctgagacccggaccggccctcctgagaggatgccggtgcgggcgcccgcggagagggtagggagtggtgggcgcggcggc

SEQ ID NO: 41380 - DNA, 2300 bp, Homo sapien
tgtctctgtgtctttttcttttccaagtctctcgttccaccttacgagaaacacccacaggtgtggaggggcaacccaccccttcacatgtgtgattaaatagttgaagttttggcatccttttacaatgagagaatagcacaggatttacatacaatttttggacatccaagttcaccacaatacccatattgtctgaaattatgtgccatggccctgaggggagtcatgatccctcccccaaagatggttgtggctgtcaggacacagcaagtacccacaattccctcctggtgaagagtgcctctgtcctacccagcctgtgcctcactcctgagcaaatccgctgtcagcagtgtgaatgcaggagacacccttggtcccccaaagaatctgaggaacctaggggcatccagtcctgggacaaggatctatgtagacatcatacaagtttagcaccacccatagtggagtgctgggctaagcctacttagacagatatcaccctcctcacccagtttcccctgtccttgtgaaaaggaagaaaatgatggttcctggtctgtcttgtgctcaaatctgacccggctcccaaccagctgtggctctggatgagtcccttaccttctttgatcctcattcctcctcccagggtctggttgcaattcagaggatctgaaaacctagagtgtgtgtgaaaccatctctaaagtgtgtgtggaggtgagtgggaactcgggaaacaccgagtttcatatattgaactgttcctcccacttgcatgatggtttcacaacacagtttagtggctaaagaatatgtgacttggagccaggtctgtgggttggatcccagctctgttacttaagagatgagaccttggccaggcacagtggctcacgcctgtaatcccagcactttgggaggtcgaggctggcagatcatctgaggtcgggagttagagaccagcctgaccaacatggagtaaccccctccttactaaaaatacaaaattagccgggcgtggtggcgcatgcctgtaatcccagctgctcgggaggctgaggcaggagaatcacctgaacctgggaagtggagataatgttgagccaagatggcaccattgcactccagcctgggcaacaacagtgaaactccgtctcaaaaaaagagactagaccttggcaaataacagggacactatgctctcctcattttagtatgggaacagtagtattttgataggattaccatgaggattaaattagtaaatacaaagagcatacaaatgtttacagaagtcacagggctgttagaagtcagaatggccacccttgggtgcagacaggagaggtggtctgagagtgatcagagggagcagcaaagacacttcaagatcccagaaactggcccggtgcggtagctcacgcctgtaatcccagcactttgggaggccgaggcgggcgggtcacctgagatcaggagtccgagatcagcccgggcaacatggttaaaccccgtctctactaaaaatacaaaaattagtcgggcgtggtggtgggaacctgtagtcccagctactccggaggctcaggtaggagaatcgcttgaacctgagaggcggaggttgcagtgagcccagatcacaccattgcactccagcctggggaacaagagcgagactcaggctcaaaaaaaaaaaaaaaagtcatactaaacaatgtcataaatttatatgagaccgaccctggccggacgcccccgctccgcccttcctgcgggtccgggagtcgatcccccaccgtgctccccaacccccgcaggccacccgggggcagagagtgggcgcaaggggtgaacgttcgctgcctccgatcccgggggaaacggagcgccgagaacgtcgacgcccttccgcgcccgtcgggcctgggactgatacccggtctggcccggaaccccccaggcgcgcccctagctggggccctggcgaccgccgcgccgcaggggctagaagccgtcgagacgcgagcgccatcgaggcgcgcggtcctccaggcctcccagagcggcgcagcggccgtttccgggggcggggaaggaaccggagcctgagagccgggcgccgtgcgctcctccccgcgctgtctcggcggcccagggtgagtcggccgcggccgcggggcggggactgggaggggcgcggtcctccgagcccggcctggtggaggctgtagcccccgcagtgggcgcgcggagctcggcagggagcggacccgcagccgtcactgtcgcctccg

SEQ ID NO: 41381 - DNA, 2300 bp, Homo sapien
ggtgagggtgaggagaagtgaggtcaggtgaggctgggtttccaggcccttcagcagcacatggccgtttgaagtgcatctcaggaggcaagggatccttccctgggttcaagcaggagaaacctggggttcgattagcagctgttaggacctccatgttgtcatattggtcattcggggcctgttgttgaacaggaacagctgcattgctggtgggggctgtaccatggaggagagggggagctgtcaatcaaccaccattgcagactctgcagcacccgagtggcgacagagatggtgtggtgagaggttggtgggactgctgaggtgcccaggaccagaggggctcagcacagaggggtccaggccgggtctgtccccccaggacagagacgcagtttgggtctaggtgggggtctgtccatcagccttgggcttgtggctggggatggctgagatttgactgttgtttctttgcagtcttggggtttgggagtagattttgaatttgagcaggtgtagagacaagaagttttcaagagtttcagaaaaaggagtcagccgggcacggtggctcgtgcgtataatcccagcactttgggaggccaaagagggcaaatggcttgagctcacgagttctagatcagacggggcaacatggcaagaccctgtctctacaaaaaatacaaaaattagcctggcgtggtggcgggtgcctgtagtcccagctactcaggaggctgaggcaggagaatcacttgaacctgggaggcggaggttgcagtgagccaagatcacgacactgcactccagcctgggtgatggaaccagaccttgtctcaaaaaaaaaaaagaaaagaaagaaaacaaaggagccaggaggccacggctagagcccagggcagaaaccctcagccggtagctcagacctcaagccaggttgtgaggactgtagccctggctaggggcgtggagcccgtggacggccggccattctcagtggaagttagagggaggagaaggggacgtcctggtgtgatggacaagaggagggtgtcctagaggagggagggtggccggccaccaggactggacctgagtcttgactcatcattgaggcccagattgtttcacagaaggggggcctgctcaccagctctccccagctcacaaagacccacgaacgcggaggggcctctctccagctctccccagctcacaaagacccacgaacgcggaggggcctctctccagctctccccagctcacaaagacccacgaacaccgaggggccctggagctgccggatgagccggcttggattgctgggccatgtcgatgcaggcgacagccggggcacagggcttgtgaggcccaacagtgtcttgcctccttggggtggactctgagaacagacagctccagagcttagagcctggcaggtgagaggcactgggggtgcctggtggggcctctctggcagctgctgacaggctggtcctgaactcctggccgcagctctggctgcctccacatcagcggcaggtgcagccgtcaggtgtgtctcacggcaggtgaaggttgttctcaggcctcagggccccggagtcctcatctggcccccactggtgccctccccatcttcctcgccagtgccctttcagacctgtgaccccttggtcactcttatgtggcctgcggcgtgaatgacagttttccctcacaggcctgtctccagctgagcacctctgagctcccctagactccttgggggcagggtcagagtctcccatgacctcgagtcctccagggaccagtgccccacaggtccagcctgcatggggataggcagagccagagagtggccacaggcctgctgcggcaagaaggcaggtggcacgtgagccaccgcacccgtccttcccgggctggtggtatctgcctgtgtccctgtgcttatggctgctggcgtaaacgtagttactggcccctcgtagcaggcctcaaggactccgtgggccctacctgtgctcctgtgtttcttgtggctggggcagcagcaggctgtgagaagctcctccttcatacgagggtttcagaccatgctgggtgtgccaggatgccttcgtgggcagtgggtggcaaggccgctccgtcctggcaagcctgcccctgcgcactcgcgcggtggatgcatacaggtggccggtgctcccttccttgagaatggaggccgcttggcgggagacacccaagggaacggcagcaccttgacaggtttgcttcactgcccttggctc

SEQ ID NO: 41382 - DNA, 2300 bp, Homo sapien
tttcctggaaacatttacagcttggaactgttctatctggccaaatatgaggaggctagagttgccccaaaagtggcagcaagggagttgcctcaaaagacttccccaaacagtcccgcgatggaattggttgggattccaaggaaagaagctctaaacgccagggtgatcagtccagagcatttcttccggaaattttcacatggagcttcagctttcttgggatcgatgatgaggcaagggatgctccacccaggtacatttgcagcaagggactctggctatggagcttagatgagagtttaagggattggactcagggcagggccagtttctacgtgtttagcaatagggttgattgtgttttcaagcaacctaaacagctttatcagggaatgtgcccggccccattgaactgggttcaaggctgcagggaacacgcaatggccaggtcccagagcaatcaaaggactctgtgtttctcaatcagtagagaaagaaaagggggaactggaagaccctgtgaatcccaatctcagctagggatgagcaatccaggctggcccagagcataagcaccgtgaccatgtgagggcctgagtgtgcctggctttggagggtctgcttgctcagtggcctctagactcagccgggcagtggatgcagtggatggaggaagccccctcgccccagacaggacctcagggcctcagagccctggcatctgcaccctggacacaaggaaggtgcctatgaggtggatgctctagccaggctttctccccctcctgctcctgtgttaccctggtgtgcccccctcacctgcagcaggccaggttggggcatagggttgccggcccctaccagccctgggggtctggagggcggctggggaagcagaccccctgtccttccctatccttcgcgacatgctccctgagcagctgcagtccacttagatgaccagagaggatgtggggctgagggagccgaactcggggcagcaggggcgggggtgggagtgccgggatcatccgcaccgggagaggcgaggccggcgtctgtttttcacctgggcctccctggggggctgggggctgcctgactcttccctcctttggtttgcgcaagttttcccgcgcgggttcggatcaacacgccgggggagcccggcttacgtccctcctggacccccgccccgttcttcccgtggggaggggcgcgtcaggcggacctggcaccctccggctgctgggcttcgccgggagccacgcggggaggtccaggcagtcgggacgcaggcagcgtcctcgccgaggctgcgagtccgtggccgtccgggggaggcgcgcaggctctgccggacgcagaaggaacccgaaggaggcggggtggagggcggtgcggggccggggaggggcgaggcgagtggcgagtggacgccgggcccggcctcgggcaactccgaggggcgcccttcctcggggtcccggaggctctgcgaccccgcggccgctccagccgctcactggggacaaggcccgagccaggcgtctccgcgaggcggggtccatagcgcgcccagcaggcgcctcctgtcgcagggacgcgggggagcggcgcctgaacagcctcggtgggaaccagcgcccgaagctggtgatccggggtgcgcagggcccaaccgggcgatcccctggatctccgccagcctcgccccgactccgctcctcccacccgccagcgagtccgcaactcccggccccggcccgcgtccccagctccaggccccggccccgccccgcccctgctcaggcaccgcccactccgggctctgggccctcctctccctcgcggctccgccccctgcccgcctctgactgtaccccgcccccaggcgccagccccgcctatctgggcttctggtcccgcccaggttcttgtccctcgggccccagcctcgcccctcctcggctctgactccaccccttctccggagcctgggaggcggggctgagaaccacagagatggccgggcctccgagcggcccagggcggccggaagtttgcggggcggggcggacgcgggtggccaaggcccgtttccggcggcgtcgcgcgtttgcgagcctcgggtggtcctcagggagggtgagtcggcgcggcgggcgcggactcgggttgccctcggtccgagtgatccctggtcgcttccttagccctcccgccttcggcattggggtccccgcgtcccccgggcctccaggcgggaaagcgcgggggctttgcggggccttgag

SEQ ID NO: 41383 - DNA, 2300 bp, Homo sapien
gtgggccttcacaggacatgcgaggggaaggaggcagtcaagcttcctaccatgaggctcagtggtgggtgggcatccacgtgttctggccgagagacctgttggcaattatgaaaggattagaggtcaaggtgccagaagcccaacttccaggctaatcaagggggtactgtgctctctgctcctttacctccagccccagatttctctagcagggacatggggctgggctgaagcagccatggcacttgagtgaaggaggcccactgaactcttgttcctctttagagtgtatgtgtgtgtggcatgtgtgactcactccacaaagccgtaagaagtggatgccacgtgccaggcactgagtaatggggatacagtagtggacacgaggaccctgccttcacgaagcagtctggcggaggaaagagttaaataaccacacaaataagcacactgcaaccacgacagcgctcaagtacagggaactatgaaagccacttagactagaacgttcagtgtaatgggtcacttccccagggacctcggccaaggtaatggaggtggagagagcactccaggcagcaggaatagcatgtgaaagggcctgaagcaagaagaaatggggttggatgaaccagtgtgggtaaattcccggcagcaagggaaggcagtgagcgactggaggttggggaaggcagtgagcgactggaggttggagaaggcaggagcaaaaatgacaaactgtagggaagacaagagtggacatggaaacccctgccctcaagtacataaattccagtctccagctcacctgtcgccaggatggaaccaggcacagggatgtaatctgatataaatcgttcacctcaattaagccaatgaccccagaccctctacctgcccaggcattcccccgggaggtcggaatgggaaaaagagtcttcgtatggcagcttctggcccagaaagtggtttgtgggtggaagccccaggtcaccggcacaggtaggctgatccccccacctggctcctgacagtaggaatgcccggaatagcaaccagaatttagagaagacaaacagcctaccccacccaaggcaccgttccttcctccactgtcacttatcctaggccttccggggcaataaatagaaagagaaaaggctctagaaggaggtgatttcgcaggaggagtcagggccccgggagtagacccaggcctgaagaaaaggccgcagctggagctcgccttactcaggccccggacaccgtggccgccacgagcggggtctgcggggagctgcgagactcggccaaacgaagcccacctcgcgccgccgcgggggagggtggctgggctcgaccacctcccacaccaggcgctcaaggccccgcaaagcccccgcgctttcccgcctggaggcccgggggacgcggggaccccaatgccgaaggcgggagggctaaggaagcgaccagggatcactcggaccgagggcaacccgagtccgcgcccgccgcgccgactcaccctccctgaggaccacccgaggctcgcaaacgcgcgacgccgccggaaacgggccttggccacccgcgtccgccccgccccgcaaacttccggccgccctgggccgctcggaggcccggccatctctgtggttctcagccccgcctcccaggctccggagaaggggtggagtcagagccgaggaggggcgaggctggggcccgagggacaagaacctgggcgggaccagaagcccagataggcggggctggcgcctgggggcggggtacagtcagaggcgggcagggggcggagccgcgagggagaggagggcccagagcccggagtgggcggtgcctgagcaggggcggggcggggccggggcctggagctggggacgcgggccggggccgggagttgcggactcgctggcgggtgggaggagcggagtcggggcgaggctggcggagatccaggggatcgcccggttgggccctgcgcaccccggatcaccagcttcgggcgctggttcccaccgaggctgttcaggcgccgctcccccgcgtccctgcgacaggaggcgcctgctgggcgcgctatggaccccgcctcgcggagacgcctggctcgggccttgtccccagtgagcggctggagcggccgcggggtcgcagagcctccgggaccccgaggaagggcgcccctcggagttgcccgaggccgggcccggcgtccactcgccactcgcctcgcccctccccggccccgcaccgccctccaccccgcctcc

SEQ ID NO: 41384 - DNA, 2300 bp, Homo sapien
aaacaggaacaaagacgttccttaggccctgtgctcagagaaatgataagactacaaatgcgggggccagggctcaaggctcccaggatagttgcactgagcactgtgaggccccaggtggaaacgtgcaagagaaggcagagcctttgacagttctcaaaagtggtttcatactttttaccttgttcactcattcgatagcaatgaatgttcattgctggggcagggctgggttctgtgagcagagaggtccatcctacaggcactggtgtggggcacagtccatgcagaggcaaaggagacaaagcaagaccagaagggtgggaagctaccacggattgggctgcggggtcaggggctccagcatccgagctggcgaggaaacagtacagggtctgagttctgaatggagagcatggattgtgatgaggaaacaaggctggaagagctgccaagggacttactacgtgagctcagaagagcactgggcacctaggccgttcatggctactccctggggtgggcttctctgagcaggacccagccccctcagctgcctcctggctgctgctgccaacttgcacctggccacctcccctgcttctccctgggctgtgcgtggccacctctaagaccacactgacttcttccctggggctgcaagtttctggaggcccccaggaggccttccagacatctgcgttccttctggactctccaagtaagcacaggcttctgtcctactctgtaaccctagagggcacctctgctgaggtcagacatctccttgatgtctgtgatcaaaccatgacaggatgcaaccacaacacacggctatgatcatgacaaccacggtccccaccacgacacaatcacgttcacaaccacaaccacgcagccacagctataaccagcccgagtctaccccacatgaatgcacagcccagttacagggcttcaagcttcggttcctgcccactcctaaccattggtggtgagtctccggcttccagggatctccaaaggtcttcctatcagtcctggagaatcagagcaggaagccctttcaacctcattgtgtagcagggatgctcaaggcctgtgaggacaggaggcatctccaggcctggtcctcatgtgctgctttccctgcacaaccacaccacctcagcatgcctgctctttcaacagggcttgcttgacactcctcccaagccttcccctgctgtgaagataagagagcagggtggccaggtgcagtggctcacgcctgtaatcccggctacttgggaggctgaggcacaagaatcacttgaacctggcaggcagaggttgcagtgagccaagatcatgccactgcactccagcctgggcaacaaagactccatctcaaaaaataaaaaaataaagagcagcggcagagagagcagggccaagctgacagcaaggctttgttgggggatgccaggaaccacccagcagggggcacggtggtggtcaaaagcgtgggggtgcacagctgggacctggccgctcctccactgctctgggccaatatctttcagtatctgatgctgactgtaccagctggggacaagtaacatatctgggcatttctgccttgcttcatgtattctggttttgtgctgctgcatgttttatctaagaggctacatccctgccccggactctcaggtctgcgagcaagtgctgggtccatcaacagcagctctcacctactgtgggattctatttttttgttgttgctttatcacagtgaggaccacctgctacatataaacccactgaactatttctgccaactgtagctggcttttctgccatggcaccctctttaaacgctcctgtccatgttggagacattttaatgggcggctgggttttaactgggccaccttatagctgaacctccttctcagggagactgagcagaaaggatcacatgggagtagccagcagagccagtgaggccagggttcctgaccactcttcccacacatcacatgcagacttcctgggcggctgcaaggcccacagggcgtgaagaggctcagaaaccctccttgtcctttgaagctgcctaggggcatatgaatggaagtaaggtcacagcccctaggcgcatatgaatggaagtaaggtcacagcccctaggcgcatatgaatggaagtaaggtcacagcccctaggcgcatatgaatggaagtaaggtcacagcccctaggcgcatatgaatggaagtaaggtcacagcccctaggcgcatatgaatggaagtaa

SEQ ID NO: 41385 - DNA, 2300 bp, Homo sapien
tgttaataatatcaacccctaacctaaactacttgtgttatctgtaaattccagacattgtataagaaagcattgtaaaactttctgttctgttagctgatgcttgtagcctccagtcatgttctccatgctttcccagtctatcataataaccctttcacgtggaccctttagggttgtaagcccttaaaagggccagtaatttctttttcgaggagctcagctcttaagacacaagtctgccaaagctcccagccaaataaaaccccttccttctttaacccagtgtctgagaagttttgtctgtggctcatcctgctacaataagatgagagttctccaggcactccaggcactctggcctttgggtgggaactgtctccaaaactcacccccaggttcctggctctcctcacttcaggagggggtgggtctgccacgtaaccaccgcccagacctcacaagtgatagcacttcacctttttgcttcagatattttaaagagaaataacaccttacagatgcagtctctttctaaacttcccagatccattccctttaaacaatcctccctcagcatggtttttagacttgatttgttttgtcttagaaatggagtcttgccatgttccccaggctggtctcaaattcctgaactgaagtggtcctcactctgcctctcaaatagctgggactataggttgccctcacctcctgctgtgaggtcagttcctaacaggccactgacctgtagcggtccacagcctgagggttggggacccctgctataggtgcacaccaccacacctgtttttttttttaattttgtaaaaatgaagccttgatatgtcgcccaggctggtcttgaactcctagcctcaagtggtcctcccacctagtcctcataaagtactgggattgtaggcatgagccactgcacccagtctccactcctatttattattgaacactattccattgtatggctgatgtggtttgcatctgtgtccccgcccaaacctcatgctgaaaggtaatacccaatgctggaggtggagactggtgggaagtgattggatcgtgggggtggcttttcatgaatggtttagtaccatgcccttaagttatggtctcatgatagagttctcctgagatctggttgtccacctccgcctcccaaagtgctgggattacaggcgtgagccaccgcacccaacctgtcatttttattataacccttctaatggtatgaaatggcacctccccgtggcttccattcgcatttctctaatagccaacaatgccgaaggcttcatgtacccattacccactttgtatcttccttgatgtctactcacatcttctgcccatttaattaggttgtttcccttttcagagttttttttttttttttaagttttattgggctataattcacataccatataattcacccattttgtacaattcaatgattttggcatattattttttaactatggtaaagtacatgttaaataaaatggctcggccattgtttcggaccgagctcctgcgctagggcccaacagagcagcccaaagcggaaccgagtcacgcgcgccggacgccacccgacaggaggggaaacggggcagctctcaaaaccctggaggcgcagaccgtccacacgggacagggacgcccgctcggctccgctccgcgctgatcctcaaggtctcgcggtttccccgccgcccacccggacgccgacgaaagccagcgagctcctcagcctcaggtgactggaattctgaccccagaccacgggacgcgttctcccgctttaccctcactctgcgcgggcggggagggagacgcgggcgcaggccgcagtttctacctcagaaacggaaacacaacaccgccttctttttctttggggaaagaaaaaaaaaaaactgtctaagacgaggtctgggaccccgccggcgacccccgattcccccgggcggggagggggcgggacctggcgcggcctcggctccgcccctcgggccagcggaccacagtggggcggtcattgctgccttcctagagcggcccggaagtggctctcagggcgcttccggggaccaggcccgcttttggctgcatcagccggggattgccggcgccaggtgctgggggcgactcggacagcgggagcgtggggtggagtaggatggagtctccctcccgagctgggggtgtgggcctaggaaaggctgcttcgccgctgtgttcggagagctctggatactgcggggcttttccgcgga

SEQ ID NO: 41386 - DNA, 2300 bp, Homo sapien
ccgcagtaagcaggtcacacaaacctacccccaaaggccaagggagctgagaggctgaaaaaagaggctgacaaatggagtttctccaaaagaaacatttactagaaacttatgaacaaagtagtatctcgggcagccacaagacagtggatccctgcacctgccccccagaaagcatcctttatatagcaagctttttggtaaaaacatgtgcagctggtgatgtcttagactttcttgcaaaattcatgactgctggggaagttaggtagcatctttctgaggggttatcaatgctacaggccttgtgtgaagaccttggtatgcaggagtctaacatcggccaccacagtgattttgcttcgagatgacaccactcttgccaggcaacaggctcctttccttcagagacattgcagggacacctggtgacccttgaatgggggtctctgggaaggtgcactattcatgcaaccttttatctaagcttgaaattgtttcaagctaaattaacttacaaatgttgatcatagtaaggaaggagaccaccacttctcctactgccctcctctccccctgtcttgcctagtttataagacaggagaaatgggagaaaacaaaaagtgagaaagaaacagaagataaatagccagatgaccttggtgccatcacctggccctggtgttaataatatcaacccctaacctaaactacttgtgttatctgtaaattccagacattgtataagaaagcattgtaaaactttctgttctgttagctgatgcttgtagcctccagtcatgttctccatgctttcccagtctatcataataaccctttcacgtggaccctttagggttgtaagcccttaaaagggccagtaatttctttttcgaggagctcagctcttaagacacaagtctgccaaagctcccagccaaataaaaccccttccttctttaacccagtgtctgagaagttttgtctgtggctcatcctgctacaataagatgagagttctccaggcactccaggcactctggcctttgggtgggaactgtctccaaaactcacccccaggttcctggctctcctcacttcaggagggggtgggtctgccacgtaaccaccgcccagacctcacaagtgatagcacttcacctttttgcttcagatattttaaagagaaataacaccttacagatgcagtctctttctaaacttcccagatccattccctttaaacaatcctccctcagcatggtttttagacttgatttgttttgtcttagaaatggagtcttgccatgttccccaggctggtctcaaattcctgaactgaagtggtcctcactctgcctctcaaatagctgggactataggttgccctcacctcctgctgtgaggtcagttcctaacaggccactgacctgtagcggtccacagcctgagggttggggacccctgctataggtgcacaccaccacacctgtttttttttttaattttgtaaaaatgaagccttgatatgtcgcccaggctggtcttgaactcctagcctcaagtggtcctcccacctagtcctcataaagtactgggattgtaggcatgagccactgcacccagtctccactcctatttattattgaacactattccattgtatggctgatgtggtttgcatctgtgtccccgcccaaacctcatgctgaaaggtaatacccaatgctggaggtggagactggtgggaagtgattggatcgtgggggtggcttttcatgaatggtttagtaccatgcccttaagttatggtctcatgatagagttctcctgagatctggttgtccacctccgcctcccaaagtgctgggattacaggcgtgagccaccgcacccaacctgtcatttttattataacccttctaatggtatgaaatggcacctccccgtggcttccattcgcatttctctaatagccaacaatgccgaaggcttcatgtacccattacccactttgtatcttccttgatgtctactcacatcttctgcccatttaattaggttgtttcccttttcagagttttttttttttttttaagttttattgggctataattcacataccatataattcacccattttgtacaattcaatgattttggcatattattttttaactatggtaaagtacatgttaaataaaatggctcggccattgtttcggaccgagctcctgcgctagggcccaacagagcagcccaaagcggaaccgagtcacgcgcgccggacgccacccgac

SEQ ID NO: 41387 - DNA, 2300 bp, Homo sapien
gccccacagggtcggtgggtttttctccccgtgtgcggagatgagagagcatagaaataaagacacaagacaaagagaaaagaaaagacacctgggcccaggggaccactaccaccaagacgcagagaccggtagtggtcccaaatgccaggctgcactgatatttattagatacaagacaaaggggcagggtaaggagtgtgagccatctccaatgataggtaaggccacgtgggtcatgtgtccactgaacagggggcccttccctgcctggcagccgaggcagagagagagggagagagagagacagcttacaccattatttctgcatatcagagacttttagtactttcactaattttctactgctatctaaaaggcagagccaggtgtacaggatggaacacgaaagcagactaggagcgtgaccactgaagcacagcatcacagggagacggttaggcccctggataactgcgggcaggcctgactgatgtcaggccctccacaagaggtggaggactagagtcttctctaaactcccccagggaaagggacactccctttcccggtctgctaagtagcaggtatttttccttggcactgacgctactgctagaccacggtctacttggcaacaggcgttttcccagatgctggcgttaccactagaccaaggagccctctggtggccctgtctgggcataacagaaggctcacactcatgtcttctggtcacttctcactatgtcccctcagctcctatatctgtatggcctggtttttcctaggttatgattatagagtgaggattattataatattggaataaagagtaattgctacaaactaatgattaatgatattcatatataatcatgtctgtgatctgatctagtataacttgttgttttatatattttattatactggaacagctcgtgccctcggtctcttgcctcagcacctgggtggcttgccgcccacactaccaaagtgctggaattacaggcatgagccatcatgcccagccatcgttttctttctttttttttttgtttttttttttttttgaggcggagtctcgctctgtcacccaggctggagtgcagtggtgcgaactcagctcactgcaagctccacctcctgggttcatgccattctcctgcctcagccttccgagtagctgggactacaggcgcctgccaccacgcctggctaattttttgtatttttagtagagatggggtttcactgtgttagccaggatggtcttgatctcctgacctcatgatcctcccacctcagcctcccaaagtgctgggattacagacgtgagccactgtgcccagcccagccatcattttctttcatcactttgtccactgaacttaggagcaaccaaccagcttcatcatgttccttggttctccacatatagtcaaagatattatgtatagggtcactaaactccttgcctctcatgaatggtgaatcaggagtgtcaaatgcatttattttgcataactctctaaacagtttatgccaaggactatcagtgttctccatactattagaagtagagtccttaacattttggggtctaatcatattaaccagccaaatccagaaaccccaaaaccaatgacagaactccatccttaatatcctcttcctccagaaccactcctggtacaaaaatctgtattagtcagagttctctagagggatagaactaatggaatatatataaaaagggaagtattaaattacacaatcacgaggtcccactataggctgtctgcaagcttcaggagcaaggagagccagtccaagtctcaaaactgaagaacttggagtcagatgttggagggcaggaagcatccggcatgggagaaagatgtaggctgggagggtaggccagtctggccttttcacatttctccagtattaaccatcacacctataaatttccccagcctataagcagctatgggctctggagttaagctcgtcccccatctccacaggtttttgcaatatacctgtgttgttgctgttgagcaacaatctctctctctctctctgtctgtctcccccctctctctcctctctctctctctgtgtgtgtgtgtgtgtgtgtgtgtgtttctttagcccttgccctcccttcaaaacctaacattttagtgccaaaacccaggataggaattgggttctaaatgggtaaatgttttctagcaacctggaaagcagcaagcagcaaaaaccagacccaggcctgcttccagatcctgaat

SEQ ID NO: 41388 - DNA, 2300 bp, Homo sapien
gcttagcacacaagcactcaataaacattgtgctgttgaaggaaaaagagtgacagagacacagaagggacgtgctagagaggatgtcagctgctaaatctaagtgaagggcacggaggtattcattgtattattctttcaacctttatgaatgtatcaacatttgcaaaataaaaaagttgtggaggaggaagaaaaacaaaaaccaggatgcactgaggtctgaggtgaaggtcctaggagcatcagttctctgttgggatcaaggttgctgggacagagcttgatccctgtcaactgctaaaacaatccaggacaatccaatagtagagctgaattttgattaccttggtcctgagcttcacagccctttggcagaggaaatcctgtgacactgaggtgtaaccacaagactggcccaaactgaccctattctgttggtaacaggaggtatagcagagccaaaactgaaagtcatgtaacccggacatgcacaaaggaggaaaatcataactcggaaccaacgtttcctccctgtggagccaagaagacagggacatgaccggagcttgaggggcggaacgctttcagaagggaagggtccattatcctggaagatctggtgctgaaacctgccattccacaccttaccataaatggccaagtttaaagccctcctattgaaacctgcccgccagcacttctgtgtgccaacctgtcctccctaacccgtcgactttgacctaagcccacatgtgggagccacatttgagccatgcctccggtctccttggccgtcgaccttgaaataataaagccttctcttttctcaaaaactggtgccaccgttttggcttctagtgcgccaggcaacgggcccattgctcgaaacgcgcgtggtggatggtagctccgtgaagtgcgaacccctgcccgcaagggctgctaagttcgctgaagcgtagcacagacttcgcgtctgcctggtgcgcggcaagtacggaattatcgccacatcctcccggcctccgctcccaacagcacgggccgggcactcgcttcaagcctaccccctaaccttaagccttccccgccgcccccacgcagcccccagccccgccctgtggggaagcctcttgagagtctgggcccgcccacgcgcccaatggacgacgcggacctgaccttcgggagtggggccagcagaaggtggactaggcgtcagccttcccgtcccctgacaccgctccaaaccagccccaccctccctgccgcggctgtcaggtcctgggctgtgcccgaagcctccacacgggtgtggcccgcgccctcgtgaaggcccgcccctctcccccaggtgcgcggtgtaaacacaccaaaaagcaaacaccagggccgagtgggcgacggagacggtcgctgttcagtgacgccccctgtcgggagcacgccgggccggacacagcgaagagcggctgcgcctcggacctcgcagcactcagcctcctaagtgggaggaataacctcacgcaagtcatcaaacaagaggacttcagtgttgcaacgaaggaagagaaagggcccctgagaaggcgacattcgcactgcagcggcgcagggaccagccaggcggctgagggcaaggtcgttcccagcagcgggaaccgcaagggcaaaaggctcggaggggggaacgagctcgagttccaggacggccgaagccagcgcaagtcgaggagggactgcggggccggcaggggtgtcctccacagggcgacggcggcaggagctcgggaaccgggactgcgagcgggtaaggctcggcgatgggctgtaacctccgcgcccggaagtgcggccggggagccggccgggcccattgcccagaggtgttcggcccctctagggatcgcggaggtctggctctcggtggctcctgagagctccctgcagtcggtcaccgagaaaggcttcgggcgggcaggcgggccaaatgacgtaaacatgcttgccctccaggattggcgaactcggctgtgggggcgggaactgaggggcaggagcccccagggattggcggctgcgcagacggggcggggcagccctttgtctgaaggtgctgcgggatgccgttccttcgcgcgtgaggctgcggctctgacggtgagtggggggcgcgtgtcgtcgccggccaggaccctctcccatcacggacaccggagccggtgcgtcctccacacgaatcgtggactcttccccgcgagcacgcactgcctcctgcgtttacgctggtcccctcc

SEQ ID NO: 41389 - DNA, 2300 bp, Homo sapien
acccaattcattttccagcgaatactgtggtcatgaaagagaacacccttgttcttaggaagcacatgctgatgtatttaggggtaaggtgcatcacatctgcaacttagtctcagggccaaagttatctactgcgagggagaagaagatgatatggcaaacgtggcaaaatgctaacgggaatttgagtaaagatatttgggtgttctttacggtactcataatacttttgtgtgggaaattatttcacaatttaaaaactacaaaaacgtagcttatagtggacatatatcatttatgactattcaaaatctcatagaacctcatgttttagaagctctctgcagcctttccaacacagaagccaccatctacacttcctggcctcccttgctgctagtggagaataagaattggttcaagtgctcagatctgtctgcacaagacttaaagcagagttaaataggaaaattggacttccgcatgctcacctaggtcacagcagagccgtgggattcctaagtagtcagcagttcccttggcaggggagctccatgggatgattctggattctttcctggaatctcggactccagtctatttcatcagctctcttagtgtttctgtgagatactaatttttggttaatgttagtaatgcctagcagagattgccaaggactaggtacagttaaaaatactttacatggcccggcatggcagctcacacctgtaatcccagcactttgcaaggctgaggcgggtggatcacgaggtcaagagattgagaccagcctggccaacatggtgaaatcctgtctctactaaaaatacaaaaagtagttgggtgtggtggtgggcgcctgcagtcccagctacttgggaggctgaggcaggagaatcactcgaacccggaaggtggaggttgcagtgagctgagatcgcgccattgcactccagcctgggtgacatagcgaaactccgtctcaaaaaaataaaataaaacacttacacataccattttattcaatcttcacaaaactcttaactgcagtaagaactcagtcaacacttaggtcttgcatctctccagagggcgtactgtgtgttggggagtggtaaagaggatggatgctctgtggctgtgggaactctgcagcaatcacccacctgcacacagccaaccactccacagtacagaatagtcccttggtcacaaaacacactttaactcctgcaagaactcttgagtcccaagaggcaacttaggtcacagggagcatcctaaggcagggtcagcaaactttcctatcaaggaccagaagtaaatactttggctttgtgcaccatatgggatctatcacaactgctcaattctgtggtacaaaagctgccacagctatctgtaaacaaatgggcatagctgtgttccaacaaaacttttatctaaaacaggtcagggctaggttttccatgaaactgtgtcctgacacccccagacctgctggccagcagggaggggcctctcagcatctgggctttctccttgctcagggaacaggagcacagctctgagaactaaggatgggggtaagtgagctaggccctcaaggcagggcacttactaggtggaaaaaacagcctggaagctcatgggcatgaaaatgaggtccatggagagagcttcctctgtggcccagaaactagaagctggaacagccatgtggaactgtgcagcagcccagaacaggatatgggggcctaagtcacagcagaccagtgagaggagaaagctgacctcagattgcagatctgtataaagaaaagtagggtggcgggggagccttgggttcaaattctggaacaggagggacaaagaagggcagggaattggtggtgatgagtaggtaccacttctggggaagatgacagagcaactggacctgaaaaactctcgacttacctaaaatatcaattacagccagtgacaaagaattcacgccacacaactcattaccaatcaaacaaactactatggttatctcaaaccaaacgtcactttacttttttggtaacttttcattataataataaactctattcatgaatatgcagcctccataatcttctcccttgtaacaaacgtgcagtccgttcacaagctgtaaaaacaagcccaaacccaagacatcacaagaggcaagagcagtggcagtgagaagggagcctgtaaaggatgtttcaaaggagggtcccaggctatgtggccactggatgtaggcagtgagctgagtccaggct

SEQ ID NO: 41390 - DNA, 2300 bp, Homo sapien
acaagatatacaaatggccaacaaacatgaaaaaatgctcaacatcactaatgatcagggaaatgcaaatcaaaaccacaaaacaataccaccttactcccacaagaatggccataatcaaaaatcaaaaaataatagatgttggcgtggatgtggtgaaaagggaatacttccacactgcttgtgggaatgtaaactagtacaaccactatggaaaacagtgtggagaatccttaaagaactaaaagtagaactaccaagaaataccatttcgtccagcaatcccactactgggtatctacccagaggaaaagaagtcattatacgaaaaagatacttgtatatgcacgtttatggcagcacaattcacaactgcaaaaatgtggaagcagcccaaatgcccatcaatcaacgagtggataaacaaactgtagcatatatatatttatatatatatgtgtgtgtgtatatatgtgtgtatatatgtatatatctatacatatatagagagtagtattccatcatacatatatatatgatggaatactactcagccataaaaaggagtgaattaatggcattcacagcaacctggatgggattggagactattattctcagtgaagtaactcaggaatggaaaaccaaacatcgtatgtcctcactcgtgagaggtagctaagctatgaggatgcaaatgcataagaaggatacaatggactttggggactgggactcagggggaaagtgcaggaagggcgtgaaggataaaagactacaaattgggttcaaggcataccgcccaggtgacgggtgcaccaaaatctcacaaatcaccactaaagaacttactcatgtaaccaaacaccaccacctatggaaataaaaatttaaaaacctatggaaataaaaaaattaaaaataaataaaaaaataaacataagttccaatttcaggccatctctttgtgaatgcatatgactgtacactttcagaaaaaggtatgtcacatcttgaatgctttgctgcttagaaatttcttctgccagatgccctaaatcatctctctcaagctcaaagttccacagatctctagggtagggccaaaatgtcaccaatctctttgctaaagcatagcaagagtgacctttactccagcttccaataagttcctcatctccaactgagagcacctcagcctgaactaaaaaaaaaaggggggggggttatctagacagtgtttcttaaattccaatagagtttgtcatgcattttttattatgtattcctgattttgatagtttaatctgcctgcaaaatgaacgtcaaaatatttgtgaggttttttttggttgttgttgtttgtttcttttttttgagacagggtctcactctctcatcagtgcaacatgtgatcccggctcactgcagccgcacattccccggctcaagcaatccgcccacctcagcctcctgagtagctgggactacaggcgcacaccatcacacctggctaacttttgtattttttgtagagatggagtctccctatattgcccaggctggtctcaaactcctagcctcaagccatccgcccgcctcggcctcccaagtgctggaattacaggcgtgggccaccgcacccagccttatttgtattctttatgtccaagtgtacaattcatttccgtattagaaacgatccatgcacaatctcacgaaaacatgttatctactgaaggaatctgaattcttccatttatctatctaatcacttactgattgaatgattcagttcttccaaaaaacgtatccttaggtttttatcaaactaccgtctgttccgattctgggggcctgtatattaaaatctcccactacacgagtatatctcattatctctgcatttctattagtgtccccttttcttcagttgccgccttgttcagtgcacgggtcaactctgaaaaaaaggggaacagaagggtctctggcctcagggctagtgggaccaggtctggggctgaaccacagagtcgccccggcctcccgccatctagagaggctacgctgccccagatagaacgagcggcgggccggaattcggggcgggacttccgggggtcagccggcgttggctgagacgtcttcgtgccacggtgctgcctcctttccaagcgcgacccgttgaggttagttccgcgaagctccacgcctgggaccctgcgtctggttgtccctgatgcccccgtggttggggggcccaggggcctctcagggctcagacggggcgggcagcg

SEQ ID NO: 41391 - DNA, 2300 bp, Homo sapien
ggacactgattgtgcagagatattggtgaattccataaattcattgtgacagcacagtgccaggcctgcatcaagcgcaaatgaccaatgttagctgtgtggtagcacggagccctaggactctgctctgcttactgtttacatgcccaggtcccccactacacaggaagaaaccctttctagctcatctgtttccttaagaccgagaatcagcctgggatgctctgagtgagtaacagcaggaatgagagacttagaagagaacgtctctctaattggtatttcccagcagccaaaacagagctggccagcaaaccctgtgggatagtgtgaaatacatatttggtcttcatccccataacctggcatacaactcctaaaatccttgtaatctccaaagtgctgccttttcatagacttatgttgactgacagctttaggatgaagctggtcactggaaaggccaaggcacgattacagggttgggattctcagctccaatgccccaaactcaagagaggggaaaggagctaaaggttaagtttatcaccaatggccaatggtttaatcaatcatacctacataataaagcctctatacaaacctaagagggcagggttcagagagctgctggatagctaagtggacaggatcctagagggtgatgcacccaggaagggcatgaaaactctgcaccccttcccccatacctcagcttacacatttcttcatctttatcctttataataaattggtaaatctttctttttcttttctgagacagggtctcactctgccacccaggctggagtgcagtggcatgatctcagctcactgcaacctctgcctcctgggttcaagtgattctcatgcctcatcctcccaagtaactgagactacagatgcacaccaccatgcctggctaatttttgtatcttttgtagagacggggtttcactatattggccacgttggtctcgaactcctgacctcaagtgatctgcccacctcggcctcccaaattgctgggattacaggcatgagccactgcgcccagcctaaacttgtaaatctaagtgtttccctgagttctgtgagatgctccagcaaattaatagaacccaaagtgagggtcatgggaaccccaacttgaatccttttggtctcaagtttggaaaccccgaacttacaactagtgccttgagtggacagtctcagagactgagccctcagcctgtgggatctgaggctatctccaagagagcaccagaattgaattgaattagagctgcttggaacatgggaaaaaccctccatacatttggtcacgaagtctttgttgattgttgttgtggtgtcagagcagaggaaaaatgtaattagcatttttcccaaacagcctaaggagtggatgacatagaagtgaagggactgggagccagctgcctgggaaggacacttgaactattttttgtggctgaaatagcatttttctagggtaaataaaacacaaacctacttatgggcagataacaggggcaaataacagcaaggaaagaggacaagatagaaaaaggaggaggaaagcaaaggcctgagggtaacaagagatttgtctggggcttgtagagaagggattcgtgagtgaagctgcagcacctaccacagaagcagagagtgggggcagactcaccttctctcttgtgcctccagctccagctcccctgagttctcaggatgtgaggggtctatggttcgtccccccgctccagcctggagatgacatcaggtttggaagcttgaagtcctgctccagagaaaggaagcaagacctgaaaagtcatcccaggtagagggcaggatggacctgtggtctgagtctttgtgctggttgtgtccttccctgccacctggtctctaaccgtggagaaagacacaggcctctgcctaagctgaggaaaggtcaaaactagcttttcaggaggacggggagcatagataggacagtgttggggcctgaacacatcatggtagaggactcatagtagtgggtgttgatccccagcagaagggctaaagggggaatgagtctccagcaccatgtctggtttgtctggcccaccagcccggcatggcccttgtccatcggcgttgctgcttttgttcctgctgggccccagcttggtcctcgccatctccttccatctgtccattaattctcacaactgcttccatgaggagatccacaaggacctactagtgactggcacatacgagatctctgaccagtctgggggcac

SEQ ID NO: 41392 - DNA, 2300 bp, Homo sapien
tttcattggctttgtatttttaagtatttaccctcttaatggccctcctagatatctattttatacatcatatttcttaattatctagatggaacactgaaggacaggaattaagtaagtgactggccatgcaagaagagttgtaaattttacttatttttccttggtagaagttatgttaaaaattcaagcaaccacgtatctaacagaagagttttatctaggatgtataaaaaaactctgaaaactcaatagtaaaaagaacaaatgacctaaatagaaaatagacaaaagacatgagcagacatttcactgaagaggatgtgtagatggcaaattagcacacgaaaagatactcaacatcattagccattggaaaatgcaaattaaaaccacatgtggtatcattacacacatctatatgaatggttaagataaaaaatagtagtaataccaaacgctggtgaggatgtgaagaaactggatcagtcatacattgctgtatgaattgtatgagtggctgtatgtaaaaggtacagccactctggaaaaaagagtagggtagtttcttacaaagatatacgtgtttaccacacaacccagcaattgcccttttgggcatttatcccagaaaatgaaaatgtgtgttcacataaaaacctgtacatgaatgttcacagcagctttattagtaagggcaaaaaactgaaaacaactcttttgtcctttagtaggtgaatggttaagcaaactgtggtacatccataccatgggatacgactcaacaatcaaaaggaactgcccagacttcaccacgatgcaatatatgcatgtaagaaatctgcacttataccccctaaatatataaaacatttttaaaagaaaaaaaggaagaagatacttgcaacaacttggatggatttcaagggaattatgctgaatgaaaaaaagtcaacctcataagattacattctatatgattccattcatatgacattcttgaaatgacaaaattacaaagatggaagacagaacagtggtagccacaggttggggtgaggggataagaaagggatgtggctgtggctgtaaaagcgcagcacaagggatccatgtgatagaactgttctgtctcttgtgatggtggtcacatgaatctacacatgataatactgcatataattgtctaaaatgacattttcttcaagagttatctacagtttaaagctcacttttatgaagtgtcacatccatcaccattttaagagacataaaatcatgaaaagatatcaccagaagctacgtaaacatttcagctaagggtaaagagaaagttaagagtgttttcacaaggaaattgaaagaaggcaatccgaatgaagtcaacttggtcacacaaaaatcttggtaaaagaactagaatggaagcccaaactgctgagcaagtgggagaagaaaagaaaacttggttcaaacagatcacacaagggaacccaggacaaatgctgactttggcattatctaggtaacccttttttttgtcataggtgactctaataatagacctgttgttgcaaaaccagtcaaaatcctaccaaattaaaaagaagtccctcattgacttgttgggtgtaggtggtaccccatgtcctcgcacaccaaaagagatcatttctggcaagaaagctcctacatgccttgatggtgctgctggtaggatgccttaggccaggcccatcccagcgatgttctgctggctgtggtaaaaggtgggaggagaatatgccttattcattactcaatcaacttcttagccttgaagaagcatcacaggtagaagacctgccaggtggctagtccagtgaggcagaacattgaaaagatgctgaagtgtaggacccaagtgtttgttgactcactggtatcaccatctcctcttctctcttcttcatgtaggcaaaatcattaacaatagattctgaaaggtcttctaggtgtcgcagcttcacctctaatggtttgagcttctcaacttttgcaatctctctgtaatttttcacctccactccatgcttcatgtctaggatcacaagttggtcaggtatctgccctgtttccttgctctcaaaacacacttcaaacatgtcataatcttcagtggtaaaggcaaatttccccttggttgtattctttttggagtagaaaatatggccagcagaatctgtgatcttgaggtggctgcacaggccaccagtgcccccagactggtcagagatctcgtatgtgccagtcactagtag

SEQ ID NO: 41393 - DNA, 2300 bp, Homo sapien
gtggcgtgaggcacgagcggaggcagcggggcgtgcaggtctacgggctgtcatccacgctcccgagcaacactgaggcagggaagccagatgggtaaaaagatctcgcagaggaagggagtttgggcaatgtcaggggatgagctgaattgtgctttttttttttcagaagagagaaaagtgcatttcatttagcaggaatgtattgattgaaagggtaaagctgtgagagctgtggtgtgaaggagcttctgttttggggaaggaaaggaataggcaggaggtgatatctcacagatgcgctggaacaagctcaacactcattcatttagtaggcactcggtaaatgctgacttactgattaggacaattgagacttagtattgtttgcggtttgctaatactgtgctgagcattttatacatattctcatttaacgcaatatagtcacttaaggagtagtgtcaatctcattttatggtctgtggaaaaactcaagtcacttacctgagacctctgcatgagtaagtggtggatccaaggttagaactcagtcctattcgagtccagagcccatgcgcctaatagcagcattacatgcctgccacatgcgtttaggagtgaaggcagagtacactaagaggtaccgcttgtgattcacaaagggcataagcagcaggggccagtcaaaggcaagccctgtctgaggactggaagattccctctggccaaggtgtgcctcagctggagactgtgaagacatcaatgagcttatgttcagctgccagtcagaaagtctgtccaacgaaggcttaaatgatgatgagacagggtttgttccagagtttgttgtgaaatgccagggctctagaacgtgtctccaacgttctcttggctttcctttgtggtcactccattccccttatttcctttcagatgcctcttggcaaacttcccttaacatcttggtgacgagaactgggccttgcggtcacctagagcggaaggaaaagggcgcatttcctcctgaactaaactaaggaatttgtttatgtgtagagggctgtggggaggtgacttgttgtgtatgctgaggccaattgggaaggcttttgtgggagtgacacatatcactgctaaaataaaaccagatttgtggttttagatgtcatctgtgtactgacagttttcagtatatacccagccagcccaacctcactcctgaattttcaacttgtatatccaaatgccctaattttccatttataaatctaataggtatcttaaacattactgtatacaagacaacttttacatttaatctttttgcagtcttactcttttgagtatatggaaatttcataatttcagttgctcaggccaaaaatcttggtgtctcgtcctacatgaaattcatctgcaaatcctattgatggtacctttgaaatgtatccataatctggctgctttttgtcacttctgccaccaccagtctggtccaggacattcatctctagctggattgttgctagaaccttctgactggtttcctgtttttgttccttacccccaccccatagtctattcaaagcaccctcaaagcagcagctgtagagaccacatctgaggtcatatgactcttcccagacattccaggcacttcccatccattcagaataaaacccattgccctaaggcttacaaggtacccaccccagagggtacccacctcttttaccctcccctagtctgtttgagcccctctggcttctttgcccgttcttgaacacaggtgtgcttgcatctcagagcctttgcacttgtgccctcctcctgcctgggatgtacctcactgataaccacatggtgcctaccctcactccatccagatctctgatttgttgtcactttatcggaggtgtcttccctggccatcctgtgtaaaatatctcttaccaccagtcgctgccctcgtgctgcgtcattaattttttgtatcctttgtcattacctgacaccacctgggcgttgtgtctgtgtgtcatgcatatgtgttaacttctccatttgctcattcgctgccttagcaccagagcctggtccgctgttctcagctgtttgccgtctgcgcaggacctcataggtgggcctgggaaacgcagtccattgtctctcctggccaagtgcactgccacagtcctggctttcacatggtggcctcaggatgctgtcatcccaggggcctcaggaaggcctctcttgagacatggagaggtatggcagaaaattagggaggggat

SEQ ID NO: 41394 - DNA, 2300 bp, Homo sapien
cgataaagtgacaacaaatcagagatctggatggagtgagggtaggcaccatgtggttatcagtgaggtacatcccaggcaggaggagggcacaagtgcaaaggctctgagatgcaagcacacctgtgttcaagaacgggcaaagaagccagaggggctcaaacagactaggggagggtaaaagaggtgggtaccctctggggtgggtaccttgtaagccttagggcaatgggttttattctgaatggatgggaagtgcctggaatgtctgggaagagtcatatgacctcagatgtggtctctacagctgctgctttgagggtgctttgaatagactatggggtgggggtaaggaacaaaaacaggaaaccagtcagaaggttctagcaacaatccagctagagatgaatgtcctggaccagactggtggtggcagaagtgacaaaaagcagccagattatggatacatttcaaaggtaccatcaataggatttgcagatgaatttcatgtaggacgagacaccaagatttttggcctgagcaactgaaattatgaaatttccatatactcaaaagagtaagactgcaaaaagattaaatgtaaaagttgtcttgtatacagtaatgtttaagatacctattagatttataaatggaaaattagggcatttggatatacaagttgaaaattcaggagtgaggttgggctggctgggtatatactgaaaactgtcagtacacagatgacatctaaaaccacaaatctggttttattttagcagtgatatgtgtcactcccacaaaagccttcccaattggcctcagcatacacaacaagtcacctccccacagccctctacacataaacaaattccttagtttagttcaggaggaaatgcgcccttttccttccgctctaggtgaccgcaaggcccagttctcgtcaccaagatgttaagggaagtttgccaagaggcatctgaaaggaaataaggggaatggagtgaccacaaaggaaagccaagagaacgttggagacacgttctagagccctggcatttcacaacaaactctggaacaaaccctgtctcatcatcatttaagccttcgttggacagactttctgactggcagctgaacataagctcattgatgtcttcacagtctccagctgaggcacaccttggccagagggaatcttccagtcctcagacagggcttgcctttgactggcccctgctgcttatgccctttgtgaatcacaagcggtacctcttagtgtactctgccttcactcctaaacgcatgtggcaggcatgtaatgctgctattaggcgcatgggctctggactcgaataggactgagttctaaccttggatccaccacttactcatgcagaggtctcaggtaagtgacttgagtttttccacagaccataaaatgagattgacactactccttaagtgactatattgcgttaaatgagaatatgtataaaatgctcagcacagtattagcaaaccgcaaacaatactaagtctcaattgtcctaatcagtaagtcagcatttaccgagtgcctactaaatgaatgagtgttgagcttgttccagcgcatctgtgagatatcacctcctgcctattcctttccttccccaaaacagaagctccttcacaccacagctctcacagctttaccctttcaatcaatacattcctgctaaatgaaatgcacttttctctcttctgaaaaaaaaaaagcacaattcagctcatcccctgacattgcccaaactcccttcctctgcgagatctttttacccatctggcttccctgcctcagtgttgctcgggagcgtggatgacagcccgtagacctgcacgccccgctgcctccgctcgtgcctcacgccaccctcgccctgcccgcgcctcggccaacacaaagcgggcgctcagcaccccgcagccgccctcgacgcgtcctctacgggtcactgaggccgcggggcccgacctgcggcctctcagaaccacggcaccgcccctgcccgccccagcgccactccggcacctccgcaccaggcgccctagctcgggactcactcggctcgaccacgggaagggaaggagcgcgaacgctaaatcccgtgccgcggggagccaagccccctgggccggaaatgcctaatctgaacttccgccctgcccttcagctcaccaaccaattgaattccaggtttcgtgggtccgctctaggcggctgatagtactcaatgctccggcagtcctgctccttc

SEQ ID NO: 41395 - DNA, 2300 bp, Homo sapien
tgactggtcaagataactaaatgtaagttttctcagaattgtcacaggttgaataatttactgtctttgtctgaaacttgtatcctgccttgtttttcacgcctgaaacgacatataagcaagcctgctttctttgtctgggtcggtagccattttgggcatgagcctgctctaggctcgggtgcccgaattgaagttctctttggtctccaactgtctcttcgtcttccttggctagagtcttactgcaacagtaagtgctcactaaatacccctagtgagtttgggatcaagggagtaggaaagcaggaagaaaagaaataacagtcaacaggggaagtgagatgttgcaaaggccgctctcagaacggaccccactatccttaaaagaaaaggctagcttgtgccaatgggccagagtggaacaggcatcccatggagtatacctggaagattcctgggtcttctgcatgagttgcccctaatgcccacagtgtttctaaacgagaaggcaggtacgtggtacttggggcggccatctgtgttagctaactgcctttatccaaagttaaaataaacctcatgtctctatgacaagcaggtaattgcaacttggagccagccatctgctaaactcccacagagacaaggagggaagctatcttccttggcctttttatttcaaagaaatcactccaaggtccttaagaaaggtccttaagaaagaaattcctggtttataaaactggcaagaggcttatgcagctttttaaaaaatttacatacatttcaagagggcaaagaaagattttcctattacaaagttttctaaaagaaatggtcttagtaaaaggaaaggagtgtctcttcccttgggcaccatgaaaaatccaacttttaaaaaaatatttagggccgggcgtggtggctgacacctgtaatcccagcactttggaaggctgagacgggtggatcacttgcgctcaggagttcaagaccagcctgggaaacatggcaaaacaccacctctacaaaaaaatacaaaaactagctgggcgtggtggtgggcgcctgtggtcccagctactccggaggctgaggtgggaggatcgcttgagcccaggagtcgggccgtaattgcgccactgcactctggcctgggagacggagagagaccctgtcccgcccccaccttcaaccaccccccaaaaaattaaagatttagtgtggtggcgcgttgcttgtagtcccagttactcgggaggctgaggcaggaggatcgcttgagcccgggaggtcgaggttgcagcctgggcgacagagcaaaaccccatctctaaaaaataaaataccctatggctcttcccacaactgctcattctctgacatcttaatgctcccactgtcccactgaagacgggctgctttcctttccattctcgtaagtcctccctccgggcccgtgctcctcacctgcccgggtcgcacctggcctctcccctcactccgcttcacccccgcccgccgcccgttccgcaagcgcgtctcagcaccgagtggttggttctcgaactccagctccaccgcaataggtctgaaacctctctgcacctcggcttcctcatttaagcgatggcagcagccttctagagggggcgatgaggtcaaaagactacaggtgggaagtgctaggtgcacagcgggcgcgagctggattctgagcttgatcactacttggaggtgggggaaaagtcgcccgagagagggggacagtgcaccgcgagacgtcctaggtgaggaagggccgggtccagagcacggagaacaacccccggttgaggagcgtccgcaggaacgctcggtgtcggggtcccttccttcgcagccgcacgccgccggcggcacctctgcacctgcgccctctcgcccgcagactccgccaagggctggaagggacgtaaccgggaaggagcaggactgccggagcattgagtactatcagccgcctagagcggacccacgaaacctggaattcaattggttggtgagctgaagggcagggcggaagttcagattaggcatttccggcccagggggcttggctccccgcggcacgggatttagcgttcgcgctccttcccttcccgtggtcgagccgagtgagtcccgagctagggcgcctggtgcggaggtgccggagtggcgctggggcgggcaggggcggtgccgtggttctgagaggccgcaggtcgggccccgcggcctcagtgacccgtagaggacgcgtcgagggcggctgc

SEQ ID NO: 41396 - DNA, 2300 bp, Homo sapien
ggatgcagcaactgttgtgactgtgcaatcagcacaataagcctctgccttcacattgtggttaagctctttcaagcaaaactatcttcagtagagaatttcccctgcaaagagcatgtacattttgattttacctgtcctcagactgacctttcgctcattataatagtaaaaaacagagccctggttggaggtttaagatgctaataagacatgtgacatgtacgaacaatcatataccagcatgtagaacaagcattgtatgacaagaagcattgtatgaacaagcatgtaagaacatacagctaccgcacatgtgcactcagaggaccatccagaacatactcactagtagcacctcttcccaattccttatgaataatcatgtaagacccccataaagggagtctccctcatgcgtctttgctgccccaaccttatgagcagctggccctcaatcctctctctctctctcagggtgtactgtctattgttcacttaactttccaaatattctttctcctttgtaataaattactgtatgccgcatctcctttactgcgtgtcccgtttaaattctgcgtgttttttttttttttttttttttagatggagtctcgctctgtcacccaggctgtagtgcagcggtgcgatcttggctcactgcaagctccacctcccgggttcatgccattctcctgcctcagcctcccgagtagctgggactacaagtgcccgccactatgcccggctaattttttggtattttttagtagagacggggtttcactatgttagccaggatggtctcaaactcctaacctcgtgatccgcccgcatcggcctcccaaagtgttgggattacaggcgtgagtcaccgcgcccggccaatccgccgaattttgggagtaatgtatcacactgcagtaaataactatcagtgatgaccaaactgtaacccttcgagaccttgcagaccaggcagctaacacttcccaccccaccgtctcaggaaacaccgctttccactcctgtgtccccgaaaggaatcatcagacatctcggactcttaccttctcaagcaacacaacccaccctcctggcatagcccgttgcccccctgaaaccctactcagcctcacctcaacccctacgcaattcctctcggttgtcatgcctccatcggcgggggtcgagtgttgtgtgtgaccccaggtctctagcaaggtatagtgggagggaagcatccaggggaagagaggtggtgggatggggctctccctctcccccataccgccaccctccctcacgtccatatcctgtccaaggctcttcccgcgtctgcttctgaaacccctccacgtccctccaccccatgtgccccactcgttacacaagagcagagagatctgcagaacatacgtctacgattatgccactcttcagatttacatcttgcagcgacttcccactgcgttagaacggaagtaagcccatgacgggggccctcccaactctcagacctcacccgagcctccacgtcccgagacgccggcctctcaaacgaccgcgccctgaccctcgctcttccccatttcccagggtctttgccgaccaccctcttgcgccgtagctgctcacgtgctgtttacttgcttttccctccccaccaaaaggtgagccttgagaagacacaccctcgtggagagctttgaacttttatccggaaaggtgccgggcacgtagtcagcgcccgcgatcactcgctcacaagggttcttccgagacccctcttcagcctcttccccgaacccccaggccccgccccagccccatctcagcttcgtcccaggcgcgtcccagcttcgccccgtcccagcttcatcccaccccagccgcgccccgccccgcccgctccccgccccgcccgcgccccgcccgcgccccgccccgcccgcgccccgcccgcgccccgcccgcgccccgcccgcgccccgcccgcgccccgcccgcgccccgcccgcgccccgcccgcgccccgcccgcgccccgcccgcgccccgcggaacctagagtcgcaggcgcgttcttgaaggacggaattcggcgtcggactctgcgccccgcgtagttccggtggcgactgcggcgcatggcggtgagcggtgtggagaagacgcgcgggtggctgggccttgcattgttggcggctctcggtgaccctcgtgctacccccctttctccaggccctgggacatcttgctggggaggcagcggcggccccaggcccgggtactccc

SEQ ID NO: 41397 - DNA, 2300 bp, Homo sapien; identical to SEQ ID NO: 40420

SEQ ID NO: 41398 - DNA, 2300 bp, Homo sapien; identical to SEQ ID NO: 33826

SEQ ID NO: 41399 - DNA, 2300 bp, Homo sapien; identical to SEQ ID NO: 33827

SEQ ID NO: 41400 - DNA, 2300 bp, Homo sapien; identical to SEQ ID NO: 33829

SEQ ID NO: 41401 - DNA, 2300 bp, Homo sapien; identical to SEQ ID NO: 33830

SEQ ID NO: 41402 - DNA, 2300 bp, Homo sapien
cccatacccctgtgtcctgaggctactgggcagtccctccatttccccgtgcctctgaggctgcccagtctctgccctgctgcccacctgtaccttgagctttcttctcgcccaggcttccaactccaccctctcctgccaagcaatcctagccctctgagcctcttggggccccctcagacttgtccctgtgtccacaggtgttctccagtgccaagtaccctgctccagggcgcctgcaggaatatggctccatcttcacgggcgcccaggaccctggcctgcagagacgcccccgccacaggatccagagcaagcaccgccccctggacgagcgggccctgcaggtctgctggccgcgcatatagcctgtcacacaccaggaggactggatactggggaggagccggggccaccatagggttctgtcccccagaggaggctgactgggatgggatggcagctgattaggcccagcaccaaatattcaccatcccttggccatcctggccctctcaggagaagctgaaggactttcctgtgtgcgtgagcaccaagccggagcccgaggacgatgcagaagagggacttgggggtcttcccagcaacatcagctctgtcagctccttgctgctcttcaacaccaccgagaacctgtatggccagagggcagggccgaggggtgtgggcgggaggcccggcctggcttagtggggacccagggcatcagacacaggtacagcacataggccaggagccagggggtgactggggtggctcggctcgggaggcctgggaccccacagtgcacactgtgcccctgatgatgtgggagaggaacatgggctcaggacagcgggtgtcagcttgcctgacccccatgtcgcctccgtaggtacaagaagtatgtcttcctggaccccctggctggtgctgtaacaaagacccatgtgatgctgggggcagagacagaggagaagctgtttgatgcccccttgtccatcagcaagagagagcagctggaacagcaggtgggaggggtgggacagaggtggagacaggtgcagtggcccagggccttgccagagctcctctccagtcaaggctgttgggccccttattccacccatgggaggtgcacacaaggtcttgttggctgcccctgcaggtccctgtcacctctcacatgtccctgcctaatcttgcaggtcccagagaactacttctatgtgccagacctgggccaggtgcctgagatccatgttccatcctacctgcctgacctgcccggcattgccaacgacctcatgtacagtgccgacctgggccccggcattgccccctctgcccctggcaccattccagaactgcccaccttccacactgaggtagccgagcctctcaaggtaggtgagctgggttctgggatgggagctgggccggggacctccctgctcacacaccttcttccctagacaccccacactttgtgtttcagacctacaagatggggtactaacaccacccccaccgcccccaccaccacccccagctcctgaggtgctggccagtgcacccccactcccaccctcaaccgcggcccctgtaggccaaggcgccaggcaggacgacagcagcagcagcgcatctccttcaggtgggagcagctctttgaggccacctgatttctggcgtgctcagtgcactcgggtggattttctgtgggtttgttaagtggtcagaaattctcaattttttgaatagtttccatttcaaatatcttgttctacttggttcataaaatagtggctttcaaactgtagagctctggacttctcacttctagggcagagggagcctgaacaagtgaggctctgggttcctcattcctaattaaaccaatggaaagaaggggtctaataacaaactacagcaacacatttttcatttcagcttcactgctgtatctcccagtgtaaccctagcatccagaagtggcacaaaacccctctgctggctcatgtgtgcaactgagactgtcagagcatggctagctcaggggtccagctctgcagggtgagggctagagaggaagcagggagtatctgcacacaggatgcccgcgctcaggtggttgccgaagtcagtgcccgggccccacacagtctccaaaggtccggcctccccagcgcggggctcctcgtttgaggggaggtgacttccctcccagcaggctcttggacacagtaagcttccccagccctgcctgagcagcctttcctccttgccctgttccccac

SEQ ID NO: 41403 - DNA, 2300 bp, Homo sapien
ttttctttctgaattgtggccaccttcataccagtctgtcatggaacacttaagccgcttgagtgcctgctggtactcccagccctgccatgcctgagccccctgcacacaaggagccaggagtaatcagggcagaccctttagggcacggggacttctggattgtgaaattggctctctgggggccaaggccttctaacgttggtggaagtggctttggcttattgggtcggattctaggccattcattccaacctttagagacatcccagctttccctagcccagagtctgcagcccctccaccatcccacatcctccccctccctttcctcatgaaccccagtcgcgcctctgccttctcaaacccctccaccatcccacaccctcctcctgcccttcctcatgaaccccagtcgcgcctctgccttctcatccctgcgcaccacacaggctcgctcgtgcccggtgagtgctgaggctgctctgcacgtggagtatggccctgtgggcaagggctgggctcttggaggtaggggagctacaggggcgactgggaggaggatgttgtgttacacacgcatcagagttaactttgcagtgagagcggccttgctgcggccaaagaacatggaaaagcatgagtggggtgatgtgccttaaagcatcagacacttgggcctcgggcatcaggagccagccacagggatgtctggggaaatggcgttccatgagatgcaagcacacaagaatgcacttggcacatctggggaacagcaggcagctgatatcactgggcccaccccgcaccagggaggatggaagcaggtgaggagctagaccacactgaggcggtggtcgggactcggggtttgctcagtgagccgttcactatgtgcaggggcagttccccgtctgaatttaggtgacgacactcaggtccagccttgccagtctcagcctccggtctccgttccccctctgcagaggccacattgtctgctgcacgtgatcatgaggggttgtgaagtgcttgccccatcagtagccatgtgtgcatgtgtaaataccatcctctgtgtgccctggaggctgtccttcagatagcatgtacaggtggcagcatagggcctgtcccttctgagagtgcagggaactcagcaccgtcaactcctcgaccctgcaggtcagattatccttgtagaggccccctggatggcaccaagatcggccctggcaagtaggtgaccctgacttcagagcccttgcctgagggcctggcctggcagctctgctgttagaagcaggaggtgtgcagagggtggggagcagcccagcctctgtgatcttctccatggcaggatctcccagcaggtagagcagagccggagccaggtgcaggccattggagagaaggtctccttggcccaggccaagattgagaagatcaagggcagcaagaaggccatcaaggtagtccccatacccctgtgtcctgaggctactgggcagtccctccatttccccgtgcctctgaggctgcccagtctctgccctgctgcccacctgtaccttgagctttcttctcgcccaggcttccaactccaccctctcctgccaagcaatcctagccctctgagcctcttggggccccctcagacttgtccctgtgtccacaggtgttctccagtgccaagtaccctgctccagggcgcctgcaggaatatggctccatcttcacgggcgcccaggaccctggcctgcagagacgcccccgccacaggatccagagcaagcaccgccccctggacgagcgggccctgcaggtctgctggccgcgcatatagcctgtcacacaccaggaggactggatactggggaggagccggggccaccatagggttctgtcccccagaggaggctgactgggatgggatggcagctgattaggcccagcaccaaatattcaccatcccttggccatcctggccctctcaggagaagctgaaggactttcctgtgtgcgtgagcaccaagccggagcccgaggacgatgcagaagagggacttgggggtcttcccagcaacatcagctctgtcagctccttgctgctcttcaacaccaccgagaacctgtatggccagagggcagggccgaggggtgtgggcgggaggcccggcctggcttagtggggacccagggcatcagacacaggtacagcacataggccaggagccagggggtgactggggtggctcggctcgggaggcctgggaccccacagtgcacactgtgcccct

SEQ ID NO: 41404 - DNA, 2300 bp, Homo sapien
tggtgctggatgcacctctgttttctgtggtggctccaagagagtgcacggtccctgctgattgaaagaaggatgaagggcagaagaggggcggggagctgtgtgccctaagatctcattgcctttttatgccgattaacatgcttttagcccctactgagcttatagttaacagaagtttccaggtctttcttcacctgaactgtgtctaaagcaagttctctccaccttctgtatttatacgcttgatttttaaaacctaaatgttgggcttcacatttcttccttgtaaatttcatcttggtgattgcagtctaccctctggcctttaaaaattgtctgagccttgattcgatcatgaaaccagcttacccttcccctgtgtgctggccccagttttctaaccaggtgttgaatgaactggatggactctgccagatccctccgtgcaaggctggaatcagtccattgttcaactgtgccctttggggctgtggttcatttggctctgatttttcctatatgttctctcctccaacccccatagctccatcttgtctacaagattttgttagaagccgtcaaaatcctgctgactcgagatgcgctgtggtgcatgttttccccgggcacagcaggctaataatcctgttacaaagagaaatgctgtacatttcgagcagtgctggcccctgggactcaccgtggccttttctaagtgcttacagactctctgtttaataatccattccagaaattttccagggctcattgttgagcttggtgttcgcaactttgagtgatcagcccttctcctttgtgggagcaccaggacagagcagcctttgtccctccccagtctcagttccctcccactgcccctgtggacctcgaatgcagagcttatgcacctaccgaaggtcgtgtcagcacccaaggcagaacgaggctgccctgggaactagggtcaattaagacagcttgtgctggaggaccctttacagcagatgaaggcctctccccagccagaaaagatggagcacacgctgggtggtggccccgcttcctcactggaaggagatggtgctcttcttttttctttctgaattgtggccaccttcataccagtctgtcatggaacacttaagccgcttgagtgcctgctggtactcccagccctgccatgcctgagccccctgcacacaaggagccaggagtaatcagggcagaccctttagggcacggggacttctggattgtgaaattggctctctgggggccaaggccttctaacgttggtggaagtggctttggcttattgggtcggattctaggccattcattccaacctttagagacatcccagctttccctagcccagagtctgcagcccctccaccatcccacatcctccccctccctttcctcatgaaccccagtcgcgcctctgccttctcaaacccctccaccatcccacaccctcctcctgcccttcctcatgaaccccagtcgcgcctctgccttctcatccctgcgcaccacacaggctcgctcgtgcccggtgagtgctgaggctgctctgcacgtggagtatggccctgtgggcaagggctgggctcttggaggtaggggagctacaggggcgactgggaggaggatgttgtgttacacacgcatcagagttaactttgcagtgagagcggccttgctgcggccaaagaacatggaaaagcatgagtggggtgatgtgccttaaagcatcagacacttgggcctcgggcatcaggagccagccacagggatgtctggggaaatggcgttccatgagatgcaagcacacaagaatgcacttggcacatctggggaacagcaggcagctgatatcactgggcccaccccgcaccagggaggatggaagcaggtgaggagctagaccacactgaggcggtggtcgggactcggggtttgctcagtgagccgttcactatgtgcaggggcagttccccgtctgaatttaggtgacgacactcaggtccagccttgccagtctcagcctccggtctccgttccccctctgcagaggccacattgtctgctgcacgtgatcatgaggggttgtgaagtgcttgccccatcagtagccatgtgtgcatgtgtaaataccatcctctgtgtgccctggaggctgtccttcagatagcatgtacaggtggcagcatagggcctgtcccttctgagagtgcagggaactcagcaccgtcaactcctcgaccctgcaggtcagattatccttgtagagg

SEQ ID NO: 41405 - DNA, 2300 bp, Homo sapien
tacagacaggggacttgcaagcagggagggcagggtgagacattcagaggaaacgacgacaggaaatggtgacagatagggaacgaggatgaagggaagggagagccagtgacgactggcagtggagtggggagcaccgccacctctcctcctccacttgcccctcctgtggcactggacaagctagtgggcttttcgttgtccatgggctttttcggtggggatgtgaccagctttgaacccgtccccttaaacatgctcctcctgcacggaagagacaggggcaggggagagactctctccccaccacccagctcaggccccagcacagcccggcctctggcctcactggcgtctgtgcccagtgacgcaggcaggtgagctcctggcaaattagcattgcaggctgtgctctctcctcctgctctgctgcagctgggagtgtgcagagactggaggggatgacagtcaccctctgttttctgtggtggctctgttttctgtggtgctggatgcacctctgttttctgtggtggctccaagagagtgcacggtccctgctgattgaaagaaggatgaagggcagaagaggggcggggagctgtgtgccctaagatctcattgcctttttatgccgattaacatgcttttagcccctactgagcttatagttaacagaagtttccaggtctttcttcacctgaactgtgtctaaagcaagttctctccaccttctgtatttatacgcttgatttttaaaacctaaatgttgggcttcacatttcttccttgtaaatttcatcttggtgattgcagtctaccctctggcctttaaaaattgtctgagccttgattcgatcatgaaaccagcttacccttcccctgtgtgctggccccagttttctaaccaggtgttgaatgaactggatggactctgccagatccctccgtgcaaggctggaatcagtccattgttcaactgtgccctttggggctgtggttcatttggctctgatttttcctatatgttctctcctccaacccccatagctccatcttgtctacaagattttgttagaagccgtcaaaatcctgctgactcgagatgcgctgtggtgcatgttttccccgggcacagcaggctaataatcctgttacaaagagaaatgctgtacatttcgagcagtgctggcccctgggactcaccgtggccttttctaagtgcttacagactctctgtttaataatccattccagaaattttccagggctcattgttgagcttggtgttcgcaactttgagtgatcagcccttctcctttgtgggagcaccaggacagagcagcctttgtccctccccagtctcagttccctcccactgcccctgtggacctcgaatgcagagcttatgcacctaccgaaggtcgtgtcagcacccaaggcagaacgaggctgccctgggaactagggtcaattaagacagcttgtgctggaggaccctttacagcagatgaaggcctctccccagccagaaaagatggagcacacgctgggtggtggccccgcttcctcactggaaggagatggtgctcttcttttttctttctgaattgtggccaccttcataccagtctgtcatggaacacttaagccgcttgagtgcctgctggtactcccagccctgccatgcctgagccccctgcacacaaggagccaggagtaatcagggcagaccctttagggcacggggacttctggattgtgaaattggctctctgggggccaaggccttctaacgttggtggaagtggctttggcttattgggtcggattctaggccattcattccaacctttagagacatcccagctttccctagcccagagtctgcagcccctccaccatcccacatcctccccctccctttcctcatgaaccccagtcgcgcctctgccttctcaaacccctccaccatcccacaccctcctcctgcccttcctcatgaaccccagtcgcgcctctgccttctcatccctgcgcaccacacaggctcgctcgtgcccggtgagtgctgaggctgctctgcacgtggagtatggccctgtgggcaagggctgggctcttggaggtaggggagctacaggggcgactgggaggaggatgttgtgttacacacgcatcagagttaactttgcagtgagagcggccttgctgcggccaaagaacatggaaaagcatgagtggggtgatgtgccttaaagcatcagacacttgggcctcgggcatcaggagccagccac

SEQ ID NO: 41406 - DNA, 2300 bp, Homo sapien
ggggctgcaggcttggagggaggcctcagtgtggcttggaacgtggtgtatggtggtctgccgcgaaggccggcctgcacaggggtgggaggggggtgcttctgcatgggaagcacagacagcgctgcctctcccttgcactcagctcttggggcatgagaggctgactttccgtgagcctgtgggccaggcctctttgaatggggctgagggagctttgccctggttcctttgtgtccccacggtgccacgggaggctccctggcagggtgtggggcaaggcagtgagtgaagagttgggatgagtgagttagggcccacggattactcaagacaggacttcaagttgattcaggcgtgttagggagctgtgattggattttgagcagggcagggatgggacagaagagtttggggaaggttcctcaggcatccgtcacggaagggacaagaagggagagagagtggatgccagggacacccagaagctgttattgtagtcaggatacgacaggggtgaggctacagacaggggacttgcaagcagggagggcagggtgagacattcagaggaaacgacgacaggaaatggtgacagatagggaacgaggatgaagggaagggagagccagtgacgactggcagtggagtggggagcaccgccacctctcctcctccacttgcccctcctgtggcactggacaagctagtgggcttttcgttgtccatgggctttttcggtggggatgtgaccagctttgaacccgtccccttaaacatgctcctcctgcacggaagagacaggggcaggggagagactctctccccaccacccagctcaggccccagcacagcccggcctctggcctcactggcgtctgtgcccagtgacgcaggcaggtgagctcctggcaaattagcattgcaggctgtgctctctcctcctgctctgctgcagctgggagtgtgcagagactggaggggatgacagtcaccctctgttttctgtggtggctctgttttctgtggtgctggatgcacctctgttttctgtggtggctccaagagagtgcacggtccctgctgattgaaagaaggatgaagggcagaagaggggcggggagctgtgtgccctaagatctcattgcctttttatgccgattaacatgcttttagcccctactgagcttatagttaacagaagtttccaggtctttcttcacctgaactgtgtctaaagcaagttctctccaccttctgtatttatacgcttgatttttaaaacctaaatgttgggcttcacatttcttccttgtaaatttcatcttggtgattgcagtctaccctctggcctttaaaaattgtctgagccttgattcgatcatgaaaccagcttacccttcccctgtgtgctggccccagttttctaaccaggtgttgaatgaactggatggactctgccagatccctccgtgcaaggctggaatcagtccattgttcaactgtgccctttggggctgtggttcatttggctctgatttttcctatatgttctctcctccaacccccatagctccatcttgtctacaagattttgttagaagccgtcaaaatcctgctgactcgagatgcgctgtggtgcatgttttccccgggcacagcaggctaataatcctgttacaaagagaaatgctgtacatttcgagcagtgctggcccctgggactcaccgtggccttttctaagtgcttacagactctctgtttaataatccattccagaaattttccagggctcattgttgagcttggtgttcgcaactttgagtgatcagcccttctcctttgtgggagcaccaggacagagcagcctttgtccctccccagtctcagttccctcccactgcccctgtggacctcgaatgcagagcttatgcacctaccgaaggtcgtgtcagcacccaaggcagaacgaggctgccctgggaactagggtcaattaagacagcttgtgctggaggaccctttacagcagatgaaggcctctccccagccagaaaagatggagcacacgctgggtggtggccccgcttcctcactggaaggagatggtgctcttcttttttctttctgaattgtggccaccttcataccagtctgtcatggaacacttaagccgcttgagtgcctgctggtactcccagccctgccatgcctgagccccctgcacacaaggagccaggagtaatcagggcagaccctttagggcacggggacttctggattgtgaaattggctctct

SEQ ID NO: 41407 - DNA, 2300 bp, Homo sapien
gttcaagtgattctccttcctcagcctcccgagtagcggggattacaggcctgcaccaccacgcctggctaattttgtatttttagtagagatggagtttcaccatgttggtcagactggtctcgaactcccgacctcaggtgatctgcctgccttcgcctcccaaagtgctgggattacaggcgtgagccgctgcgcccggccgagaggcacacattctgctaagagctttttcctgactcccctaactccaagagggatttgtcactccttagctttgtacccatgactggagtagaatgaatttaatttgagtttagttgtttttgagactctccctggctagtgtagtgtcttattcgtctttgttgtgatcatggcctgcacctaacagatgatcagtagatgtttgcagacagaaagtaaaccactcatcaggtgtattcagtcccattcttgaacgggcttgctgcctcctttttgaggagatctgtgtatgtactcttctttcacgcatatgtgtgagcaaacacacacacactaacaagaaattcatctgaagatgtgcacaggaaatatcttgcatctttaccccctttgtgatcttacatatgggagaactgaggcacagaaataagttaggacagccagcaaacttgcatcagtataaatacaaagaaggggagggaggaacatgcttgaaaggggtgtgctggtctcagagggttgggtttctcagttggctgggcatcagctggccatgctttagttatttgatgggaggaaaaataagtgggaggtgaggagtaactcctgggctctgatgagtattcaaggcaagtacagatctggaaagcctgtatgcaaaggaggaactcactgaaaagtgctggcctgaggagggcagaagggagggctggggaagccagcagcgggagcaaaggagtaggctccaactgggtgaagatgttggtgtggtgcgttatgtaaaatatacaaattattattggaaataaccacgtctcagcagtgctagttctcagtttggagaatgggaaatcgaaaggatcagattcagagacggcaacttactcaaggtcacagcattttaaacccaagtgaaatctcctaggcccttcatgccacactcatccatccatacctacttgtgttgcaaccaagggccccactgtagtgcctaggggagcaggtctagggcacagtgccaggcctgattaatgtcttccttaccattttccagtgaggggctgtgattaggcctatttataggggcctggtcccttaatattctgcctggtgcatctcttgccaatcaaatcagtgctgtctgcagtgtgattgctgctttagtggcaccagggagaggagttaattaaacccaatataaatagactctgccctcactttgcaattccaggagtgtttttccttcctgtcctccacccccacaggcacctctttcctcttgtccccctaagctctagcctgggtgagcagggctggatactcctatacctagagtcactagccactgcccagtctgtttcaggagcaggcctcagattcctcaggggttaaagtgggaagaacccgtgtgtgcacattttttgtgcttttccagaactgtgtaccatttggcagttgatcaggcaatctcccctgctaccccatttctacccctttgtttccagcctcttttttcctctgcaaccaaggtttcttgtttatccaaggtggggagctgaactgagacaaggtatggaaagggtgcctggcaggtagcaagcaccttgtagggggtcagaaatgttgcaccttctctgaactcctccattgaccctacagattccccagtcccgggccctgccctttccctcattcactcagcaggcatcagcagagtcccatctatgcgctcctggcctctcagcaaatgctctgtcccctactcccctatctgtgcaggctgaagctatgtgcatagttgggatgagggctgtgttgtctcaacaccacgctgccctgtggtgggggcgtgccgttggtcgtgggtggctctgacgctccggctccgacccacaggcaccatgactcctgtgaggatgcagcactccctggcaggtcagacctatgccgtgcccttcatccagccagacctgcggcgagaggaggccgtccagcagatggcggatgccctgcagtacctgcagaaggtctctggagacatcttcagcaggtgggtgctgccactcacccccacctgatgagagggccatccc

SEQ ID NO: 41408 - DNA, 2300 bp, Homo sapien
gctgaggtccaggattcccattgcagctcctaggaaatctttaaaattaggtcggggatgagcctgtcagtagattaggtagggaacttttatgaagttgagggtgaaccatctggagggtgaactggctggtgtgattctagaactgggggtggtgcctagcagtgcatttgtgagaagacacagccaggcttggtatatgatgtggtgtgtgtgtatattcacaggcatcgtggagcatatacactttttttgtgtgtgttgaaataaaccttacagattacaaagtacttttttttttttttctgagacagggtctctctctgtcgcccagcctggagtgcagtggtacaatcatagctcactgcagcctcgatctcccaagctcaagtgatcctcccgcctcagcctcccatgtagctgggactacaggtgtgtgacaccatgactggctattttattttatttttgtagagatggaatctcacaatattgcccaggctgatctcaaactcttgggctcaagcagtcctctcgcgtcagcctaccaaagtgctaggattacaggcatgagccaccacgcccagccagattacaaaatactttgacatcttttctctacagccctcaaaaggaggcagggcaagcacaattaaatcccattacaaatggggtgactgaagctccattcatggcttgcccagggtcacacaaagaatgaatagcagatccctgagcctgtgtgcttccctctgtgccaggctgctttacccaggcatgggtgcacgttgtgcatgggacatttctcctttgttgtgtcctgagtaccttaagccactcagatattgctcaggtggagtgaggggaaaatgttttcaggttgtattagtcaaaacaaaataccacacactgggcgactttaaaatcatacatttatccctcacagttctggaggcttggaagtccaagttcaaggtggcagctggacaggttcctggtgagggctctcttcctggtttgcagacagccaccttctcttcgcatcctcacttggtgggaaaagacagaggagagaaagagagagagagaaaaatgagatagagagagagagagaaatgagatagagagaaatgagagagagagagagagagagagagagagggagacacagagacaatgctctcttttcttaccagatctataatgagggccccaccccatgacctcatctaaccgtaattacctaccaaaggcccatctccacataccatcacattaggggttagggtttcaacataagcatttggagaggacataaacattctgtctacaacatgagtggagatccatctcttctttacctctggtaaggggaccacacgctgcagccagcgagacagtggcatgttcttgttacaactcgatctaactcccccagaagaggaggcagggaaggcggacaaaactgggagagggagagagtgttaggaagagagtagggtggccagaggcagcaaataaaatataaaatgcttaattctgaatctcagataaacaaccaataatgttttttagcataagtatgtcccaaactaagcttgggacatatttatgctacgaaattattcgttgtttatctaaaattcaaactagctgggcatcctgtcttttaatctggcaaccctaaaaggcaagggccaaaaatgccggaggcaagccaacggattccaggagggacaactgctggactttggactgatgatgctctttttatatatttaactttttaaaaaagcctcttttctttctttttaccagcttttcactagctttttaaaaattgtggtaaaacatacataacctaaaattcaccgtctaaaccatttttcagcatacagttcagtgggattaagtagattcacaccgttgtgccgccatcactaccactcatttccagcacccttccatcaccccagcctgaaactctacccattgaacacgagctgcccaactccgccttgcttccccattcctggcgaccactgcttctgtctctgtgaattttgactattctaggcacttcacaaaactggactcatacgatatctgtagttttgcgtctggcttctctattgaattcttaaaggggggtgggaactaagcagatcacaagggagctgcccacagaggtaaagacaaggtcaggtaggctgagagacgcaggaaagcgggtcaaggcgtagggctggagggcaggggcgggccctgggcgtgggctgggggtcctgccccggggcgca

SEQ ID NO: 41409 - DNA, 2300 bp, Homo sapien
ctgaggagccacatgatctgacatggttaaggatgcctctggcttccctgttgagaatagactgaaggggcaaaaatggaagcagaagagcagttaggaggctcctgtcaaacccacgtggaaggcaggctctgggctgtgttactggactaacactaacaccgtccccttgcacttctgaggggtccctggaacttccccaggggatgagactcctggctagcaggactcagcccctccccttcaactttactcaggacctggtctcccctccttaaggtctctggagcccaacgcacacttcagcccactctcacaggcattctctctgtccacaaaatatcaacgaagagtcttctgtgagtgcagcatggtgtgaacactgggagtacaaggagaaataagacacagttgctgtgctggagaagcttgtgcccagtggtggtgatactgccggaggtgagaccactatgccagcacaggaacaaagacggcaggggcacagggcaattcaggggtgcagatctgggggcatccaagaggctcctaagcctcagtatataaactgacaggtcacagcctgctctaggaaacaccttcttaagggttggagttatctctgtgcatcccatccccaccccaccaagccgcccttggccctgccctcaggagcctctgcttggccttgctaattcctctcttctccctgaagctagagtgaggtccctcttggcagcctttgtatctagagagagccgtccaatagaaacataaggtgagcaacatgcttaattttaaaatttctagtagctacattaaacatttttaagtgaaattaactttaataataaatttatttaacccaatatatccaaaagattatcatttcaacatgcaatcctattttaaaaataactagtgaggtacctgacaaaaaaaaaatcccttttcatactaagtccagaagatctttgtgtattttatactcataggacatctgagtttggatgttacctttttattggaaatatgggatctgcacttagatttcactgaatttacattgaaaaggtaggttcacatacccaagttgtctcacacatacctaaatgttttctggtaactgggtggagtatcagtttttatatttatctttgccttagctaaaaaacaaattaatagtgcaggtcctcagccgcacgcaggcagttttctccacggtccaaatggttgcccgaattcacccagaccccgctgtcgtccgctttttcatgcagacattcaaacaactgcctcccttcctcctggcacccccaccccatcgccagcagcctccgaaccagtttccctcctgtcctcatctcagccacccatgactcacacacacatctggctcccctggcccacttttcacctggtcctcataatctatgcataaacattaacataccacagaatcaatctgcatactgattacttctgctctggtcaaattcttgctttcaggatcaggaggctttctccccacaccaaactgggcctgaggaaatagtgtcttgtcttcctgtcacccctcccgtagttgcatgtctaatgagacaaggggtgtctcaggtgaagcaggacagggaggatgccagcacttgggtgggagaggcttgaggagtgcctgttgggggatgtgttggggaaggatgacttttcacatatggctcattgtgtcgggatgatttcgttgttaaataagcacctacaggatgatttcacattccatacttctaagtttttataatttaaattctttccgccaggctgggtttttttttttttccaaactttaaatctgtggctagaattggtttgatttacataatcctgcccctgagatttagccccacccctgagagccccctcagagccacccacagccaggacacctctgctggcctccccttccccagccttccaacttgtggcaggcccctggctctggcctccccctatatgggaatgagccagctgcaccgctgctgacagtggctgggataatcctccctgagctgttccaaggattagtcctgctgccctgtgcccagctcccacacaacggggtttcggggctgtggaccctgtgccaggaaaggaagggcgcagctcctgcaatgcggagcagccagggcagtgggcaccaggctttagcctccctttctcaccctacagagggcaggcccttcagctccattctcctccaaggctgcagagggggcaggaattgggggtgacaggagagctgtaaggtc

SEQ ID NO: 41410 - DNA, 2300 bp, Homo sapien
atctggggaggtcaaggctacagtgagccaagactgtgccattgcactccagcctgggcaacaaagtgagaccctgtctcaaaaaaaaaaaatgaaatttaatttaaaaaaagaaaattgctttgtaaaattaactttttcaatcaaaaccaagatttttcagatatagagaatgcagcccactggtcagatttgtcagttcaaagagaataaattctagtttcctatttttctagcctgcttatgattatccaataggatatcaaaaaagaccaaagcctttgggatccaagttcagtattcctgagtctaactcaggatgccaaatcaggagacaagcacattctcatcaattttcaatcattcgagaccaattttgcttataattatccagttcttttagaccacctttctcctgaagccagccttatggctattcacttcactttagcataagcccccaagaaggtgaacaaaatgaggaaaagattggttaaagttggctgtttgaaattctgaaacatgtccaccattcccttcacccatgcccacccctcttagaagtagtactttcagattatttaagagtcgatgcttctatgtggattttaatttgtcatctgtcctttataacagctagtaggtttaatttgactctattttaagcatatattgacctatgctaattatctgttaaaataaattccactcttagagttaataaagtgtgtttgtcatggaagacccattgaagtaagaagctgaggagcccttatggtaaagtgggacaagaaataataagacataataattttcccatgcaaatcaacaaccgtagcttcaaaaatatcctgacccacaacaagtattggacaggccatgtttctctcactccctaaaaaattggctcgggaaggagtatgagagctcccatagctttcccaaggctcattattctccatcactccacaggaacagcctgtcagagaagagtgaaagaccatttgtcaacctctcttcaactccctgattctagccaaacttcatcaatcccaactgaggagccagagagaaatcaaaccccatatatccagcatcattgtctactggagtcaaaaatcacaattccactacccaccccaacaccactggccctgtttctcccaattgctttttattgtgtttttaaaaaatcctctttccccatccctgcaacaccgagaaggaggaattatagtagataaatatgaagcatggagatcctttaaaaatgtttttaataataaatgagaaaatgaaaaggagagggttgggaaggaaggagggaattcaaatgccagggaattgttcagtttcgcttttaaagatgttaacactcatttatacatctgcaagacactccccttaaagaaaagttctatgagtgtgggtctggttgcatgaataaggataaaattacttttttagacgatgtttcccacatacaattcagagacccctgaaattaggtatccctcttgtagatgtccttgagatgctgctggacctgggaaagaggaaactgggatatgggtctatgccaaaaggtgcttctagttataggacagagaggaaaggggcagagggagaaaaacccgaagtctgagaatctggattgcagaagactaccgaggtcgtgggagaagggagagaaaacaaggatgaaaaccgaaaggggaagaggcatgaaatgttgccaaatgtcaaaaggcatttggagagaagttgggaattgcattaagaaaaccactgcaaatctcatttcagaccatttagagatatgccccctgggaactgcgagctcaggctgtttagcatcaaacaaatggatccactccatccctaccctaattaaataaatcattcagtaattccactgggttaaagaaccaaaatattaaaaaccttcagggcctactcttgccaaatatgtcagggatcgtgtgtgtgtgtgtgtgtgtgtgtgtgtgtgtgtgtgtgtgtgtgtgtgttctgagacaccactactgttaaataggcagagctaagacttaggggactggcagattattgcaaaagggcacggggcagagggactatgttgtgagcctgcgaaagaagtttgtgtggggactgtgggcagtgaacgcgttgggaacaatatggaaaactgggagccgccttggaatctacagggccgggtaagagaatgtccgaaagaaaaatgagcaggtgcgggatgtggcagagtcggagaagagtccagggcgcccggagtggct

SEQ ID NO: 41411 - DNA, 2300 bp, Homo sapien
tattatttctcctaataccgcagggggtgtacacctacctgtgatattgttcctaatatccagggatggagagcatgatattagttttaatatctcagtaggtgtacactcaccctgtgacactgatcctaatagccagggagtagagtatgacatgactcccaacatagcaatgaatgtacagccacccggtgatattgctcctaatattcatggaagaagcgtaggatattacttccaaaatcgcagggagtgtacacctcttctgtgatattgttcctggtatcccgagggggagaggatgataataatcccagtatcgcaggctgtgatcacccaccctgtgatattgttattaacatcctgaaagggagaggatgatattactccccgtaatagatagatattactccccataacagagcaggaggtgtacacccaccctgtgatattgttcctaatattcagaggccgagaggtcgatattactcccaatatcgcagaaagtgtacccccccagggatattgttctcatgatcctggagggaagaggatgatgtcactttaaatatcacagaaggtgtgcacgcccccactgatatcggttctaatttccacgtgggagaggaggaggtgacgcccaatcacacctgcagtagaaacacagctgtgatgctgttgttaatattcagggaggaagacgatgatattactcccaaaacagacggctgtacaccctctgcacaccgagggtgtacccccatctgtgaaatagtttataatttccagagggggagatgatatcactccgaataccgtaaacaggctgtgagtccaccgcggatcctaaaaaccagggagggaagaggggctggcacgcactccccgcatcaaggggggtgtctcacccccttgcgatgggggtcctaagagccaggggggaagaggggctggctctctttgtggatgattctttttccattctcaggcagttttcttttttctttctttttttttttggagactgagtcttgctctgttgcccatgctttgctggatctcgggtgactgcaaccactgcctcccaggttcaagagattctcctgcctcagcctcctgagtagctgggactctagaggcgtgtgtcaccacacccagctaagttttgtatttttagtagagatggggtttcaccatgtttgccaggatggtctctatctcctgaccttgtgatccacccacctcagcctcccaaagtgctgggattgcaggtgcgagccaccgggtccagcctctcaggcgattttcatacctgcatactctgatcactacgctgttaaacagtcaaggagggtaagtattatcttcagatttccagagctctgtctctgtacagccctctcctcctcaatattctgccctatgaattctagccacattggccttcccagactcacagttctgtcttctcaactcaggaagatctctgagctccatctgcattctttcttcctgtgctgtggcttggaaagttttctaaggtgtttgggaggtcaattgtggggctagcctcatttgtttctcatctcttgaggatcactgccctttgatgcttgattccagtgattgattccctttgttgcttgagggccatagtttcatatattttgtccagtatttttgttgttttaggtcagaaagtaattttggtctctgttactccatcttggccagaagtgtaagacctaagcatttacacatcaaaatactgcacacataattttagtttaagctacttttaaaaaaatctgcttcattttccattaagcattctatttagggtattacattgttttttttgaaattctgttattggcagtttctattgcctatcaatcccatttaaagatagtgcatagggtattctaaaatagctgttaagcaaagagaaaattgggcctgatagggtgagaatcacagctctaatacctagagtgaccttataatgtattgtccaaaggagatatttttgacagtgaaagagggtgttgttagtaattatatcaggaccatggcctaaaccaggactatcccaggcagcctgggacatatttgtaccccatctctatttaatgcctttatacaattcttaattctaccagcctttattgagcctgctttctttgtctagctgagtgccacgtgctgacatcactaagatcaatacagcaaactctgaaagatggacggagagacaggagatggtcctttataatgcagtgtgatctgtgctgcaatag

SEQ ID NO: 41412 - DNA, 2300 bp, Homo sapien
ggaggaaatttgcctcacatgctgggggcgctgggattttgtggttgaataagacacctggcctggccctcctggagcttagtttagtaggtcacacaagcagtcattggtaaatttgggattcaaacaaatctgttaggctcaaacctgtctgttatttgtcctccaagcttcatataaactgaggagccttaaagggtaaaaacttcaggagcagcaaagtttcaaaaaaagatcagcaagaaagcccttttccagattttatcctgaaggcactagctactttaagctattttttattatattttgcccttgcagttggcgtttgatttctcactgaacattcattgtcataattatagacactatgtgactatcaagggcataatattctttcatgctgcatttttattagatggcacctcaaagttttcccaagtaggtgggttttaaattatgaatatataccgtggcatagtatcttacttagtattttaataagatccttatttatataacaaatattttttttattcctctgtagtgctactttagtctctgagctaattttcatgaagccaatctaaaaatcgtgttacttctaaggatgtggagcgagtgagatgaacagttgtgctgtcatattgcccctccccagtgcagacagtgaatgaggacccactgatttaaaggcaacactgcagccccttcttgcctcattgaagtcccaagttttattacagtaaaagcacttaatgttgacatttctgaaagaatgaagaggccgggcgtggtggctcacgccggtaatcccagcactttgggaggctgaggcgggcggatcatgaggtcaggacatcgagaccatcctggctaacacggtgaaaccccgtctctactaaaaatacaaaaaattagccgggtgcggtggcgggcgcctgtggtcccagctacttgggaggctgaggcaggagaatggcgtgaacccgggaggcggagcttgcagggagccgagatcccgccactgcactccagcctgggcgacagagcgagactccgcctcaaaaaaaaaaaaaaaaaaaggaaaaaaagaatgaagagccagagccaggcatagtggcacgcctgtagtcccacctactcaggaggctgaggcgggaggatcacttgagcccaggaattcaaagccagcctgcgcaacatagaccctgtctctaaaaatgaattggttataaaggatgaagaaaggaaggaggaaagggagagagagaagcccttatagagtgggtgcatttcttgtatgtggggccactttgtaagaacaggatttttcaaactgggcccatactggtatgtgtgaaatcaatttagttggttatggccatttttttttaaaaggaaatatcagtgatcactatagtgtaagtatattgtttcgtgaaagccatcttagttatgtattatgtctgtatgtgtaagattgtgatataaaatgtatttctgtggttaaatattcaaagaaattggagaaccattgctacaaggggacagaggactccgtgtgagctctcctgccttccctgaataaacttacacaatttagtgctgggacatttgaaccttttctgaaaatttgagtcagggagagcatcttggggaggtgggaaggaaggtagaaggagcaaagcaacacccccctgaagcctgggaatattgtcagaaccttaaatataattcagctcaccattctgggtaaggacagactctaccaatgaaaatgggtgattaccagctgtgaaacacaaaaacatactttcacggttacacattcctttacaaacaaccgtgtacatttcagcctcctaccccaccatttcttttctccaggcgggaaggctgcatgtcgaggtggtcgtagaatgttgagtatcctactttcctacctcgcttttatttgcgcgggtttaaatgcgccttaacagaacccgtgcaaaggcttgcctactgtctggctgcaccggatgagtagagcatcttccttggtggcaggtgggtgcgaggaggagggcgctgggcttttctccggacggtgtttgcccagaagaccatcatccctggactacgttaggaggaagtggcaccgctccgaggtaggggaagaagggttataaagggaggcgtccaccacacatggtcttgaagaagcttttataaaaggcgaaggcatctttgccggacgttgttgcaaaggcgtagaaacaagcagaggaaaacatcccaaagggtaaccactagcgttc

SEQ ID NO: 41413 - DNA, 2300 bp, Homo sapien
agccctaagcataaatttggtttgttcatttaaaaatggtctttttttcccatcttagttctggctttactagggagatagattggctgaggttgtcacctaattctgggaggttaagagcctttgtcttttgctacccatttctgaaataaccagaagtctagcccatcctaacttttctctcgatgatccttttcttctttttacttcaaggttccagctcttcatttgactatcagtgctgtttcactagttagccatgatccctttcatccgccgtgtctggattagaactgtatttttaatttgatgctgtgggcagttttgatagttacagatcctgtgatacatttaaatgtgtttacaaggggaacaaatgaaacaatgctgcatgaaatttgcctttctttttttttttttttccccttggagacagggtctgggtctattgcccaggctagagtgcagtggtgcgatgtcagctccctatagcctctgtgtcctgggcttaagccgtcttcccacctcagactcatgagtagctgggactataggcacgcactaccatgcctggctaattttttattttggtagaagatgaggttttgccatgttgccgaagctgatcttaaactcctgggcttaagtgatctgcccacctcagcctcccaaagtaatgggattataggcgtgagccaccacacttggccttttctttttttcatatttatttaattattttattttattgagacagagtctcactctgacacctgggctggaatgcagtggctatcatggctctctgcagtcgtgaactcctggactcaagtgatcctcccatctcagcctcctgagtagctgggactacaggcttgcacccatgcctggctaattttttatttttacttttttgtagtgacaggctctcgctacgttgctcaggctcgtcttgaactcctggcctcaagtgattctcctacttggcctcttaaagtgctgggattataagcctgagccactgaacccagcaaaatttgcctttcttaaactaatttatctctgttgggtccaagagcttacaagttggttgtcatttaatatgttaaacactagaatattttttagttgaaattttattttttccctttacatgttgtatcctttagtgctttatttcactaataagaattatagtatgcaatcatttcccacctctatattcagtatatcaatttttgtttttcctttctacttctgtcttttgctataatttgctgtaatacaggtactttcatcaaggcatccagttctttatatcattctatatttttacttgggagaaatagaaatgttgctaattccatcttactgacaatacctaaattattgtttgttatagaacataatgatttaaatatacaaaacactaaactgtttgagattttttacattttatgcgtgcagaatttacattttatgtgtgcagagacaaaaattgttataagattacaagttaatgtgcaagatgatttccgattcatgagtttcaggttttgatagcatatccttatccactagattagtcttttaaaaatgtgtatgatagggaaaaaatcgagggcatgaaattctgagacttgtgggaactaaacttaaatgttcgttgttagatttttttttttttttgctgcgtatgaagttctaggcagtcattgtccaacaacattaaatactgaacatatgggaaaagcatatgatttttcgaaatgtttttctaaagtaatctcattctacatacacttaagagcagttataatgctttagtgacacttgaagtagctatttaatgtgatctcaccactatagggaaggccgttgcatgacttttttgtgtgtgcttaactgctaaacaggagaatcttttcctgagcaaccagctgggaaggatttaatttgacattctccctactaggaccccccaaagagactcattccctccaatagttcctacaagttctttctctttcctaaacttgctgttactaatttacccctcactgttttcaaggcaaagcatctgcaaggttttcagtcctttccccctcccgtcctgtccccatcagtgttgaaatgtatgctacagttattatggttgtaatttgttatgccatgttgatcttcttgtgcttttcatatcagaacaatgcatttttaacattctgactttctttttctctcaattggtaactgactatatagcaaatttatatttatggatactatttcttttttaataa

SEQ ID NO: 41414 - DNA, 2300 bp, Homo sapien
cttgccacgatgttgatgggtgctgaccaatcagggtagtagttactgaaggttggggtggctatcgcaatttcataagataataatgaagtttgctgcattagttgactctccctttcataaaagatgtctctatagcacatgatgctatttgatagcattttacccacagtatgacttctttcaaaattggagtcagtcctctcaaaccctgctttatcaattaagcttctgtcatattttaaatcctttgttgtcattttgacagtgttcatagcatcttcaccaggagtagattccatctcaagaaaccacgttcttttcccgtccataagaaacaacttctcattagttaaagttttcttatgagattgcaggaattgagtcacatcttcagactccccttctaattctagttctcttactgtttccaccacatcggcagttatttcctccattgaagtctggaatccctcaaagtcatctgtgagggctggaatcatctttcaaactcctattcatgttgatactttgatctcccatgaatcacaaatgttcttaatggcatctagaatgatgaatcctttccagaaggttttcaatttactttgcccagatccatcagaggaatcactgtctatggtagctatagccttatgaaatatatttcttaaataagacttaaaagtcaaagttactccttgatcagtgggctgcagaatggatgttgtgttagcaggcatgaaaacaacattaatcttgtacatctccatcacagctcttgggtgatcaggtgcgttgtcaatgagcaataatattttgaaggaatcttttcttttctaagcagtagatctcaatggtgggcttaaactaaaccgtgctgtaaacagatgtgctgtcatctaggctttattatttatagaaaacaggcagaggagatttagcataattcttaatggccctagaatttttaggatagtaaatgattattggcttcaacttgaagtcaccagctgctttagcctctaacaagagagtcagcctgtcctttgaatctttgaagccaggcattgacttctctatagctatgaaagtcctaaatggcatcttcttccaaaaggaggccatttcatctccattaaaaatctgttgctggccgggctcggtggctcatgcctgtaatctcagcactttgggaggccgaggtgggcagttcacgagttcaggagttcaagaccagcctggccaacatagtgaaaccccatctcagctaaaaataccaaaaattagcctggcttggtggtgggagcctgtaatcccagttacttgggaggctgaggtaggagaatggcttgaacccgggagacggaggtggcagtgagctgagattgcacattgcactccagcctgggtgacagagcgagactccatctcaaaataaataaataaataaataaaaaataagtctgttgcttagtgtagctactttcatgaatgatgttagctacatcttctaggtagtttactacagcttctatatcagcatttgctgctttcccttgcacttttatgttatggagatggcttctttctttaaatcttgtgaaccaacctctgctaccttccaacttttcttctctagcttcctcacctctctcagccttcatagaactgaagagagttagggttgctctgaattaggctttggcttaagggaacattgtggcttgtttgatcatctatccagaccacttcatatcagcaataaggctgttttattatcatttgtgtgtttactggagtagcacttttaatttccttcaagaacttttcctttgcattcacaacttagctaactggctcaagagacctagcttttggcgtatcttggctttcaacataacttcctcactaagcataatcatttctagctcttgatttaaagtgagaaacaggtgactgttcctttcacttgaacacttacaggccattgtaggatattaattggcctagtttcatgttgatcatattctttatgttgtcatggttctgtcataattcttttagttctatgttttaatagttttggtgcttattaccagtactgttgcttctccattcccgagttagtccatctcctgattgaatttcattgtcaggcagtcttttcaagttacaggtactgcatgcattctttgggttcttatacacttcattgattcaaaatatttgtcttttgtttttatattacttgaaggattacttggctaggtataaaatttatcagtcacactttattc

SEQ ID NO: 41415 - DNA, 2300 bp, Homo sapien
atccatgctgggcgacagagtgagaccctgtctcaaaaaacagaaagagggattttagtataacattcagccagtgccatattgggaacccacaagaatgtactttaaaaaatatgtcaaagaaggtggtgagggctgtaatagctgctattcaggcagtaatgcagtgctgaagggacatcaagcaaatagtgtgatgcctgtgggtgcaatgttactccttcccttaggttgccaaaaaaatcaatacttcatagcattcctgaaacgaaaaagcttatgaaccattgtgtttagggtgtaagctatctattttgggctacccatcacagcttctctcctttggtagaataaagtgaactgaaccaccacgcctaaggtatttgccttatttcttcctcagctggttcatggttacattgtcaaagctggcaaagcattcaagacctgatttctcagaccgagtgtatgtgtgaatataatatactcatttgcacaaatataaaccctctgtcttaactgtgttctgcaaaaggcgtgataaatactttcaagttatatgtccttatcagtagaactaatggaatacacacagtatattttatggggaatttcagagaaggaaggaaaagtcaaccttttatttggcatcaggatagtagtaaaacattctacttgtgcatcagatagatttttatgacctaacctggacaagtaacttaactcttggtgcctcatgtttgaaagagggataacactctacagggtcattctaagaattaaatattgccaaaacacatgaaaagattctcaaccttgttagtaatcaaggaaatgcaaatgaagatcacaatgaagtcttcttttgtacacaattgattggtgaaaaatgcatgcctgataatattgacctacagaccaatgagatctcttataatttgctgggaaaatgtatcaatttgtacaaacattttgaaaaataattgtgcattttcttgtgaagtaaaacatttgaataatctaggacccagcaattcaactcttacacagacactcaagaggaagttgcacacacatatatcaggaaaaatgttcatagcagccctgttcataagagcaaaacctggaacaattgagaggaaatgaataaattgccgtgtagccacacaatagaatacaagacagcagtgatgctgaaaagtatagcaagcctcaggagtttatatattatatggataattttatgaagctcaaaaacacccaaaattaaacaacatattctctaagtacgtacgtgggatatgtgataaaattaaaaagaaaacagggaatgatcagcaatccagaaccaattcatgactgttgttactatcttatggggcaggctgtggattggaagcaggggcggtgcacataggtacgtgtaacttactggtaatgcttttacgttaggaatgacgtcaaaggagttcactataaatttatattagaaagaagggctatctatggattagtgatgagagtgtcatgcaccagcaaatatgattaatgaacttaggttacctgaggtccaaataaataatgagaaaaaagtaaataaaagtgatgcatgaatactaaaaatttggaattacatatataatatgtaataataaaaaaagaaaaaagtgtcactggttatccttcaggtataaaaattacaattaaaattataatgttataaccttccattctttcccctatgaattaaaacttttttttttaacgagactaaaaaatcaaggtgataaaatctatgccctgtgggaactggttaggtcaggctacccactccagatttccagcagactggcctcagctctacctacagccagtagcttattaaggctctaggcgccagtgacaccttcagacaggtggttagtgcgccctagggactctccgcagcgtcgctcaggttcacagaacacgcccaggggcgtgtccagctgtcgtcggggagagcccacctccccggggggtgtggctaaggggcgaggcgcttctcgtccagagcccaggtaatccgggcgggatcagcgagcgtcgcgatgtgatgacgtcaggccccgggcaggccgggagtggcgtgctgggcgtgcgcggctgcggtacggcgtgttggtcccagcggttcagctgaggtagggacgtgctgtaggccggaatgttaccggctgttggatctgcggatgaggaggaggatcctgcggaggaggattgtcctgaattggttcccattgagacgacgcaaagcgagg

SEQ ID NO: 41416 - DNA, 2300 bp, Homo sapien
ccttgtgcagctgtatctccaagattccttttcctcttctgtacaagacttcatgagtttgataggctttttgtgagaatttaatcataaaatccattaactgtataatatagtgtctgggacacaataagtaaacaataaatggtgaaattaaatgatatatgaatactaggtatgtccttattaatctgctcctttgaataataatttctgccaagctccttagcataactctcccacacaacacacagagtgcttcaaaaaggaaaacagaactctaagaatacgaatttccaatccattttcttgcctgaggattatagaaccttttatactttattaaacttgagggggctcttcttgatcagatttcatcacatattttcttccattgaatgtgttttgggttctcagcaccagatggaaggcacaggcggagaaacactggccccaagaaagctcccagccagccactggcatctccatacctaacccaaactgatctctgcctgaagctctccaacttcagctttccttcctacctttctatcttaggctctcaaagatggtgatgatggagataatgacagcagtgaagctgattgtaatgttaatgatggcaactaagaattattcaccatttattctgagccagacactacaagcaacatgcaatcaacatgaaaatcattaacaagacattttgcattattttttctgtactgtctctaaattccaatgtgtatgttacacatccagcacttggcaattcggactttgtacctattattcatttaatcctccccacagtcataagaagtaggtactatgatcaactctacttggcacataaagaaaccaaagcttagagaagttaagtaacatgtccaatgttgcacagtgactttgtagcagagagccaatttgcaagcagatcagacactaaccagggcctttattcttaacccccaggtgacaccgaccccgcagttgcttgcaagactgcctgtaggattagtccgggtctcggccactcaccccagatcaaccctgcccaaccccatagtttctaacatctttctgccccagtcacacttcctgatctaaaattcacaaagacagaggatcaggagctatagcaaataatacacccatcagtaacttcagtttgattccctatactccttgaatgaattacccctcctggcatgcaacagctatgaaccttaatgtagaaaaaaattcccatagggagatccctgatatacttcatgccttgtttttgcttttttttttttttttttgtctgttttttgagacaaggtttcactctctcacccaggctggaatgcagtggcatgatcacagctgtgatcctcctgggctcaagcgatgctcttgtctcagcctcttgaatagctggggctacaggtgcatgcaaccacacctggctaatgttttaaaattatttttttgtagccacaggggtcccactatgttgcccaggctggtctcaaactctgggctcaagtaatcctcccatctgggcctcccaaattgctgggattagaggtgtgagccatggcacccagcctctttatgccttttgactagtaccttttggcctccaacattaatatgcaatatacataaataattaaactcattttacagatgacgaaatagtaaggtaagagaaacagtttgctggcagtcacgtatcaagtggaaataaaatcgtcaataaagctcgatatgccctctagaagaccttatcgccttgtttttctaggcttttaattccttgttcaaacctcttcacacactaacagcacaaagatgaacctacggtggaatccacctttcacaggctcagctaagtgaagattaacaaatcggacagccctgtgggcaatagaataagttgacactttagaatgagtttcctattatcttttaactagacagtctagctttctcagggcaagacaaaaatgtcccaattacttgtcagcagtttttagtggaggaaaaactgcagttaaagcacctttactgagaactttgagcagtaaatgtgcttacatatttagtttgtgcaactttgattaggaattggatggtgagttgggatcccccagtccttagctttttgctggagttctgtaaatctcaaaatgtcagccacaggccatttcttttggtttatttaagtgtagattttttaaaaaatcactttttccacttcatggctcctttggaccagggtataaaaatagcgatgccaccaggagccaagc

SEQ ID NO: 41417 - DNA, 2300 bp, Homo sapien
gggtatcactggccagcagtcacatgccagcaggtgtgagtagacagtggggaacaatttcctctcatgtgtatggctccctaaagtgttggctgagcattgtccacatgggtgatgcaaaggatcactgaactaggagcagttgggaaaaaatacaatcattgggaattcctgtagcatcgaaggtgcctacagggaggtagaagtattcatacaacagttctctggtgttctctgttgtagcaaccagtcagccaaaagggttcagctgcttgaaatgagaatggctggatcaaaatggcagctcaggatttaaaggattctagtcagataccagacatcctcacatagagaaaactctgaatggctgggggagaaggagtcaaatgccctggatctttttcttgggcctcaaagtcctccttctgtcatcatccttccagtattgggcaggacctgactgcaggcatcatggcctctgtgaacttctcaagggtatgtattatctgacaaaaactacgatgtccactaacaggccactgaaaaggtatcttagtcagttctgctcattgcccagccaaggcctacgttttataacatgatatcaaagattgcatctaaaattgtgatgatttcctaaaataatcatttcatttagatttttctattttaatccaaggtattcttcagcggaaataaggaaacagtttactctcccaccaaaccttggccagtaccatcgacagagcataagtacctctggcttcccctctcttcaactagtaagtatgagttccaggtttacttagcgattggtcaagtgcaaaagtgcccagggtatgtgtttgcctcctgttccttagatcttcctaccatcacctcacattctccagtcaccagatcctaactctgtgactgtgtctggacatcagacaatatccctctctctctctgccaaccggtacttagggtacataatagaacctctgggagctgtggttttgatgtctctagactaggtgggcttccaggtgactcagtctcatccaaattatggttcatatttgggggagaagggctagcccaaaaacttaccaccatttgtagtatgcatttttttggaaaagcatattccaaaatctgaaatgccaagttacagacctcctttttgtaaaataattttcttgctagtataatttacatataataaaattcacacattttaggtgtacaatttggtgaacttgggcaacttagagtcacttaacctttcctcagtcaagatatagaacacttcttttatcctaaagcgttccccagcgcgcttttacaatctcctctccccaggccacaccctccaactcacgcaatctctgactcacttctgtcaccataattttgctctatctggagcttcatatcctgttacagtatgtacaaaccttctttttttgagacagggtgtcagtctgtcacccagcctggagtacagaggtgtgatctcagctcactgcaacctcaacctcccaggatcagatgattctcctcccacctcatcctcccaagtagccgggactacaggcgcatgccaccacacctggctaatttttgtactttttgtagagacaggggtctcgctatgttgcccaggctggtcttgaactcctgggctcaagcgatcctcctgcctcagcctcccaaagtgctgggattacagtgagccactgcacctggccctaaaccttcatttttaaaacacatttcctcttaaattgaagattgcctacatttttatatcaatgccaattgttgagtgtgcctatatgtgttatattatttgagcactaaatgccagatgtgtgccaagtgagataaatctgacaaatgagatggtttgtaaaaccagcagtgaatattcacttcctctgtgagagagctccagccctcctgtactcacttcctcacacagcacagcagcactcttgctggttctgctgcttatcttgaagaggttaggttactttttgtttctacttattacttcgaaaccacttctgccttagaaattttgtaaccttccgctcagtttccggtaaccgccattttgtctcctgtaacaatttacgcgccgtgtaactgtgaatctttcaaaggtatgttttactggagtgatttctggttatttcagaaggataatttgtgtgttgcgtcattaatgaaatagtagtacgaaaaacctatagcatcttttactgcaggaggtaactttccatgccattttttcagaaaatctacttatg

SEQ ID NO: 41418 - DNA, 2300 bp, Homo sapien
agaattttagagggagaggctactggaggtgctggcctggttggaatagagaaagaatgaaatagcgcatggggttatgtataaaacaaacccatttaaatacatttttaacaagcttggatgcgcatgtaaagcttcctcagtttgagagttctttgcactgtgaaataggctcatgactgaagggcatcttacatggtagaggtctcaatttgtcacagagttcagaccttaccaactgtaatgtgcttttaatgaaaacagtgaccaagacctctcgtgtgtttttaatgtttagtcattttgtgactcctagaagaggacagcaatagcaaatccagagtaggatggacacttctgcccttctttacccataatcattctgtatttaaggaaacaagcatctcctgcataaatattaataatcactgagatttgtaggataggttaactgctaaaacaagcagaacccaatctcagtggtttaaagcagtagttctcaaacttgagcatgcatcacaatctcctggaggacttgttaaaacacagattgctggacctcacccacagagtttctgattcagcaagtccaggtggggcctgagaatttgcatttctaacagtcccctgctgatgctgaagctactggtcaggggaccacattttgaaaaccgctggcctataagcaagaagttgctgtctttgtttctttaaccatccagggtgggaggagggacccctctgttccacgcagccactcagaaatacaggctggcagtggctcctccatcttcagtatgttctctccccaaattactcttgtcactgccattgctgcccctgaagaagagaaaagaaggatggaggaggcctggaagtttgatacattgcttctgctaacaattcactggagagaattgagtcacatgatcacccctcattgcaaaggaggctggtaaatgtagtctctgcctgggcagccactcaccactaaaattctcatggtgatgaaggagagaacccaaccatacagtggctcttaagtaatacgacactaagagagccaggagcactgttcacatcatgctcttgctcagaatcttcactaagattcattccctacaaccaggctttcttcatgatggcattcctctaccttctttccatccatagtctatgcagagtcaagctagaccgctgactaagcttcccccagccgttcaagcctctgagatatttattcatactctaatctctccctggcacatcatcaccttccacccctgcctatcagaatcttctaaggcccatccatctccagtgctgcttccatgaaaagttgtccttgtcacccaactgcaaatggcctgtcactctggaacttccacagtgcttctttgtatgcatgtggtgacttgtattttgcttttactgtagttagttacatgtttaccttttccctcacctttttttttttttttttttgagtcagggtctcactctgttgcccaggctggcatgcagtggggcgatcttggcttactgcaccctctgcctcccgggttcaagtgatccatcctcccacctcagcgtcccaagtcgctggaaccacaggcacatgccaccatgctggctagtttttgtattttttgtagaggcagggtttcaccatgttgcccaggctggtttcaaactcgtgagctcaagcaatgtgcccgccttggcctcccaaagtgctgggattacgagtgtgaaccaccacacccagtccttccctcattcttgattgtgaattaattgagagcagaggtcctcctcttctgtagtgaagtaactgatactcaggaaataccggtgggttaataaacatttaaatgtttcaaggaacatctctcaaatggctccagaatacctagacattgtgacaaaacatttgtcagatttatccaggagccactttcctaaaccacatctgtgattattacacttactccttcagcaaaatttctctgtggtgtttttactcctttttaacatgtttaaaccatgaatgcaacaggtctaacttatatttcactttgctgctcatttacagatctcagaaaattttcactgtgacctgaactctgaccagttcaaaggatttctgcgagctcacacgccttcagtggccgcatcaagtcaggcgagatctgcagtcttctcagtcacctacccgtcctcagacatctacctggtagtcaaggtaattcagtacgatctgatttgcccaatctgatgttttcattgctgtgttgttc

SEQ ID NO: 41419 - DNA, 2300 bp, Homo sapien
atcacaggtttctaactgaaacaaggaaatgacctgaacgcttatttttagaggagaccagtatatattatggcatattcagaatatgcaataccatgcacccattaaaatcatgtttattaagaatagtcacattagggaaatggtcataactgaacaacgtttagtggcataaaaaaagataaagctttgtacatacagtatgatgaaaatgtttaatgtggctgggcatagtgacttgtgcctgtaattccagcactgtgggaggccaaggcaggagtatcactgaaggccaggagttcaagaccagcctgggcaccatggtgagaccctgtctctacaaaaaatttaaaaattagccaggtggtcatgatgcatgcctactattctagctactagggaggctgaggctggaggatcactggagcccaggaggtcaaggctgcagtatgccatgatcataccactgtactccagcctgggcaacagagtgagatcctgtctcaaaaattgaaaaaaaaaaaaaaaaaaggtttaatgtgtagaagggaaaaggctaaatggaaatgtgttaaagtcttaacggtgatcttccttggagcaatgatatagtgggtggttgctattcttttctttatacttttatgtacttttatgttatgcaaggttgaaaaaatgggcacatattgctttcatagtcatttctgttaagataatcatatgattatgaaagagggagtgtgtgtgtgaaagtggaatggaccaatcaaatagaacagtaggaagacctcagaagatatgacacatgagctcaaccccaaagatgagaagaaccagccatttagtgaatggggaagccctctggggaacagaaggcacgaaggaaggaataagtttggaatgttctaggttttgaaaaaaggccagcatgggagaatgatgaaagataaggtcagagccattgccaagggcaaggtcatgtaggacccatgacgaaaagtttgggaaacccttgtaggggactgacataatttattttacatttttgaaaaatccttctgaccaatatatgaggaacattgtaagaggcaagtgtagaagtcaagatctattgagaaggcgttgcaggggtccaggtgagaatgaggatggttcagagtggagagacagggacaaggtaagttggagtgtgggtctgacttgttagccatgtggaggaaataattatcataataactatcatgtatgtttttagggggctctataacttcagtatgttttcagtgttcacatttgtaggtttacagagtttgtacttgataaggtacagaagtaagtcacttctcaaaaatcatgcctttagaagcatatatcatgcttctattatagtaatgataataatagaagtctactgctagtcataaaacttatctgttcagagaaggctttttttttttttcagagaagtcttccaggtttcagctgttgctcattaatgctcaccacagccctttgaggtcgatgcaattatgctttggaaaagctaagtaacttgccaaaggccatgcagctaaaagaagcaaaagctggattcaaatctcagctctctgcctccagagagaacaccctcaatcccgcttaacagacattagctctgcttatttgattggtggcagtggagatgaacagaagtgaacagtgagcagagaggggtctgtaccccacacacatccctgcaccccaactgtcaactgtcttccatcatcatttactatatccacgtccactcctgacagcatcagtggctcagtcttaccgacctgcatcagggttttgggctctgcctctgtttagacagagcacgatttgggaagtgctgctaagtcagccagtggctgagtagaaacagccctgcagtgggcctctgcctgctctgtggctcgtttatcatgtgtctcatctttaaaagttggggctcagtctaggtgcctcctggcctgagcaccccagaattctatgctgatcccttcattgtgacatggcctgtcatctactcttctgggaagaccatctgcacctcactgatacttgaagctcattgagtattgtcacatatcagcccagaaagtcacagggtacagcaactcatacttgctcccagcaccaggccagccccattctgcctccagggagtcacccaaaatagagagatgagggtaaaataagacctaggaatactatttatttgcctccatggcctttgaacttgcacatccaacgtaacggctcctgtgtgttct

SEQ ID NO: 41420 - DNA, 2300 bp, Homo sapien
taagtcagccagtggctgagtagaaacagccctgcagtgggcctctgcctgctctgtggctcgtttatcatgtgtctcatctttaaaagttggggctcagtctaggtgcctcctggcctgagcaccccagaattctatgctgatcccttcattgtgacatggcctgtcatctactcttctgggaagaccatctgcacctcactgatacttgaagctcattgagtattgtcacatatcagcccagaaagtcacagggtacagcaactcatacttgctcccagcaccaggccagccccattctgcctccagggagtcacccaaaatagagagatgagggtaaaataagacctaggaatactatttatttgcctccatggcctttgaacttgcacatccaacgtaacggctcctgtgtgttcttgattgttccaattatcatttttcctctcgaatacctgagagcattcattattttgcaagagatttgagaatccctgtgccctaacttttctttccttgatgtgggatgttcttctgtgactaggtaagtttatctcaatgtgtccccaaataatttctcagaatgttaaattcataaaagctaccatgaaaggataaataaatgaaaggagttctgaggtcaaaacatttggggaaagaagagtctttctccttctgaggcattctcagtgcacagtaacctgtttatctcgctttgccttgctctttcccaagcacatttttgctcaacgccccctaccttccccatacacttgttaacactttgcagagcactagggctctgtgggacaggctgggaaatgcaggttgacatgccactgttaatacctagaaaattaaggcaaacttgtccctgagagatgtcaggatagcacagtatggaaaggccatgcttatcagggctcttatctgagagaatacagtggttatgagcatgactctggaactagacagtctgggttgaattccccgctctgccatttagttatatgatatggggtgtattacctaacatctctgtatctcatttgttcctcacttgtgacatggggatgatgacaatgataatagtaccaacctataggatagctatgagaattaaacaaattagtaaatatgaagtatttggaacattggcctgactcaggataagtcctgtttaaatgttagtatcattattattgtttcttcaagccaggaatatacttcatcaattatgtgtacactcattccttcattcaacaaacacttacttaatactcctgtgtcctaggcactgttctagtgctggagatacatcagtgaatcaaaaacatgagagaaaaatccctgtccttgtggaacttacactgtagtggaatctactactaataatgcaaatagaaagaaaaatatatgcaagttacccaggcactgggtagcctagtacctgtcctatagttgtcaaatggatggatatattattcttattgttgttgtcgtttacagtaattgagcttggaggtttgagctgccatcttagataagaacagaaagctaagccaatacgagtgccatgccagtaagaaaaggaaactattacataaagattaggaagaaaaaagagaagaatgacaagtaggccattatctatggccatgagttttatttaaaatgagctggaccttttttgccttctttatctgtgtatcagatagacaattacctctaggcagatttccacattccaagacatgaagactttctaagctgcagcagacacatctttacttgtagcaaaacagagagcgatgggggttattttcagatgactgtagctgaagaggaagaatcaagtaattcactccccccaataataattcacttctgagaggaaaaacttctttggaaaaagcaccccatgaatggaagtctcagcatttgctgaagaacttagttaaaataaactctagacctttttcattgattctttatctcttcttttccagaaaccttctctatgtctacccacagaggctgaactttgtaaacaaactagcatcagcccggaacattacaataaagatccagtttatgtgtggagaagatgctagcaatgcgatgccggtaaggagggaaacgaacatttgcctcaaatcagggtgggctgctcacccctgtcacttcacacaagtccgggactcatcagtgtacaaagtccgtctattccaggccaatactgctcagcatgtgcaagggcttctgtgcccaggatatcagtggggaaacagggtcagtct

SEQ ID NO: 41421 - DNA, 2300 bp, Homo sapien
ggcaggatcgcttggagcagtggctcacatctgcaaccccagcactctaggaggctgagatggcaggatcgcttggagcagtggctcacatctgcaaccccagcactctaggaggctgagatggcaggatcgcttggagcagtggctcacatctgcaaccccagcactctaggaggctgagatggcaggatcgcttggagcagtggctcacatctgcaaccccagcactctaggaggctgagatggcaggatcgcttggagcagtggctcacatctgcaaccccagcactctaggaggctgagatggcaggatcgcttggagccagaagttggagaccagcccagggaacataatgagactctgtctctacaaaaaatataaaaattagcagagcatggtggcacatacctttagtcccagctactcaggaagaagctgaggcaggaggatcatttaagcccaggagttggaggctgcagtgagctatgattgcaccactgcactccagcctgggaaacagagcgagatcccatctcttaaaacaaacaaacaaacaaacaaacaccctaaaattccattttcgttttcaggacaatacaaaacttacatgaatgctgaaattatgtgtttctttatagatctttcttcctccctccttgcctctttttatgctctaaacacttattttgtctgcccatttgataatccctcactggtctttacccacttgctaatttatgattcagctgagaatctcttttttaagatggagaagtggtgactgatgcctacgattctagtataataaaggaaataatatatatccaatggcagtggttcttaaactttttgttattaaaaaaaatcccttttcacatttccctcaaactgaactattgaaataatagtaatgcatttccccaactcttcttaattatttacataagtaataatcaagtagaacttcttgtcagcatgatataaaaattagtgtcagtgagttcacaaaattgcaggcccaaataaacatgacacttttgttggtctgtgcagcctcatttctagtaaatctgaaaatttgattgagtttttaaaaatactagtgatgtggctgggtgcggtggttcatgcctgtaatcaatcctagcactttgggaggccaaggtgagcagatcacttgagctcaggagttcaagaccagcctaggcaacgtgacaaaagcccatttctataaaaattacaaaaattagccagtcgtggtggcgggtgcctgtagtcccagctactcgggaagctgaggcaagaggattgcttgaacctgggaggcggaggttgcagtgagctgagatcatgccactgcactccagcctggaggacaaagtgagaccctgtcttaaaaaaaaaaaaaattaaatagtaatatctcatagatttccataaccgcttgtgaaaacatgtcaacatttaaagatgaaaaacagtgctgtatacatcatataccgtaatcctcacaaggttcagatgactctatggatttttgaatctgagaaaacctcactgcatgaattgtaaagttgtcatttaaatattgacaaattaaaaatatccacatttttagcttctcatgagaaatcagaagctctagcaaccctggggtccatttcccgatggcagtaatagactggagccagtagtaccccctgcctttgtaagaggcatgtgttggctgtttaccatgatctccaccactccctggtgccttatgccccatctacttctctccaaaagattgcctcctaccccaaccaggatttgttaagaagtctctaattccaaggcctaatccggtggcttttcatccaccctatccctcttcaattccttcttaaactcagtaagtaactctgttcccctgtctgttgacatgtctctgcctggtggggtgcaggcgctcccactgccctcctagaccctcggagctaccacacgtatggccgcacatcagctgctgctgtgagttcaaagctgctgcaggcccgggtgatgagcagcagtaacccagacctcgcggggacacactccgcagcagacgaggaagtgaagaacatcatgtcttcaaaggtaggaaagatgtcaaaccgtggaaggggacacaggcttttttattttttaactaaaacttggagaagtaacacagaagcaaccactactgctgcccaccatgctggtcggatgctttaatgctcagctttggagtgattaacgttctttagaacagattaagaccattctgacagat

SEQ ID NO: 41422 - DNA, 2300 bp, Homo sapien
gttcttacatgtttccattgagaagtcattcattagagtaggtccaggattgcttttagggctagaagaaatatcgttgaaacacagtgaaatcttaattctctaacttttgaattgtctaaaatcaaagtaatcatcatacaaaaataaacacaaaaagtatgtgatatttttgttgactttaatatctttgataacttaaatgcttggtatcacatttaccttatctttatatagcacaatattaggtgccaaatatctatactagcccccaaatatatttgcagttttcaaagaaagctgaaaccttttgttattatccttggtgttgttagtccttctgtaggtgataaacaagcttctatttagaaacattgctgccaccaagcagcccctgttgtactgggaagcccacaattgtgttttgcatcccataaggaaagctatgtcttgtatacaaagaaagaactttccaaaagatgtgacccaggatgagggagatgggccttataccttcatttaggaacccagaattaggtataaatcccaaactcattggaagcattgaaataaagccatttggaaataggtcttcagttcccatggttaatggatgatacccatggtggctcaccaaactcttaagactcaccactggacatggaacatcagcattactgagctaattgtcaggaacatccagttcattggcacagtgcagggattcaatgatgctgttcttccattcccccaggcgagctcggctctggactgtaaagacagcctgctgggaggtgttctgagggtgctggtgaattctctgaactgtgatcagagtaccacctacctgactcactgctttgcaacactccgtgctctcatcgccaaggtaaacttgggatgcttgttttcttcctcttaattaagagtaagattctcatctagcttcatacttctctcttcaggtggaccaaaagtcacagagcatattaagtggcatcacagtaaaggtcttaagtcttcctaggaagaaagcagatgccctgattctgtgggaagccaccatggagaggaaaagcagtggctcccatatttgaagtgtggacctaactctagaagtttaaaatggccattcgctgaaggtctatgacatgagaacagagatcaactgagtgacttagcaatttcactctttctctgtaatacctctgctgagtgagattaaatcctctatgtgacgcccattagtcttacaaaatgtcatgccataaaatgccaggaaggtcagaaatgaatttctcacggcctgaggaatgaggattatcctggggtaacatgcagattatttttccctttatttatttatttatttatttttgagactgagtctcgctctatcgcccaggctggagtgcagtggtaccatctcagctcactgcagcctctgcgccctgggctcaagcgattctcatgcctcagcctcctgagtattgggattataggcgtgtgccaccgcacccagctaatttttgtattattagtagagacagggtttcaccatgttggccaggctggtcttgaactcctgacctcaagtgatccacctgcctcagcctcccaaagcactgggattacaggcgtgagcccccgttcctggcctatttttccctttattgaagatctcaattggtgccttctacatggggtcttttaaatttaaaaagtaaaattcttctgctcatccttctcaggaccattttctctttcttcatcaccagtaatttcccaggaacccaagaaactcaggtttccttccatcatagttgtgatttcaccagtgaatgcgacctggctcacagtgcagttgataacacagctctgacccttttagctggacagttcattattaaatctcaagtctactccattgcttaaatccatcttctgattcacatagctcattatctttatggaataatgcattaactcttctaggctttttgcttgtccaaatggacatttgcatatttcaacggtccagaaagtgtatcaaactgccaagtgatgcctaatggccctttatgtctctcctagtttggagacttactctttgaagaggaggtggaacagtgtttcgacctatgtcaccaagtcctgcaccactgcagcagcagcatggatgtcacccggagccaagcctgtgccaccctttacctcctcatgaggttcagttttggagccaccagtgtaagagttcaaaccagctgagtgacctggaatcagtagagaaaaattgatgt

SEQ ID NO: 41423 - DNA, 2300 bp, Homo sapien
taaataaaaaactaaatttctggccaggcacagtggctcgtgcctgtaatcccaaccctttgggaggccaaggctggcagttcgcttgagcccaggaggtcgagactagtctgacaaacatgtcaaaaccccgtttctacaaaaaatacaaaaattacctaggtatggtggtgcctgcctgtagtctcagctacttggggggctgaggcatgaatccaggagttcaaggctacagtgagctatgattgtgtcactgcactccagcctgggcaacagagtgagaccctgtctcaaaaaccaaaacaaacaaaaaagaaagcaaaaactaaatttctgataatcactaagtttttaattatgaaattactagaggaaatgcagcatcaccttggttgaaaaccatttggagagccgtgcacattcctgatccctaagtccttgatgttgcacccatcttgaggagcagtgctctctctggaccgatgttactgaatccaacccagttcctacttgatgtttgtggcattagcttggcagctagtttttacgtttactatttttactacatattaggagatggcaaattactgatagccaggataagggaatgattttcaaggcattatagctctaaaaaacaattgagaaatcagctccctcatcacttccttaatgcaatgagagaacacgacacggatgaacaaactgttctgttatccaacaagattatcaagagttattagtgagataataaaaaagtatatgtgactgccaaaagtctccagactaaggaccagaagacctggtttcttgttctttcactttctagtcctgcaattctggcgaagatactatactgctctgagcttcagggtttttttcactgtgaaagagggtgcaagttcctccacattcttccaatctactgaggaaacccaatgagataatgcatgggaacatgttttggaaactcaaaagtgctgcccaaaatgtaaggtaacactgtttacaattgacacttccagaaagtttagccagcacccccacacatggcatccgcttctgacaacgttaatcaaaatcaggccaaaggtgcaggcaggacagaggcctgacttaccagaaaataaacgtctggtctattccacttgtagtgccagtttacattgtctggcgagagccaactaccagggcctccgggtagaagaaagaaagggtatcagtggaactgagagtgtatacagtggcgcctgaaagcgggtagaagaaagaaagggtatcagtggaactgagagtgtatacagtggcgcctgaaagcgggtagaagaaagaaagggtatcagtggaactgagagtgtatacagtggcgcctgaaagcgggtagaagaaagaaagggtatcagtggaactgagagtgtatacagtggcgcctgaaaacccaacctcgccaggcttccctgtctcctgtgtgcagcatgtgtgcagtgcattcccctggaaggtaaattcgcggagtcccgcagcccacctgtgtccacctagcctgtaagtgccccctgagggtatcaaagcacgcggacttccgcctgaagcaaagccaccgggcggcaagtttccccgttaacaacaacgaagacagagaggacttggcagctgtgacggatctgcaataattaaactgacgttgctgtttagaagcctgggggtcgcctgcagcctcccaggctccactccatcggctccagcgctgcaggcgggccgtgcatgtctctagatgcatattaagcaaaaagtttctaaagaggatcgcgtggaacccagcaattgattaagaatctcaatggccctaatcccctgagaattgaactaagggctccccagcaaacacagcgatttacatggggcctagagagagcgagcactgccgggggcggcggcgaagggcagcagtggtgggacgggcggggtagggggagttactgagcatgcgcccgggtaggggcgtgggggagttactgagcatgcgcccaggtaggggcgtgggggagttactgagcatgcgcccgggtaggggcgtgggggagttactgagcatgcgcccgagggtgtttcggggcgtccgaagcgggcgtgctccagcctgctcagcagcgagtggttggaaattagcaaagtgagagggtgcgtggcctgagggactcggggaggctgagggctttttttctcaacactgtgaagctcagggaaaggagtagaactgggaaccaagtaaagtaaaatcgtggcaagtgggcatagac

SEQ ID NO: 41424 - DNA, 2300 bp, Homo sapien
caacctcagcttcccgggttcaaggattctcctgcctcagcctcccgagtagctgggattacaggtgcacgtcaccacgcccagcgaatttttttgtattttttagtagacatggggtttcaccatgttggccaggccggtgttgaactcctggcctcaagtgatccacccatctcggcctcacaaagtgctgggattataggtgtgagccagtgcacccggtcgagggcactatttatttatttatttttgagacagggtcacactctgtagcctggactagaatgcagtggctcaatctctgctcactgccgcctcgacctccagggctcaggcgatcctcctaccttagcctccagagtagctgggactacaggcgcgcgccatcgcgcccagctgatttttttttttttttttttttttttttggtgaaaacagaatttcactgtattgcccagaactcctggggtcaactgatctacctgtctcggcctcccaaagtgtgaggattataggcctgagccactgcgcctggccgacgagcacttttaaaatgcaggagtcttcctgcctctgatatctcatcccttatcaccatgcaaacaattctccttttcatagaagagtagacatttggggcggggtggtggtggtgggggattttagaaaatatctactgcatccaaatgccctactctacagacgaaaaagcaaggcccaggaggaggaaagagtttgcttactgccacccagtgagctggcaaaggcgctgagattcaaaatgagctttcctgccttcacatatcttccggctgccctttgcctattccctaaacagtcaggagccatcaagttcaggaatttgcaggtgtgcttcgctgtgaactgtggaaaagcagcgtcttctccccagaggcaagcatgtcgccttgtgaagtttgatggctcttcacttgcacactcacaaaaaagactgagcgtgtgtaacgccctgctggatgtgtgcggtgctagagagcttgggggtgaggggaggactctctcccttaagaaaatcagttgactgcagagctaacattgttttttgagtaatacctggtttttataaagtcgtcccttcagttcccaagctcctcttctgtttgttcaagccaccttcaatttgaaaaagactgaagtcacagcttctcaatccctactaatttctcatggacctactggattgctccaaatcgagtatttgggactgaactaggaagccagttcaatcctgagcccccgaggcaggcgttgggtcttctgtggagtccccagagacctgcaaccttctgaacacgcatcctcccctttccgccgaggactctgtcctgcagccgagccagggcgaatgcacggaggtcacaagggaggtgcccttggaggcgggaggtttctggccgccggggcgaccgtgctgacgaggcacctgcaggaaacagagctctgcacgctccggtccccctcacccggggagggagaggaggtacagaggcgctgggggaggacgtcgagcaggccagcctcgttgccagaacccccgccccagccggagatgggagcaccgcaccgtctcacgggggctggatttcttctccccttgcgggtgtgtgtgcgaggatggacgtggtaaatacgggttggcagaaggagcgaaccgcggtggaggaagttcttctgcttagttctcgccgcggcgaggcccgcgggccaggcgcggcgacgaaggtgcacgaaggtgccccgcgggcctggtggagttgcagcggcgcgcaggcgcactgagggccgcccgcggccggctccgcggtacaaagagcgcccccgcggggagccgggcgtcctctgggcggagggagcagccggggcttcgccggcccgcgccgttcttctcacgcgccgctccggggcgcagccacagctgtcgcccaccgcgggtgagaggcttgctggtccgccccggcttccccgccccggcggcggccgtgcggttcgggctttaattctggcgcttgccagccggggccgactccgccccctgcgccccgcccttccccgagctccgggtccgcggcggagcgagcgagcggccggcaggttgggaggagcggccgaaggtgagtgacgcggcggggccgtgccgcgccccgtgccgcggcgaggttgtcccggagcgcgaggcccctacccctgcctcgggctggccccgcgcggagccgacttggcgcgcgccggggttgcgcggcggccgtggcggtggcgga

SEQ ID NO: 41425 - DNA, 2300 bp, Homo sapien
ctttcggccattatcccattcctcttcccagttccttgcactgcccccaactagatccttttccatcctcctcctcccacttgggataaaaagttaatgtatgcacacattaactcagaactatttgtgaactgatactcatgaaatgaaactagtcttgaatgtatcaattccagtggccatttgcctgtggttttttggtttctttctttggggccagtttggatattttaaaaaattacttttaagcctagtcttttttccttctaacattccctgccgagcgcgcacgcacacgcacacacacacacacacacacccagaactcactttcgctgaggcagaacctcgactagagtgatttatggactaggcaagtctagagcccagaaagcatccctgtgccctaaggggataaaatgtattcccaacttgtgggtctctacaggaggcaattattcctctactggcagcttctcttccatccttattcattttaacctccccataggacagccaatacttaatttttcttccattgcttcagcagcacctttccccaaacctagtaacagaaaaaggatcaaagttaatcacctctcagttttctcactcagtctctatcttagaaaaacttcctaagtagctgccttaaaatgagggagaagggctgggagatggaagaatgactgctaatcggtataggggttctttttgggggcaacgaaatggaatcagatggtagtgatgatttcataactttacggatatattaaaaaccactgaattttgaccttagaagagtaaatttatatgtttattacacttcaattttttttaaataaaacgtgctcaacattttagtagagaaagttggatgaaaggagaaactggcagatgaacagctacttagctgttaacgccacctaaaaatgaacttgaataaactcaggaattcaatataagcaaacagaccctcatttccattcagctccagaggtggggggcaatgacggtgaggaaaggaactgcacgattacacatctggatgattaagcttccttattagcctcgggtatcagggtctaatagaatccactatttaataagatgggctgaccctccgcagaggccacgtgcggaaagcgagcgctggcggacgccataaattgttaacgccaactcgcccaaggccttcactaggtcacgctcgtgcagcacggctcgtgctgacccgcaagagccaccaagaacagttgcctctgaaagttccacgggacccgggtgaaggagatgaacggtcaaggagccgtggctgccgcgagcgccactgcgtgttgcccaaagcggcacagaaaacgcaacattcggggaccagcccgcttcagggcccctacaccttccctcgacctggaaccgcgggacctcggaaacccacgctgcccgcgccgggttgggccgccccagaggccgcagcgcccacgcccctcccccgcctccccgccctccagccccggccgaagccacctcggagttggcggagggcgacccgaggccacctgcccctctggggccgaggataaaggggtcttgaccgccactccctcccgcgaagggcaacatccaactccacggagagccgcttcagagagggtcccccgttccgccccgggctagggaagggcccagaggcatccgagggacagagcgccgggccggggtagccaggcgcccgcaccctcccgccggccggcccggcccgaactttctcgctgctccgtgcccggcgcgcctctccctcctccagaccggccgagcgccgccgctgcagagcgcgccaaactccgacggccgcggggccgacgccacctctcggacccccccccaggaccgccccgaggccgccgggttcacccgcacgagcgggagcccgcgggggctgccctccgccaccgccacggccgccgcgcaaccccggcgcgcgccaagtcggctccgcgcggggccagcccgaggcaggggtaggggcctcgcgctccgggacaacctcgccgcggcacggggcgcggcacggccccgccgcgtcactcaccttcggccgctcctcccaacctgccggccgctcgctcgctccgccgcggacccggagctcggggaagggcggggcgcagggggcggagtcggccccggctggcaagcgccagaattaaagcccgaaccgcacggccgccgccggggcggggaagccggggcggaccagcaagcctctcacccgcggtgggcgacagctgtggctgcgc

SEQ ID NO: 41426 - DNA, 2300 bp, Homo sapien
acaaatggcggctgaggaggagaatctctgtgagttgattgaatggggagaggcaaacatcaagcccagtgcccagacttctgggaggatctggctgctactcagtatggcggttgaggaggagaatctctgtgagttgattgaatggggagaggcaaacatcaagcccagtgcccagacttctgggaggatctggctgctactcagtgaaaggaagcctgggaggtttgggagggcagatggatgagctcatttatggacagattgagttcaagcatctacagatcattgaaggggaaatgtgagcttgaaccctgcatttgaagttcagaaaagagaaagagcagaatgaattgagttctgggagtctttcccatgtggatagtaactgcagcggatgaggtgataagatcacctagttagaggtgggggagcagaagagggcttagggcagaactctgaagagcaacctgcaaaggagactgaggaggaatggacagaaagggtggaggaaatcttcatgggtgcttttcaaggaggcagtggttaccagcattagctcctgcagagccaagagaattgagtcattttgctgggcttagcaacaagaactttcagggacttcatggcagcgtgacagcatatggagatgcagtactgttggcctgtacagagcctttttttttttttttttttttttttttaaattccctgagatgtagtctcgctgctctgtcgcccaggatggagcgcagtgactcgatctcggctcactgcaacctctgcctcacgggttcaggtgattcttctgcctcagcctcccaagtagctgggattacaggcatgcaccaccatgcccggctaatttttttgtatttttagtagagacagggttttgctatgttggccaggctggtctcgaactcctgacctcaagtgatccacccgccttggcctccaaagtgctgggattacaggtgtgagccaccacaccctgccagtacagagcctttgaagacattagaaaatgtgtgcctttctggatggacacagtccctggcttggtgagtggaccgtgcatgggacttcagctcttatgtgccaccttagctgggtgcacttgtttagtgtgcagaatacaccttccatgcgtggtggcctaggatatatctgcacttctcaatcgaaggcaatgttgcctcccagggaatatttggcaatatccgaagaaatttatgattgttatagctgaatcagagagggtaggtgctactgtcatctagtgtgtaaaggccagagatgctgctaaacactctgcagtgtccaggacaacccctgacaacaaagaattatccagccccaaacaccagttgtgctgagaaacgctggtgtctgtgaccctttcaggctcatgggaaaaggcggtcagagagggtgatagctggaggtgggtggacctgagaacaggctccttacatactttgctgcagtctcatttgcttgtggcagttttcaccttgcctctcctacctctctaccatagaactcttactcatcatgttataggttttcatttgtttattcttatgtagccattttcactattccctctcccacccccactcccccaagcagtaaattctgtaatgcaaggcaatcttgtgtccttatttctgtttctgggcacactgtaaaacatctgtattttaatagtatctgtcaggaaattctattttggcaaccaagtacgggctaatctaaagtagcccatacttgagtgctatgttgataaggctctaatgcatagttagccccttgactgtcaggcttggaaaaaagacaggaagtattccttgtctttggaaatgagcctactctggctttgggaaggaaagagtacaaatggttctcaccagatagggttgcagcagctctcccagcattttgggaacaaatcaggtcattatctcaacaatgtcaaaattgtgttcccagatcggttgttgtttgaaacatttggggctgatgcggaggaggagaattaattagcagctccctctgttggtgttctttttcagccttctcacattgcagcacgagagtcccttagacatgctggctgctcatttgataatctgtgttttgctcagtacaaaaggttgctggctaagttttgtgagcccctctaacgtcaggctggcagtatcttgggttcaattaacaagaaagtctacagtaacattttgtcaatggggaaggacttgaattcacagaactgtctcggaaagccctgggtaagt

SEQ ID NO: 41427 - DNA, 2300 bp, Homo sapien
aggtcattatctcaacaatgtcaaaattgtgttcccagatcggttgttgtttgaaacatttggggctgatgcggaggaggagaattaattagcagctccctctgttggtgttctttttcagccttctcacattgcagcacgagagtcccttagacatgctggctgctcatttgataatctgtgttttgctcagtacaaaaggttgctggctaagttttgtgagcccctctaacgtcaggctggcagtatcttgggttcaattaacaagaaagtctacagtaacattttgtcaatggggaaggacttgaattcacagaactgtctcggaaagccctgggtaagtttgaagagcaaagttgccttttctgttttcagaaatattttaccccgcaacgatgtgtaaatctaaagcctgtgcaagaatgaaaacgagcttgagtattaagatttggcacagtgtgtgcaagcaatgagactgggttaaaaacaggaagtgtcttaatttaaagatggtgatggggagacggattaaaataaactgctggccatgttgaatctgagataggcaagccttggttgtgggcacattcccttctgaattactctatgcagatatattttaggcctctttctattaaattgtctttcacatggtttcaaagatagggctagtgataagaattctcttcctgcatggtgggtaccattatataaacggtatgagcatgcttttcttgtgtctctgtataactgcttggtctggcactccacaaaatagtaaaacacatttctgcagtggactagcccatgctgtgaaagaggaaggtggtggtggacaaaaagtggtaagttttaggctgaaggatgttgatgttaaactttatttctgattatggcagtctttcatcatgtaatttaagaagcctgagatcatctgacttttttttatgttttttttctttaggactgcaggaagtgttgataaacatctgtttaagttgtctataccatgaaatccataatcttccttcataactatgatagcatatggttttctatagttaggaaaactatttctcatgtatttcatggtttggccaaatccttttattacattagtactaaaaaattccttaggatttctagagaaaataatatgtattatggataaataagggaaagtaagataattcttaaaccttagtatcagcagtcattctaaaccacattacacatcttcagtaaaagtggttacaaaagatttttctcacttcaaaagatccgccagggaagagtcccagctttttcttggtgttattttaggtattaactcaggagggcttcctgaaggtttgtcagtgagatagttggggggttcctgagctttttattgttgtacgtgaacttggtacttacttctttggcttttaaactctcagcagcacgtacagatgccctcacatgctttctgggatgactttaacgctaaatagcaggggtgtttctcaagaatgtttaagaaaagaaagcagacatttgtttgcacaaacagatatttgtgacttctgtgaaaaaattccaatagttgtaatataggaaatttttataaacaaacacccctaccaactaacccatcgtgtatttttatgtgtgtatagaaaaaatgaaaggatatactaaaatgttaattgcatagtttctctgggaattgaatttaattaaaatttttttatcaagatttttaaagttttataatgaccacgttatgtttatgtaataaaaataaaatagaggctaggcacagtggctcacacctgtaatcccagcactttgggaggctgagatgggaggattgcttgagtccaggagttcgagaccagcctgggcagcatagtaacaccctatctttatttttaaaaaataaaataagagagggggacaataaatgcaaatatataaatgacagaaattttatggtctggtcaaagaactatcattgcatgaaattatagatatggtcatgtaaggttaccttttttcattataattccaccaataattctaaagtttcttttctttttttttttctacttcttccacagaaaaacaggacaaagaaacctgtgtgaattttcagcttttcaccttctctgattttatttcttcctcactcttcctttgacagtcctcgcagtccgcctgagagagtagagaagaccccctcccagaaccttcctgtaaggtctccccgctgacttcctgtagtggatgtgactgtgtgccaggtgcctgccgaagac

SEQ ID NO: 41428 - DNA, 2300 bp, Homo sapien
accttgtggtgtttcattagctttacaaagttgatttagttttggaaagtgctattctcattcttgctttaaagttaaactataaactaaattttccccgaagttagctttgcccatgcccaggaatgacgaaggacaacttggaggttagaagcaagggtcagatatctcttactgtcacagttttgcaaaagcagtttcacttccctcttctaagtaccttctgcattgattggagccagcaaagagaacttttgcagcatttcttagtttgaatgtgccatataaatgaaacatgtttggaaatgtgaaaccaagtcatccatgagaatgttttcctctgaaaggcagcacttcttgataagtcccttcctcatggaactttggtgcagtgttggcccattttaaaatttattggttacccagggagatgcccgagcttatcagaattagagtctctcatttgagtacgttcttgcagtatagaagtttgcagatgttttataactttaagaggcccagtggtattgaatttagagttaatttttaaaactggctccaaagtcaccagcatggacaaaacttacagtcttccaaagagagagtgccaaagttcaacgcttggcattgttggtttttttttttctttgtgcccatatcaggtagctatgattatcttcattttacagagaagaaaacaaagctcaagagttaatttgactaaattcacagatgagtgaagtatgaggtagagagtgatcctgtgtgagaatagtttacatttatcttgatgtggttataaccactaccttatctataatgcatgttaaaaatcaacttctcaagattttttacaccaaaggcaaaaatattcaaatgttgatatagtcccttccattcatttttatatttttgtttaaaatcttcaacatcatacccagttttcaacctaactttataaagtaagcatttccttaatcttcataaacatgtttaagatatgtatcataatttaacaaattattaagtttctgaaatttttacagtagtgaggcagtggatgtatttatgtgtaagtctgtggggtttttttcctgtctctcccatagaggcagagacttgctctgtgacccaggctggagtgcagtggcatgatcgtcactctgttgcccaggttggagtgcagtggtgcagtcatggcatgctttaacctcaaactcctgggctcaagctatcatcccgcctcagcctgctgaatagctaggactacaggtgtgcatcaccatgcctgcctaattttctaaaatttttttgtagagacaaaatctcaatatgttgcccaggctgatctcgaactcctggcctcccaccttaacctcccaaagcactgggattacaggtgtgagccaccatgcctggccaaggttgattttttaaaaacattatttccttagtatgtgtatgattagaagcaaaattacaggtcagaagtcacattttaaaagatcatgaccacttaaaaaacccttaatatgttttgccaaatttatatcttttaaaaatgggatcgatttccacactcatcggggtatatttgagtatgtagctcactgtagacagagctcctggggagggaggaatggctctggtgctcttctacccacctgtagaggttcagctggggaccagctccactgtggggcattgggaggctgttagtgcagaggtatcttctcagtatctgcctgacacactactgtatccagctgcctgacccagtcctgcccacctgccttcctttcttcctgcctcccctctgttttatcaactttgtctcaaaaaacatagcttcctatctctatatgttcgtctcctatttatggtccctcagtatgttatagtgcttgctaaggtttgaatgtcccatgtgaatctcatgttgaaacttaacccccaatgtggcaatattgagaggtggggcctttaagaggtggctctgccctcatgaatggattaatccattcatggattaatggattaatgggttatcaggggagtagggctggtggcttttaagaagaggaagggacctgagctagcacactcggccgcctcaccatgtgattccctgtgctgcctccagactctgtcaagtccccaccagcaagaaggccctcaccagatgcagccctagactttggacttctcagcctttgtacctgtaagaaataaataccttttctgtataaattacccagtttcaggtattctgttataagcaacagaaaattgactgagac

SEQ ID NO: 41429 - DNA, 2300 bp, Homo sapien
accctgcagccactggcatgaccaagaactgagcactctgctggccgacttgctccttgtgaaaaatggccctccagtgccacccagagatgcttggagcgctatgcacagcgccttcttcccggcctcaaataagaggggaggagaaaaaggagaactactctttcctgtagggcgcagaaatgagatcctttatgctcagttaaatggtcttcctacttttacccatgtttagtacttaggacagtcacactcatatttaacttcccaaaaggctggtgacactgccatctagtgaatacagtcttttttacaacagaaagtcacaaaacttaaggggctcatgaacctgtatttttaaagtaaagttcaagaagtatcctgtttttaatctcatttgaaatactacttaatttacattgagaagaggaaaaaagttagtaatagagagtttgctctctgtggattccttttaggaattagcaaaatttcaaaaatgaatacaacaggagaatgtaaacaaattcgattttccatacagcaggggagtccaacgttttggcttccctgggccacactagaagaattgtcttgggccacaaataaaatacactaacactaatgatagcttatgagctttaaaaaaatctcatgttttaagaagtttacaaatttgtgttgggctgcattcaaagctgtcctgggccacatgcagcctgtgggccatgggttggacaagcttgtcataaaggactgaagctctgctctatctccagcaacgattgttacagctgtacttgctatctagtgtgctgttcacagcatggtccacttgtccctatatggtgactacttgtgcttttcttgagttgctagcttactgaatcttaaagatgctgtgaactatgtatctggtcacaattacttctttgccttggctgctaggaagcatggagccaaattactggcctattctggtctacttacaagatcttttacagtacatgctacctctatctttactccatatttcctcctcttgatatcttccttctgtcccaatatcttcacccactcatttaaaaattttattttgtatgcccctttaatttggtacatataaataaaacacattagtgttatttgctgtgtgtatgatgctcctgttgggatcctctgcatgtaaccataggcatatgtatggcaaatatcacaggcaaaggtgatttgtgtcttatatgactcttagggtctcttactacttcttgactccccattaggagagctgctgctggtctaaactggggttcgaaagagtgtcacagtcaaaggtattgctcacatataactgctaccttttccacattccattccagtatggccgcctgagatgtccggcttaaatttctaagcagcttcttcagctgaagggactgcttttttaatttctcatcccacaaatcctgtctcattgtttctgtactttgtcccattcctagatagttgacctatgtattccaaatgataactttttttaatatgaaacgtttttaacataaaggcttactaaaaggcagaacataaactgttttagcaaaaggcataaagatgatgacactgaaaccctaaaggctgtcttcaaaaaaacaccgataatgtgggataccttatcaccatttcagcagacatcatgtctaagaaaccgggcctacatactgttgaactacattcattcctgttgagataatgacacccagtcagagtgcatcactgggacatcttagactttgtactgaatttctctttcttatctccaataactggctattaaaaaaacacagattgcaaaaatcacattctcagtcttacccaagagccacaacacctggctttgtgtattttctctacagctgccaaaagcacaaaacaacagatagtttcctattaacaaagtgcaatttaagaggcataggtggctttgtgtgggaggtactatgggtaatatgtgtgttcattatgcaaatgaaagccaatcctatttttaaatgtacttttatatgtacaggcaagggcacataagagttagatggtcggccgggcgcggtggctcacgcctgtaatcccagcaccctgggaggccgagactggcggatcacaaggtcaggagatcgagaccatcctggctaacacggtgaaaccccatctctactaaacatacaaaaaattagccgggtgtggtggcatgcgcctgtaatcccagctactcaggaggctgaggcaggaaaatcggttgaacccgg

SEQ ID NO: 41430 - DNA, 2300 bp, Homo sapien
gggaggctgaggcaggagaattgcttgaacccgggagacgaaggttgcagtgtcccgacacagtgctactgcactccagcctccatgacaaagtgagactccgtctcaaaaaaaaaaaaagaaaagttatttaaattaatgataacataaaatttgacaggaaaccagaagagaagaattactcaaaattccacactaggtcttatttttagtatttatttttcatgcttttcaggctaacaaacttaaacacagtttcaataagcttttataatttggatatcagctcttgactttaacattctttgcatttttccaagtcttcatggaaaatagttttcaaattattattttcaatgactgtataatattccttatggtgtttctaccagttgaagtattctttttttgtttggatgtttggactgcttccacattttccctatggtagatgatgttgcagagaacatcttccctggtcatttttctcctccttttttattatttcccaacaatttcaaagaagcaggatgactgggttaaagggcacaatgttttcatggctttagtaactgttgtggggcttgaatctcgttatcttggtcagttatttggctccagcttttgtctctatgctgatcttaaatgagtacaaaggccactgataagaccgggtcagccagacagagccaggctcatggcagggtaggcagaatgctgcagtgcggtgcaccccactctcgcttgtgtaaatatttttctgggcaggagcgtttctcaaacagaactctgagcccactgcggtgaacctgatagcaggaattacgtgctatttgtcaagtataagactagtttgcagtgactggtctggctagaacccacctggtgttttctgagatcatctgtaaggaaacacacagcacagcagaggcagtgtgcgcccgtggtggtgagtcttagacctgtcatctgtgttagcattaccccgaaggcagagagtttgctgattagaaactatggctgctttaattcatgggtaccctccgtgacttttcagggtctcctggttgaatgaatttgcagaaggattaaaatgtgtgttcttatttgtgctttgtattctcccataagtagtgtgttggaggctattagaatagctgagagggtaaaacataaacacataggtaggagcctgacataaacacataggtaggagcctgccataagcacgtaggtaagaactaaaagggtgtgtttccatttcagttgtccagccttccttccatactctcagatgacaaaacacaagttgctgagctcacacagctaatgactaagccagaagttggacatggagaacatttttcctttgttcaaggttatttattatgttgacatttaaaatcagaagtgtgatatctgtgaagttctgattaaacagatcaagtgaaaaggatgtagttcagaaaactgcataaaaccctaaagtacagtgtttaaaaataaaacgtcctccctgatagggattatgttggtaagttactttttttcttagtatggattatttcaaattaataaacatattgttattcctttatttattgcatcatacagcttcatcctagtattagtgtgtttaataattgcatttaattagattatgcatttcaactttcaatgaaactgtagctgttagtcttttgaaggctaatttcacgctgaaatttatagatgaaataattttcttatagtggtggtgtttgagaagataatgtaactacttcttagatttcaatttcataacccttaaaatgttgggaccacctacaaatgggggacaccctgggttttgaagtcttgcctgtgtggttaatcagaacctcagaattcacccagcccccggagaggttttgaaaagcccctggctcatcagagcttgcttgtttcataaactcttaaggctttgttttaacctgtagccagcttcgccttataagctttcttgccccaagccttgagccagtcataatggcttaagcatcagatttcagacaggcgattagctctccagctaagccaagaaaggatgatttatcttccagtgagtaccagcctatttgagtgtaggaaggagaaaaatctgtgctcctgctcctgggtactgggcaaagaaaccctttggttggggatttttgcctggtaccaactttataggtgccaacaagaaagaaagaaaaaaacacatacaaaataaacacccaacagggagattcgctgtgttaagaactcgagctgttgct

SEQ ID NO: 41431 - DNA, 2300 bp, Homo sapien
ctgtgctctgctcttcctcagcagacttctcgttgtgagtattggcatttatttctgattatgcacttcccctctttcttgaatgagttgggtgggctagctgagcccatcaaaggtatagctcatttgcttccttttccagggtttgccttcttcctgtgtctgggataatttcagttcatctcctttgtgcagtttctgagaaaggtttgtatgggcttagaggaaaatgatcgtgactaaagctcacagtcaccgctttggctccttttctataaaaggtggtttgatttgatctggcatgaaaaatattatcataattctcaaattcacagaaacgataagttcttgctctttcctgaccaaaaaaaaaaattaattgcattgggtagacttctctaataaaacctttaaggagacccatccaggaaatcagattttataagattcattcaaacagttgtagaaattctaagttcaaaaaccaaaagcagactcttttctttttccttccttggcttctctgttggatatttttggagtgagccttaactgagttactcatttccacatgctttaggaaaagtatgctcatgttttacaggctaagcctggttctgcttttgagctgcagttcattatgaatccggaaaacacaggtttttgaaatgcggcccatttgtacatatagcattagtcatctcagctggtagttctatacgatgagttatctcaccacttaaaaataagtacgctgctattttgagatttaaaaatatatatagtgaccagatttcttaccctagttaaagcaagccatggctgaaactcagattaaacaatattctataaaaatgagagaaggccactctaatcaacagatagaaaaacagaactatagacataagggagagctgtgctaagggacaaattgttggatttgtaggatttgttcgtatcctgaaagttaaatctttgtactcttaccttgtttatggccagatttgcctgatccctgatttccctcccaactggatcagaggttgtggaattggaatttcaccatacaaacctttacttaaaggaggtagtactagagtaaccatttatgggaacagtttgctactaatagttactagtactgagtttattttagttcctttttcatgattttattccattggaaaagttttctctcagggatcttttctactttggacatgatctctgttaggcagaatcaaaagatagctgtgtggctttctgaatttagtctcacaatatttggtttagttgataaatcccatccatcagctttgcaaataattttgtgaaaacattgattcagcttgtcctgcccaattttcccatccctgcccagtttactgagtgccttttccatttgcatccactgtccattaggccaaggcgtttgaagtgtttctgtacagcaggtacatttaagactctccaggaagaaagggggaagaatattccaaactgaaaacatcaaagagagagatggggtatttccagtaacttatatgcccagtgcttaatatcttaaaaaccctactcatgtgcatcagctcttacttttttctaactaaaaccagaaaaaagttctctcttcctctgttctcagtatccccctcatgtaagtctgtctacccaacacggtgcagccgatttatttatttttccctcagcatttttaggtggattgactgggatgctttattcaactcagggacgcaccacgaatatgttttttggggcaacccgtttggcatgttccccctcagctgtgaggacaaagactggtttgtcttcttgtgacctggcagaggaggcagaagtacctgctgagcttatgcagcatgtaccccaaccggtgccccacctcttcaagtggtgaatcagcctgatgatacactgatttttagaacacgctagggtggagacctggaagtctgtacactggtcggggagggagggatggtttgcatgtcaaaccatttcaacaatgcagcttacaggaaaaaaaaattaattgcaaaacactgtgatgccctttgccaccagatttttccattagcaccacactttatacagcttccaagtctgccccagggacaactgtttggcagtgtgaggggaaatggcagcatcacgtcataagtgcaatgattgttacctatgagcctatccggtaagggatctgagtgggcccaagcatcacacacgtgctggagctgagtgttctctgaggaacatgctaggatgttacttgggtgcta

SEQ ID NO: 41432 - DNA, 2300 bp, Homo sapien
ctccccctggccaaaaaactgtaatgttttgttagaaaagcctgttttatccctaagttagccagtgctccttttctgcttttcacagaattactctctgaactggcacatttcttttttacgcttagaacagcatgttacttttgaagaaagtttggaaaataacagtccaagctcattctcttctgtgcatgcatgattgatttgggctgtatttcagcaacaacttttaaaatgagacagtggacattagagagcagcatagttggggttgcacttaggagcccatggcattttggctgttttgagacagatttggggtaaagagttgctgcatcttgtagttggcactgaacactggagaagagggccactgtataaaccgcaaggcccctgttaccatcacatgcctccctagcacaatgtgccctttattaagacaggccgttccactactgagaatagtaaccctttccgctgtcttcccctcactcttacgtgcagcctggcttctggcctcttaacccatgcccagagtagaattggcaatacccaggagggacactgcactggggattgttaggtcatgccagttaggatgcagctggaaaggtgctgctgagtgggacgtgcagaggggaagactgcaggctctgtctgcctgagctcatctggtctgacacctgccgtgattcatttttcttcatgccatgttaagaaattttgtatcaagtctagtcgacagttactcatagcctggaagcaactttggaaatcagagttccactgacccccctcattttaagggtatgaatcacatcactgcattgtatgattccagggctctcttgcccatggctcgtgcatgaactaggaagtgatcatagttcctgttcttgttttatgaaaacaatagtataccttcccccaacctaggcaggccattcaggacgactaccctggaggtgctctgggtggcttaaagcaccgtctttgcacagtgtgttagagagcactgtgccctgaggacttcgggagagctgcagaatgagtgttcagaataatcggcactcacctttgccctcatgttgtgagatggagatattttaacctggccataatatgctttaaaagttggggggtgtttgtctgcttttgcttttatttccttcctgtgctggactgggactcccccttatctaactggtacataccactctgcccaagcagtgcgtgtgcacacacacatcccctacagctccctgctggcatctccttcatacactcttaagaagaagaaaccaatgtagaactcaagattttagcagacttacttggtcttgaacaagtatcacaaataccttaaaccctgacttcgtgggggggggggcaaggtatagaggaggaagggttctggatcctctctggggggccagggttgtgttcttctccagacaacagagggtgatccagtaccactagtagtgacaatagaacccacccattgttctaagtgacaacacactgatgcaggtactattattttctcaaacaattggaatatagtctaatttgccgacagctgcaaagcagcagagccaggattcaaacccaggcagtctggccccagagtgcctgcttcaaatcactacatctcttcctctgttatacttattcatcagtagatgcctagatgtggggctttacacttcagcagatactaagagggccatgtaccaagcgccaagtactgaggaatacaaacataaatactgcttgagggccaggcgcggtggctcatgcctgtaatcccagcactttgggaagcccggctcacgaggccaggagatcgagaccatcctggctaacatggtgaaacgccgtctctactaaaaatacaaaaaattagccgggcgtggtggcgggcgcctgtagtcccagctactcgggaggctgaggcaggagaatggcgtgaacccgggaggcggagtttgcagggagccgagatcacgccactgcactccagcctgggtgacagagcgagactccgtctcaaaaaaaaaaaaaaaactgcttgacttctgcctcccctagacacttagagtctggtagagaaacacaggcatgtgcttgctaactgtaacacagttccgcgtatataggcaaagtgacttaggaaacaagagggaagaaggggaccagttattcccaggacagagcagttgagggtaagtagggctttacaaaaatgaggtatctgggttgggccctttaggacaatgcagctgattttgacagat

SEQ ID NO: 41433 - DNA, 2300 bp, Homo sapien
aatagcaagaactcatctctattaaaaataattttaaaaaattaaaattagccaggcgtggtgctacatacctatagttcccagctactcaggaagctgaggcgggaggatcacttgagcccaggagatagagactatagtgagccatgatcgcaccacgtcactccagcctgggcaacagagtcggaccctgtctcaaaaaaaaaaaaaaaaaaaaaaaaagagcaatacccacgtgttgtaaaaattataaaatataaagaataaaaatcatctataattccacaacctaaagataacaactgaaacaatatcatggaagaaatgtccttaacactaatatttaacgaacaacttctgtcttcagagcatcaagatgtttttcaaagtttattatcttattctgttggccaggcacagtggctcacagctgtaatcccagcactttgggaggccgaggcaggcagattacctgaggtcaggagtttgagaccagcctggccaacatagtgaaaccccatctctactaaaaatacaaaaagtagctgggcgtggtggcacacgcctgtaatcccagctcctcgggaggacgaggcaggagaatcccttgaaccagggaggtggaggttgcagtgagccaagatggcgccactgcactctagcaagtttattatgttatactatatattcagttatttattccttcagtaaacgttgtcagacatctcctttcttcccagcatgttgataattggtgtgtggttgggagaggaagcaatgaaaaaaaaaatgtatattttttttgggggggtgggggcggagatgaagttttgctcttgttgcccaggctggagtgcaatgtgtgtgatcttggctcactgcaaccttcacctcccaggttcaagcgattctcctgcctcagcctcccaagtagctgggattacaggtgcccgccactatgcttgggtaattttttatatttttagtggagatggggtttcaccatgttggccaggttggtctcgagctcctgaccttcaagtgatccaccctcctcggtctcccaaagtgctgggattacaggcatgagccagcgtgctctccaaaaaaaattttttttaattaagttttttgctctctgggtgcttatagtctggtacaaaagacaaaaaagtgttttcgtcttgttaaagttgggaaataaatcagggactcataagtgcctaatttatgttgatgtatgtaaacatacactagaaaacaggatattaaaaaaataatgacaccgggtagttttattgtagaataatttttaccatggacaattgtttgtgaaaatgacaccttgaaaacacatcttacttttttacttgctggagaatgaaacttgaattacaagtcctttgggtagcctggtttgagcagtattaggaaataagcaagcctaacttagttaaattctaacctcttctgattcccagaagtccaaagttcatttgggggtaatacaacgtgatacatgctttttgtgatttctacaaggtgaactaaagaaataactaaagatggaccagttaggttttggtaaaaactgtgataagttttgttgtgttttaaatactgatgttgagtcagttcatctttcctactgaaaatccttaagtgggaaaagtatagaaaaagtaggagttacaccaaaatattaacgcttgccacttgatggtaggatctgagtgccctttttttacgttctttaaattatctgtatgtggcttttttttttttttaatgttttacaagcatgtactactttcgtatctggaaaaaggtttgtttttctttcattttttaagaagaacttttcatcagtggcaaaggctcagttgaaattaatgataaaggataactacttgccacgtgtcataagcccagggctgagaagagtcaggcagtgctctggaaccagtgagtgctgcccggatcctgagaacccgcagagaacagtggggctgattgtgcctctgcacctcctcaggtgaccgagggctgggcaggaggacacagactctttcatgaagcagtgactagtataggaaaaacagagcctctctgtagagatgcttaaagtgctagctttatttaaaaatcagctggcaaagcgggagtgaagaacacacattttcagaagataccggtttcctgttttcattaagaaaacagggaatgcggaacagctgagtgcggcgggggtggtgtcactgcagccggagggagacctcgccggtgaaagctcagcctat

SEQ ID NO: 41434 - DNA, 2300 bp, Homo sapien
ttgcttttaagtttgaaatgcatagcccaggtcagcgacaaggtctgcgctttgaaaggttcttgtgtttcctcttttaaatgtctggtttagccttaagtagtatttactgagtgccacatgatccagtggttggagtatgtaggttttgcccttatcttcattctttgcatctgtttgaactcatgacaatacaaaacaaggtgttcctgggatagggaatgttttgtccaaaaggagtcaacacggagaaaactcttcctacagttaagacagggtttggttttgtttttaaatgaggagagaaactgagaagtggaaaacacaaaatagagttgaagtctttcctctgtgtgcttctactcatgctgccagagttaatcactaaatatcccatgccccagctttctcagccggggaggtgccaaggcaaattgtaagcccatggaggtagtcaggagctgagtgcccttgacctccatttagaaaggcagcccagtctgcaaaagacagcagcagggacatctcatcccaggcctcctggttatgctgctgactttgtctgtctgctactgacttttagtttttttgtgtgcctcagataacactttgaaaaacaggaatcttaatgtctgctgtctatattccaagagactgtagatgaccaatgaaattatctactggacaatgctttcatgtcttttttttttttttttttaattgagacggagtttttgctctgttgcccaggctagaatgcaatggtgtgacctcgcctcactgcaacctccacctcctggattcaagcaattctcctgcctcagcctcccaagtaactgggattacaggcgcctgccaccatgcccagccaattttttatttttagtagggacgaggttttaccacgtgttggccaggctggtctcaaactcttgacctcaggtgatccacccgccttggcctcccaaagtgctgggattacaggagtgagcaccgtgcccagcctttcgtgtcttttataatgaattcttttaaaaatatttagtaaggacttactatgtgcttgtctcttaatcattatctctgagtactgatggacataaagatggaaaaagatggaaatagtagacattttagactacaaaagtggggaaagaggggagtgagggttgaaaaattacctattgagtacggtgtgcactatttgggtgatgtgtacactagaagctcaaagctcatcattacacaatatatccttgtaacaagcctgcacatgtactccctgaatctaacatacagttttaaaaaataatacaatcattatctcattacattgtttttaagcctgtgagttaaatatttgcatctccatttttactcagggagaaactgaagttaagagaggtttattaacttgcttacccaagccgggcgcagtggctcacgcctgtaatcccagcactttgggaggccaggttgggtggatcacctaaggtcaggagttcgagaccagcctggccaacatggtgaaaccctgtctctactaaaagtgtaaaaattagccaggcgtggtggtgcacccctgtaatcccagcaactcaggaggctgaggtaggagaattgcttgatcccaggagacggaggctgcagtgaaccgagatcatgccattgcagctccagcctgggtgacagaatgacctgtctcaaaaaaaaaaaaaacaaaaaaaaacaaaaaaaacttgcttacccagctgttgtagatccaggttcaaaacataggtgtgtcaactcttaaaatcataccagcttgctgtactgcaacaaacacaaatattagtttttaccattaggtgtattgcatgtcattataatattcttttctccctcttctaggaaaagcaggtgatattctcagtggagaccaggacaaggaacagaaagacccttactttgtggagaccccctatggttatcaactagacttagatttcctcaaatatgtggatgacatacagaagggaaataccatcaaaagactgaacatccagaagaggcggaagccgtccgtgccatgcccagaacccaggaccacatctggtcagcaaggtatatggacttccactgaatccctctcatcctccaacagtgatgacaacaagcagtgccccaacttcctcatagccagaagtcaagttacatcaactccaatctcaaagccacctccccctctggagacctcactcccttttcttaccatcccagaaaatcgacagctgccacctccctcaccacaactccca

SEQ ID NO: 41435 - DNA, 2300 bp, Homo sapien
cactttgggaggccaggttgggtggatcacctaaggtcaggagttcgagaccagcctggccaacatggtgaaaccctgtctctactaaaagtgtaaaaattagccaggcgtggtggtgcacccctgtaatcccagcaactcaggaggctgaggtaggagaattgcttgatcccaggagacggaggctgcagtgaaccgagatcatgccattgcagctccagcctgggtgacagaatgacctgtctcaaaaaaaaaaaaaacaaaaaaaaacaaaaaaaacttgcttacccagctgttgtagatccaggttcaaaacataggtgtgtcaactcttaaaatcataccagcttgctgtactgcaacaaacacaaatattagtttttaccattaggtgtattgcatgtcattataatattcttttctccctcttctaggaaaagcaggtgatattctcagtggagaccaggacaaggaacagaaagacccttactttgtggagaccccctatggttatcaactagacttagatttcctcaaatatgtggatgacatacagaagggaaataccatcaaaagactgaacatccagaagaggcggaagccgtccgtgccatgcccagaacccaggaccacatctggtcagcaaggtatatggacttccactgaatccctctcatcctccaacagtgatgacaacaagcagtgccccaacttcctcatagccagaagtcaagttacatcaactccaatctcaaagccacctccccctctggagacctcactcccttttcttaccatcccagaaaatcgacagctgccacctccctcaccacaactcccaaagcataaccttcatgtcaccaagacactgatggagacccggagaagactggaacaggagagagccaccatgcagatgacaccgggtgagttcagaaggcccaggctggccagttttggaggcatgggcaccacaagctccctcccttcttttgtgggttctggaaaccacaatcctgccaagcaccagcttcagaatggataccaaggtaatggggattatggtagctatgccccagctgctcccaccacttcctccatggggagctccatccgccacagccccctgagctcagggatctccaccccagtgaccaacgtgagccccatgcacctgcagcacatccgcgagcagatggccattgctctgaaacgcctgaaggagctggaggagcaggtgcgaaccatccctgtgctccaggtaaagatctctgtcttgcaagaagagaaaaggcagttggtctcacagctgaaaaaccaaagggctgcatcccagatcaatgtctgtggtgtgaggaagcggtcctatagtgcggggaacgcctcccagctggaacagctctcccgggcccgaagaagtggcggggaattatacattgactatgaggaggaagaaatggagaccgtagaacagagcacgcagaggataaaggagttccggcaacttacagcagacatgcaagccctggagcagaagatccaggacagcagctgtgaggcctcctcagagctcagggagaatggagagtgccggtctgtggctgtgggtgccgaggagaacatgaacgacatcgtcgtgtaccacagaggctccaggtcctgtaaggatgcagctgtagggacacttgttgagatgagaaattgtggggtcagcgtgacagaggccatgcttggagtgatgactgaagctgacaaagaaattgagctgcaacagcagaccatagaatccttgaaggaaaagatctatcgcctagaagtacagcttagagaaaccacccatgaccgggagatgactaaactgaaacaagagctgcaggctgctggatcgaggaaaaaggttgacaaagccacgatggcccagccgcttgttttcagtaaggtggtggaggcagtggtgcagaccagagaccaaatggtcggcagtcacatggacctggtggacacgtgtgttgggacctccgtggaaacaaacagtgtaggcatctcctgccagcctgaatgtaagaataaagtcgtagggcctgagctgcctatgaattggtggattgttaaggagagggtggaaatgcatgaccgatgtgctgggaggtctgtggaaatgtgtgacaagagtgtgagtgtggaagtcagcgtctgcgaaacaggcagcaacacagaggagtctgtgaacgacctcacactcctcaagacaaacttgaatctcaaagaagtgcggtctatcggttgtggagattgttctg

SEQ ID NO: 41436 - DNA, 2300 bp, Homo sapien
cccctcccacatttaatgtactttggcaatagagttggccagttcagagcttttgtaattaaatgtttgcttttatctgttcctcagaggtatacacatcttgagatactaatatatacaagtgcagagtattacaactcttagatctcttatggtagaatggcctggtacctaatcacccttgttttctgaaaccttaactctgctatataatttaacatatggaaccacaatccactaaaacttgcattgtttgaacaccttaccttatatttaaagacattttaattttttggtggccagcctactttaagatttcagattttatgtttagccatttatcttgatacaggtgtatcattattacaggatcattgtgtggatgaggcctcagccaaagatcacatatactgtaaagatgatgcatatcacttacatgtttgtattttgttacacattgaatgatcaggaataccacaagaatggatttgggtatatcataaatagtagctgaaaaacactctggttggctgaaatatgtgcctcagaatgtaagttttcaagaccattagataaggatttgatgctcataaaatagagagtagaaaaggtggaaacttcagtatggtttttcagtatgtgaaatataaatagaacatttcagaaaacttacctctatttaatttggcaaatgaaagtttaactgcattaaaacaaggtaagtgtttttagtttatatttccaagtgtttcacatggctttttaacagctttgagatgtaatttatataccatatgtcatttttttacttttcatatgggttaaacacttgagtcaccaaatgtgggttcagatgtgtggtttactggtcagcacgatggatatatggtaatttgtggaaagtcaaggcaagaggatcgcttgagcacaggagtttgagactagcctggacaatatagtaagacctcatccctacaaaaatatcaattacctgggcatggtgtcacatgccagctgctctggaggataaggtgggaggatcacttgaaccctggaggttgaggctgcagtgagccagtgcactccagtctgggtgacagagcaagaccctgtctcagaaaaaaagtaatttgggtctccttcaacccccttaaaattaaaaatattttttaaaaacttagaacaggttgggcacagtggctcacacccataatgccaatactttgggaggctgaggcaggcaggcagatagcttgagcccaagagttcgagaccagcctgggcaacatggtgaaaccctgtctctacaaatacaaagccgggtgtggtggcacacacgtgtaatcccagttacttgggaagctgaggtaggaagattgcttgagcctgggacagcaaaactacagtgagccgtgattgcaccactgcactccagcctgggcaacagagtgagaccttgtctcaaaaaaaaaaaaaaaaaaaaaaaaacttaaaaatggcaaaaaaaaatctctaaatgttattccagaatgtcataaaggccaattggtgaagccgaatgtcaccctcccaaacaaggcctcaatctctggctggaggtgttggctctgcacagtggacgtaacccttagacccctaaggatttctgtgctgcctctgcccaagcaccttgtgccataatgacctgcctgggctggcttggggccacttgccttttaaaaatatatttttaaaagttgaagctgcgcagtgtcccacccctgtaatcccagcactgtgggaggccgaggcaggtggatcacctgaggtcaggagttcaaaaccagcctggccaacatagtgaaaccccgtctccactaaaaatacaaaaattagctgggcctggtggtgcacacctgtagtcccagctactagggaggctgaggcaggaggattgcttgaatccaggaggcggaggttgcagtgagccaagatcatgccactgcactccagcctgggcgacagagcatgaccctgtctcaaaaaaaaaattagatatttgggttgaaataaaaatgattttcttcttgtgaccaatcgtaacttgttttttctcctttcaggtatgaattaagtgaaaagatgttgtctgcatgcaacttactgaaaaatactataaatgaccccaaagctttgaccagcaaagatatggtgagtctgacctgcaaacaccatccccagtgtgtacaaagtgcatgagtgggttcattgtcaaggccagctgtaggctgcccgagctgttgcttgcatgcttttctcct

SEQ ID NO: 41437 - DNA, 2300 bp, Homo sapien
gcatggtggcaggcgcctgtagtctcagctacttgggaggctgaggcaggagaatggcgtgaacccggtaggcggagcttgcagtgagctgagatcgcgccactgcactccagcctgggtgacagtgcgagactccatttcaaaaaaaaaaaaaaatttggcgtggtagcacatgcttctagtcccagctacttggaaggctgaggcaggaggatccctttagcccagaaactggaggctacagtgagctatgactgtgccactgcactctagcccaggcaacagagcaagactctatctctaaaaattaaataaataaaatataaatctggaaaaagaacataaatattggataacagcaattgacatgcgtgttttaatggaagattgttttaatggaagatttaagtggttatcatttataagtttccaggatggaatagattgttgcatcctagctcctgtcaggagtagagcttcactggtttcacaggtagggtatgaggtgctgtgtaaagctagaagcttcttttggaagtaattttcagacagagaatactaatggagaaatttcagactgagggaaagggcctgtgagagaggcctcagaattagagctccaaaggcagattcgaggatttcagaactcagtgctgaaaacaccaaactgctgaaagaggtggccacagtacaaccattttgatgagaagttgaacagggtgaccatgcctctttggagaaataatcccctaggtctggaggcggcccaggatcctgaaggtgagtaccagtgctggtggaaaataaggagcattcaaagtgcattaagagccactccggggtctttaacttgttaacatggaaaacaatagcaaagtactgctggggccccctgctgtgtgtatagaatataccggaagactaagacatggagatagcagctgggagctaccgcagagattcagacttgaggtgaagggctggccttaggggggcacgtgggtgtgtaggaagaactgctcagcaggccttagggatacatttgttgtgcaggtgcagagaggacacaggcatggctggggcgggagttcaggatgagaaccctgggacaggctgtaagatgatcgagccaggggtgtgtgtgtgtgtgtgtgtgtgtgtgtgtgtgtgtgtgtgtgtagaggtataatgacatactgtaaaatgcaagatatgaagtgtagaatgagttttgatacatttctacatctgtgtaaccaccccccacaacctcagttttttttaatacatatgtttctttttaagtttgagtttcccgtgcctgcagagtctaagtttaaacagcctcacagacaagaagctatatgcacctgaagtgaacgggaacacgggctgcaacagtagatcgtaaagttatttggagcgaaggaggtagaagtgttgtgagcaaatgaagacaggtgcaggaagggataaacggagaacagaaagttccaacctttgagatttttgaagtgcttgtgccccaacactgaggatcttctttgccgtatatagggcaactctgatttaccctataaatttctcaggccttccacctcatatttaattctcttaagcgagaaaaaaaatttttttctgacttggctgctgccaaggtcggctctatcaaatctggtgcgtctctctgggggaaagggagctagaagaccccatagggtggtttgcacctcctctaagcatgcaagcacggctctggtcttgacctggggagcccagcttcctcggtgcaccgtgctttggcaaccgggtcttggcgcctccgagagcggggcgaggggtgccacgcgattcccaggccgctctgtatctctcggtgcgcttgcagggaccctgcagcaaagccctggatgcttgcagccggtgcaagtttgcaagcagctggagagcggtggctggagtcggggggcggtgggcgtggccacgctccctcccaggcagtcccgggaatgttctgaaaagtatccgaaagttctgagtcgcgcgcgcgccaaaagaaaaggcacaaccccccaccactccgggcgtggcgtgcccagacctcgccactccagctgcgcctccggctgcagcgcacacgtctcctgcgcctcctcctccggagcgtcgctgtccgtcgggttcatccctcgcagcagtctccaggcgagagagggggccagagtgctcgcacttctcctaggggcaccatgcccaacgacgaggcattcagcaagccctctacaccgtcggaagcccct

SEQ ID NO: 41438 - DNA, 2300 bp, Homo sapien
gcttacaaaattccttccagttgtattttagggcttgttttcctagagaaggttgagactagaggaaggattaaagtggtgggggaaggggcaagaccgaggggtccctaccccacgcggctttggaggatggcctcccagggttagcactcgaatgctagagcttcttgtccacactctaccaggtcagtgtcccgcgatccccacctcccggacgcgtatgaaacgggaacagctaagggcttcaagggaaacacacaactggggttcggttttcaaccctcctctccgcaaatcagccttctgggcagagggttggctgctagaacgcctggaggtgcttcccttgaattcatggcaaacaccagaggaaagttttcaggttgcttgcttacttccagggcagtacagagaaaagcggcctccccgaggggacaagggcctctgtgcccatgaggggtcggacattgcagcggacttgcctacgctctcatctagcatttgattccccaccaggagatgggcttggtgcacgctctcagaagcgcatccaccgaaggctctggaactgccccgcttcgcatagagctattgtgctgccctgcagtgtatccacttgttttgtttgtttgtttgttttttggtttttgcttgtttgctgatgggcagtggggaggtgcgagggtggagggccttctttgtgcatatatagcgatagtctgcactaggccaagcccgctactcctgggagaatgggaacacgcaaataatctaaacaaagttttctgctgtcatcttgtgaaggaccctctcccccaagacatctatgactggggtctatgggttaaggaggtgaaaaagtggccccatcccatatccataactgaatcacagaatccgtggggatttgaactgagtggctggcgcaagacctccgtttgcttccagtagctgctgggagcgagggaagaggatatcggtaactttgggggcgccaatgtggcttctgtgtctgccccttgaaagtttatacccggcgcttaacaaatcctttacaggagcacgtacgtccctgacctttcaggatactgttttatattaaaacatggacaggagggtagaaaagtaaaattcgcctgcaaaatggcttgtcatccttgggccggcagatctccaaaaccattttcttctaaagcaacaaaagagaaaaaaatacgttctaaaaggaaattacgaaaagagcctaactttcctaaaccaacatcacttcactcccctatcctaaactccacccaggtccggggtgcaaccgcaacactcccgtaggttcgagttctcccggagctgagcttctgcggccaaatgtcgggataaaagcggccttgggctcggaaaaacgcggccagatctggactggagggaggagaagagagagaagcggagcggccacctcactcgcttacaggcacccccaccctcactcccgctggtcctccccttctccgccccgcgagcaccgccgcgttctggagcgccgcagtctccagccgcgggctggggtagcggagagggcttggaggagggggccgcgagcgcccccgcgagagtggcctggctgcaggtggcaaggaaggtgaagtgcaggcacccgaggggcgcaaaggaggaggaaggcgtggggcggggagtgcaaggagacagggaccccaggggcgggggtggcggtgggaaggaggaggggttgggggagggcggcggaggtgttgggtccggccggctcacgagggagctgcagaagagctggctcagaccttaatcagagctgtcgccggctccttgcagccgccgcagcgcctccgcgaaggaggacgtgccgacccggctgcgcgcccaaggcagaggcccgcgtcggcgttggctgggcgtgagctgggaggccgagctgtgagcgcgaagggagctggagagacgactgcggcacctccggccgccccggagcacacacgaccaccggggctgcgggaccaagggccgcgtcgcccggaggccgcccctgagcgggcctcgcagccccgccgtccagcgctccctggccctctcccgcagccaggctgccaactcattcgggagcccggggcatgaacggctacggctccccctacctgtacatgggcggcccggtgtcgcagccgccacgggcgcccctgcagcgcacgcccaagtgcgcgcgctgccgcaaccatggcgtcctgtcctggctcaagggccacaagcgttactgccgcttcaaggactgcacc

SEQ ID NO: 41439 - DNA, 2300 bp, Homo sapien
aactgaatcttttgtgaaactactccatgtcccatcgtttccctagttgatagattccacccaccccctacatttttaactaggtaagattaatagcagtagcatagaggagcaaaaatatcaccaaaatgtcaaaaccaatgccaaagcttgtttctaattccccacacgccaccttcttttccttctcctctcctcctcctgtccagcttggactttcttcatacccttgatcttgctacctgagcaagcagtccatcagatgggagttaagatttgttacagtctttaacgtttgaggcagaacctagaaatcaatgtacttccctccttcactttacagtcaaggaagcccaggcccaggaaggtggaaagatttgctgaggggttcatgcacatggaagaagttaacttttcatcacagcacctgccttgccaacacttggcaatcccccccccgccccgccccgccttgattcctctctacctggttgttagactgctgggaaaatatggagagtgatttcagtgtggataaagcctgcccccttgaaatgtaaaaccccaaaatagaatgggaatagggagtggaaagttctcagagttaagggtttactgttccagttagtcgtgaggacccctaggggctgcaagaaggctctcgggggtgaagagctgtgtgtctcctgatgtggcaaccagccacatgccctcccaggactgccttccatagcaaggccacagccccgggggtggaacccaggccccagtacagcccacggtatctgcctcccctgaggaccatttggaatgggtactgagaagtcaagaaagtctgcagttgcctcatctcctggctgctaccagccccccaagggaattgagccacgtttcccagcatggaggatggaagctgccgggggttgggacaggcgggctggcagatcctccagatagatatgctaggaagggacgattacttcatagtcggcgtctgactccgtatcccgctgcaaagagcacatttaaaaagacggtatgaggcagggagctggaggtgctctttgaccccgcacagccactgttttagctgtgtgtctcccagcaactcccatgagcttctccgagcttcagtttttcctttcctttgtaaatcggagcagggaaagggaggattctttttttttttttttttttggttttttttttgagacggagtctcgctctgtcgcccaggctggagggcggtggcgccatctcggctccctgcaagctccgcctcccgggttcacgccattctcctgcctcagcctcccgagtagctgggactacaggcacctgccaccacgcccggctaatttttgtatttttagtagagacggggcttcaccgtgttagccaggatggtctcgatctcctgacctcgtgatccgcccgcctcggcctcccgaagtgctgggatgacaggcgtgagccaccgcgcgcggccggaaagggaggattcgaacagcctggcggagagaattgtctcccgcagtctccactccccacccccatggcttgcgacgggtcgcgtatttgattacgcaaagtaagttgggaaatcctatgtccgcaatcccatctgggattatttatttcgccgcgtccgcagccggtggaagtcgtgagacggtgcaacgctgagcggctttccgcagaaggaggtgccttcgaggccggctctggaggagccacagccaagccggccacagcaaagcacttctctcgggatgctcagacgttttcaaatgccggtcgccaccctgggcgctggcggcaggttgacttagccacaggcgacttaggctgcaggtggaaggcgaggattcccgccggcccccagcctcctctgcaggcctccgaagctggagagttgggtggaatagggaggaaatcgggcttcggatgccccccagcctcgggcgctctgcaggctagctcacggagttgaaacaaccacaaaaatgatacaaattacgcgcaagcactgaatgctcagtgtgggcgggtcaccgtgccggggcgtccacgcgcgtcgcctcctcttaggtggcctccattctgcagttggggaaagcgaggcgcagaggagggttaagggacctcctcactgtcccggccagggaggggcggatccgcactccaacccgcctctgtcaggctgggcctctaagccgggccgtccgcgcagagtccgggcggagctggggggtgtggggggaatgctcggggcaggatccgctcccgcgattagctct

SEQ ID NO: 41440 - DNA, 2300 bp, Homo sapien
tcctgtttctcctccagtccctcttcccctcaatctagtttcccaaagttagcaaacctactttcttgattttgtttcttaacatttaaaacaactggtgaagggctaatgatttcatctccttaccaccacccctaaccttaaaagcaataaataaaataaaagcccagcctgccaaccgcatgcacacacggccagcggtggtgggggtttgtagtttgcatacacgtcgcggggcagaagcctgtttgcaaaggctgaaatgtagctagcaggggaagacgctgaaaaaacagagtgatttgataaaaacgtgctgggccctgttacaggagggctgctgggagtagtcccaggtactcacatcagaaggggtgcaggggaataaaatttaaaaaagcaaacccatggcgagtctttcttgctgggagtgaggggctctgcaaaatttctgggacttcagaacagaggtcgacaaggtccattgctcttcccgagactactgggtgatccagggctcctctctgaacctcagtttcgtcgttggaaaaacggggataggaacatatttctgttgctgtcaagaatttaaacgctccagtgcaggtgaaggaaatgtgctttgatgactgggtataaaaaatgtgcaaaaagaacctggcgttacaaggtggtgtcaagggagaggaagtaaaagtctgtatgacctccctgtcgcttgtcggagcgcgcaccgctcccaagtcaccctctgagtcgccagagctaccgaaaagccgatgggaataagcaggactgtttctctacttccttcattgggcttcgcaagaggctctgggaagaagcacccgtacaaatgggaatcccagtgcctggtcaccggggaggaactttacaacatcactgaaggtttgagaatagtgcttctggctggtcgcggtagttcctaagctgcctttgttcccacttctctgatccaggttaacttttaacattctgacaaactcggacaaaagtaacgttgggattacgtcaggaattcccacccttcaacaaatatttgttgcgggcctactatgtactcagtgcaatgatacccaattttgtagtctcctaaacagatcctactcgagaggtcttgattatttacagatgcagttagaaaagcgcccatattatttttaattgagttcaagaaatagaatgcagcgttgaattagaagactaattccttcttttaatatgttgaaaattttttatcgttaaacattttgtaaaggattttttgagggagtcgttagaaagtctataaatacaactacgcacactaaaaagtagtcatctttttaaaaataactttgtttaaatgcatgcttagtgtgaatggatttacctaattctcttaatagcatgcatttctgatcttccctacattaactgtaatagcaactgatataacagaaaaatgtaagtgacttgtagtcgacttggccacctgccacacgggctcggtgaaggttaatgaggagctatttggcacttcgagaataggtggcactagacacagaaatatcaacaggctatttgtatgctaactaggagtttcggtgccaggtaaccattgatgtactcttgcaggagaaagaaggatgtcgctgtacgccccgaaagagaggcatcatttttacgcccagtttggattaatgattgattgagtcgcagaaatgcttgtgatgctgatagaggccaatactggtctttctgatctcttcctcgtcgtttattaccttctcttgtggacaacgcattcctaagaatgtatctctgcttgtttcccagtccgcgagataaatggtgacttctctcttgcaggcaccgtcatacctcgggtttagattctggacaggcgagccggctgcaccgaaggcccggtaggcggactctggcggagcgcttcagagagaagagtgtagaccgcgggaggcggagggctccctgccagcgtgcctcggccaatcagtattcacaccgcctgacaaccggccaatcagaggacgtaaagctccggggcctgagcggacagtactaggaaggggagcgcagtctgcagactgaagccagtggcgctgcgctgaatgcaactgcgcgcgcccgccgggtgagccagcgatctgagccaggcgggggcggcccgacctttcccgcccagcctgggtcagaggaagccgaaagcggcctcagcaaggtgaggcgcccgaggctgcagaagaccgagcagaactttgcagagttcgggatgt

SEQ ID NO: 41441 - DNA, 2300 bp, Homo sapien
aaggattttttgagggagtcgttagaaagtctataaatacaactacgcacactaaaaagtagtcatctttttaaaaataactttgtttaaatgcatgcttagtgtgaatggatttacctaattctcttaatagcatgcatttctgatcttccctacattaactgtaatagcaactgatataacagaaaaatgtaagtgacttgtagtcgacttggccacctgccacacgggctcggtgaaggttaatgaggagctatttggcacttcgagaataggtggcactagacacagaaatatcaacaggctatttgtatgctaactaggagtttcggtgccaggtaaccattgatgtactcttgcaggagaaagaaggatgtcgctgtacgccccgaaagagaggcatcatttttacgcccagtttggattaatgattgattgagtcgcagaaatgcttgtgatgctgatagaggccaatactggtctttctgatctcttcctcgtcgtttattaccttctcttgtggacaacgcattcctaagaatgtatctctgcttgtttcccagtccgcgagataaatggtgacttctctcttgcaggcaccgtcatacctcgggtttagattctggacaggcgagccggctgcaccgaaggcccggtaggcggactctggcggagcgcttcagagagaagagtgtagaccgcgggaggcggagggctccctgccagcgtgcctcggccaatcagtattcacaccgcctgacaaccggccaatcagaggacgtaaagctccggggcctgagcggacagtactaggaaggggagcgcagtctgcagactgaagccagtggcgctgcgctgaatgcaactgcgcgcgcccgccgggtgagccagcgatctgagccaggcgggggcggcccgacctttcccgcccagcctgggtcagaggaagccgaaagcggcctcagcaaggtgaggcgcccgaggctgcagaagaccgagcagaactttgcagagttcgggatgtgctgggctaggtcgctgaggacttgactggcttcctccctccttccctccacctaccttctccctccccctccaccatccagtgggttcgttccgggcctccagctatcagctcccgatctcgtgtttgagggtagcgaccccgatttctgtttgcatgcacagccagcagccctagcgccagatcctaaagctggatatcttttaactgggctaccagcccgggcctcaaagttttggtgagtgctgtgatgccgctcggggtgtcagggagggcaaagggcgtgaatcatctttcaccttttctgtgtgacttggatgccttaccttaaatatataaaccaaggcctaagtacagagagcccacgcggctcagccctgtgcacctcaggtactattaaggctggacgggcgtctgtattgtgctctttgcccttatgggacgctaatgacaacaaaattttggttttcagttgagtattttggggaggggggtgagaggacctcttcaagcccaaggaggggtccttgtggtggtgtaggctgatgagaggcatttgggaagcatagagtggtacttcagtgagtctgaagggccacttgtaatcaaaggaaaactgttcttccacggatagttttatatgcatcatggccatactagttgagtatggggaaatccgacaagtggcctggggctgcctatttggacacaatattttgtgtgtgtgtgataagtgagttacccagggacttgtccggaaagcccgtgtaaagccagagagggccacggttaaaggtcaggtactcacagagcacttagaattaataaaataaaacctttgttgggttgtggatccctgggggccctggagatacaggaaaggcacgtgtggcctggaagtgagggacatgtaatgagaacaggatgactcaagcggccggaggcgggcagaccaggagctttgggccggaggctcagggatggtccctgacggcggccggtgggtctttggatttctttgtgtttccccagagtgagggccgccaggctcaggccccagcgaagccccgagcgccatggccgacccgcaggctggctccgcggccggggactgggagatcgatgtcgagagcctggagctggaagaggacgtctgcggggcgccgcggtccacgccccccgggcccagcccgccgccggcggacggggactgcgaggacgacgaagatgacgacggggtggacgaagacgcggaagaagagggcgacggcgagga

SEQ ID NO: 41442 - DNA, 2300 bp, Homo sapien
tgtttttttgaggatttgcatggcaagtggaagtagaatcttaaggggataaagggcatttattcacaagggaataaaagtgaagttatcaatttctgaaaattggcatgtgaggccggcatgccagagaaacaaattagaccccaaaaaaattaaaacctaatactctcaatgtaataagcattgctattaggttaaatctctttattagagacaggtaggttatctggctatattattagttgcgacttattaggcagttagaagttagtatttatgttacacttttactatactactagtcttgtttaaaatttctccctatatatttctcagttaatagttataccggcatatcctcaggcagaaaaacaagttcttacaatggatccttcagggcacactatattctatttctcttagctgtgttatctttcgttgtcttgaggttcacttcaagatagacagaaaatgatgaagctaaagttaacaagcaagtagcaagaccttagaaagctatagggtgggtgatcaccaacactcccagccatcatgaaaatgctgccctagtgggctctgcttcagccagcagtggaccagtgatataaagaattcttgcttcttaatgactacatggcagtatttggcgttctttccattacttcttgtcttcaacttatccagcctgaagttttaagcatcctagaactgcatttcagacccagttgctcaaatggagtcaattttgcaacagtaaaatggtcttaaaataggattttactctagggggaagaatcctcaaccagatagtcacagtgcactttgaatgactaatttaagccattacattacgaaataagggataaatcatacttttcataacactactgcataggaacagttttaagagtcaagcatctacattaatctgagtctaaaataataggcccctgatttaaagtctcctaacattctttcacacttcataaaactaaaaataaaattgtctcaccaaacaccgacctattggtccggccaaagtactgtatttcaaggaaaattggagcaaagaggtctcaaaaccgcgacttgccagcaaattacaatttgcagccttaattggtctcaaatgcggggtgagagggaagagactacggtctgtagaaaataagagatttattcccctttttaaatcaaaaccagattccatgcttcagccgccccctaacccgccagccccgcccccagggtttgtttttccatatttttgtatatattttagcgaagatggcaggtgagggaaggttatagtgctgtacctagtccacgaagtaaacagagaggttagggtgggtttacttatttataaggcgttcagcctctcagctgtttctccctcgttggcatttggaagcttgcagtccttcagggaagagacagatttggcaggaacgttctttgtgcccgcctcccttttctattttttatttttttacctggaatagggggcagatttataatgacagccttagggaagggggagaaaaagtttcagccggcacgacaatgcccgttttttccacagtccacactgtgccacaaacagctttggtgccactcggagcccgtcccccgtcccctccctctctctctgcaggctcgcactggcaggcggaggcacagttaaattccagcaccttctccacatacccccgaactactacgcgctattactacggctgccctccgttttcgcttcgcctcctccccttccgcagtctccctggaggagccccgcggcgcccgaggaagaggactgccagggaagggacagcgggcgcccagctccagcagggcttggggctttctgcatcccgcgcagtttctctgctccaggcacaaacgcggcccgagagccggcgccttgcagtcacacacggatccacgcatacagtagagctgtctagatccacattcttgcacaccgccccctcctccccccgcgctcccggagtcgctgagctgagcgagtgacaggcgcgtcccgccaacccgcgcccggacgggcagggaggagcggcgcgcggggccaactgcggcgcgtcttccggcgcccgcggaggaggcgagggtgggacgctgggcggagcccgagtttaggaagaggaggggacggctgtcatcaatgaagtcatattcataatctagtcctctctccctctgtttctgtactctgggtgactcagagagggaagagattcagccagcacactcctcgcgagcaaggtaaatataactta

SEQ ID NO: 41443 - DNA, 2300 bp, Homo sapien
cctttgtaaacaaggcctttgtcaaactcttctaggtcagcagctttttgataccccagagaaataataaatcactatttatgacatcttgacatggtgccatgaggacaactgaattatcacatatgtaatactaaggactgtttcccagcatttgcaagtggaaggagtgttggtaggacctgatttaaccactttaagatttgattctgtttctggtcaagatgatttaagggacgatagggacaaattctttggttaacttgagttaccttagaaaactatatgagttacatttcttttctgctgtatttcttgtgaacagatgagaaaatttccctagtatgaaagccacatttaggggctatttctgatttctcctttttaatgtaaaagaattatcttctaaattgtttttttttcccccttaaatattgtgttttggagatgtctttggccaatagaggatgtgaattttctgtcatttttggaagcgttcttattaggggactctaacctttagccggttaataaagccatgggtcattcgctaagtagtgaatagaaaatacacatggtggtaatttatttgatagcatatttaggaaggcctggagtgattattttttctatatagaaacttatgactttatacttactagggactataggagtctaaaactatgttctgccagagtcattatgaaagagagcatatttatttacgtaagatatttatcattaagttaaatgggatcttgcaacctgggctggcaaaactgcagctttcttactgtttattatgagtttattattacccatgttaatatagcacttttccttgaaagtgtaggatatgttaaagagagcttttaagtagtaaaagttataaatatatcgtcaaagatgcttgaataattgtacctcagaaaaacatacaatagagccaatgaaattcaggaacaaaatagctggtcttttgaatgtttgatataaacacctcattaatttacacatttggagtgatggtttagatatggaatacaagattttggcctgaaactctgacataatgtccttctggacttctgggtttgtaatacattattatataattgaagcctagtatgaattaggatattttattagatagctacgacttccagaatatttgaacaattgtaatctggccgtatacctgtaagatttacaacagtttttaaaaccacaatattctatagtatttttaggtggattagtatcaatttaagcatcaatcttatgccagtatgtcatctacatctatgcaagcagtaatattttagaaactttttagaaactggcctaatttaaatatgggctggcccttttgtaagttgatgaatgggacccacagaagttgaaataatatttaaagtttgaaaaccattaaatataattgaaactccctcctttaaaaaaaacaaaaacaactaaactcagaatttggaattcaaaattacttaaaaatgataaaaatctctaaccaaaaaggaacgtcatatgttggcttacaggttatccaagggaaattctgtatcagtttgcacttaaactgtatttttctggttcaggatgattatatatttctttacctacttgatgtggtatatttcagtttttaccatcccactgggagatgctttatcacacatggatattggatgtccagaaggaaagccctctcccatcttcccccctgtgctttgttgaactggacatgtaataaatggctttgcaaatagtcacaattattttgtggcttgctgttgtgctatactaaaagaccattaagcagagtccaaaattctgtaaaaaatagatgatctgtaattgataatttatgtgtcttaaagaatgtacctgaacatttaatattgtatttataatagcatattgaatacaagtaacaaatggtaaactgcatgggccatgtgatacagagagagagatcagggtgagctttcttgagctgatggggtagataaggtctttgagatgggataaggttgctgtagggggagggcagaggtgggggtggtggcatctgagcatcccagatcagaagaaagccccgagatcacagagacccggcgagatcacagagacccggcctgaaggaacgtggaaagaccaatgtacctgttttgaccggttgcctggagcaagaagttccagttggggagaattttcagaagataaagtcggagattgtggaaagacttgacttgcaggttaaagcatgaatattttatccaatc

SEQ ID NO: 41444 - DNA, 2300 bp, Homo sapien
ttcttttcagggacttttttttcttatgggaaaataccataaagtttaccattttagacttttttttttttttttttttttttttttttttgaggcagagttttgctcttgttacccaggctggagtgcaatggcacaatcttggctaattgcaacctcagcctcccgaggttcaagcaattctcctgcctcagactcctgagtaggtgggattacagggcatgcgccaccatgcccggctaattttgtatttttagtagagatggggcttctccatgttggttaggctggtctcaaactccctacctcaggtgattgacctgctttggcctcccaaagtgctgggattacaggcatgagccaccgtacctggcccattgtagccatttcaagtgtacatttcagtaacatgaagtacatttacattgttgtgcaaccatcaccaacatcccatcttcagaacttttccgttatctcaaactgaaattctgacctcattaagcactaactccccggccgtcttccctcagccgctggtaaccactgttctcttttctcatctctgaaatcatacagtatttgcttttttgcgtctagattatttcactttagggaatttgattttatgtcagtttttctaacaggttgcttgtggagacagtaataatcaaaaacttactgtccaaagccctgagtctgaaattctgcatccaaaagtgctacagtatgcattaaaccgattaaaataacgtagcatctttgaggacgagctctatgttcaactttgttgttgtttaatatttatattgtaagaaaatctctcatatatgaaaatgtaaatgtaaaattccactattttgttgccattgcttttcttgtttgggggatcattactgtattattggcttccaggatctcagcagggcacgagggaggtttagcctgtctgaattttggaatcaagtttggtgatgtgtgagctgtccccagaaagcaccagtataatgtagtggtcttaacctgcattctttaacgcttagccctgggctctataaccccacccccatgcccagcagcatcccagggtcctcttctggaatccaactagagttcctaagggaggaggatccccagagggagaaagagaaagtgtcagtggacagaaatatgatactgaaatagcagagttagtgtttgagtactgacttttcccgttgcacatggaagaaatttccatgccttgtctggatatctttagaattgctcctttcagtgttaagatggtttgttccactgtaaggactgtgccacatggcttggtggacttggagaggcggaggtggaaacgatgcgcaggagttggcttggggctttttgtttgcgtgtccctgtttacctattcataatcatggatcccctctgctttgtgatactgtgaaccacgcataacagcaattctttacaccaccgggttgagaagaaggcgcctgaggctgactttctggacctgccgtcacgcagtaaagatgtggttggtgtgtgtcaggatgagagggccacgactggacccacgtgtggctgcttcccgggtctgccatgtgctttgctagctgcaaagcgtttcctctagaacagctaatcctgcatgactgtctcctgcattttgctgtcagaacgtgcacgccgctttcataagaactaattgaagagggagctagtttgcatctcgttcttgcacaccctgagtcatgaaaaacattttcttttaagcaaaattgaaagaaagaaaagagagaaagagggccaaaaaaaaaaaaaaaaaaaaaaaaggttgccatccagtggaggaaggagtaattcccagcttcattcaggaaaaacgcaggctgaaatatgcttaactgttttaacttgactggggatttttaccaccatatgggttttttttcgtgacatccggagccaaacgggtgcagtgtgcctttaagaaaagaggtgcctcactaaacttcgctgtagttgtgtttcaccgtctcggtagggaaggaaagtgttaatttcttatttgtacactttttttccccgacttccttcctattcacttcattaaatctagaggcagttgagcatgggagccgtctgtatgttgaattagggctcgcactcttgcgcaacacgtcaccagtcggaaactgggggtttgcttctgtgatttatttcattattgtgctggtaaaaggtttggaagggaattctttttgggggtagtactttagcattgtgtagcaagttttggggtt

SEQ ID NO: 41445 - DNA, 2300 bp, Homo sapien
ccacgaaaagtagatcaataactttaaaggctatttattgcaagtccccagtgccatgcccaggctttttgaggggagatgacatgacggtatatggttaggaactagataaattcattttcactaaagacacatttaaactgtaatttccagagacatagcagtgggcttggtgtttgcttcctcagggctctctggagtctgtcttgtcccttgctgtctgtcacacacacttccttttcccataagcctgagctgacaacatggtgtttggagattgtattatgatgaattaaccctttcttcagaagagcttttaaaaaatctttgcttcagtggtcaaaagaggctctttgtaagtactgaaaatggaaaaaaaaaatgaattaaatggagttatttaaagcacaattggaaagagctatgtcaacaaataatgcaagtacctggtatgaatgacacatatacacagggtgggatgggaagggatggggcaggagtggagagcgcttctaactggctgtgagcagagtgggagtttctcaaacagacgggtgaagggaggatgggtgggggggcagagcttgtggtggtatgtgcgggaaggggggatgtagccatggaggcttggaaagcagtccccctctagagactacaccatctcagtgtgaccagctcattggagacgaaggaagactgggacagcctggatgaggctggagaagcctgagaacagatcccggagggccttgaacaccaagctgaggaggaattttgatgtactcttctaggagtggggtcttgagggcaacctgtagtcatcgcagtgactgttacgagcactgtttcaaggaggccaacggagagcacacctgagttctgggcgtgagcgtgcagggaccagtgtgtgatgtctgtcatgtgggagaggggaggtgacacccagggagccgacatcagccctgcagtggaaagtagatagccaagagaggatcatggggatacagtgagatttgtgttcggaaatgtcactgatagtctgtgaaggatggatcgaaggaggcatacattaggagaatgttgtctggtagtggaggaagatagtccttaaaataaggaagtggcagtaggtaggaagacaagggaataaatattcagaggtaggattgacaagacttaggggcagtctggatgtgtgaggaggaggaggaagagaactcacatagctcttggatctctgccctgagtgatcagtgaacagcggtgccatttacagaaatgaaggtggcaggaaaattggtgtgtgtgaaggcacttgtatgtatgtgtgtgtgcacatgtgcatgtatgtagttacctggccctgcatacaccatcacaggacagctgaactctctacttggccattagcagcccttgatgttgtgatgatgttgttagtattgactgctctttcaggaccagccaacaggctcttgtaggcaaaatttatttttagtaccagacatcttgtattactgtaaatgagagcgagaggctgtaatgatagctctcaagcccaagcacctctgcatttagtggctctaatttcattatagagaaattaccatgaaatagcactgtgaccaattagatacacttctgggaaattttaggtgtaggtgaagcaccttttttcattcattctctgtttctgatagtttggacccagaatcaagctgacagtttatcgtgtagagtagcagcctcctgaggtcagcgcctcatgcattgtctggtgcatgagcatttcatgatgcttcccagagtgagttcttccaactctagccttcctactccttcttggagattcccagtacagccagaggccctgggaagtcttgctgtaaagtcagctgtttaactgcttaacccagcatctcccaaacttatttgaccaaagaacccccttttcacgggacactgttactaacccattaagctagtgttctgtggagcacactttgggaaatgctgaattggagcccaaatattacattcagtgcagagagaatctgctcggagatgtggactccagtgctttattttgccctcattacaaatattgatactttaaatgtttgctgaaacaggctgctttgactcttggtgactcgatacttatttatggtgctcagccagttatgcccacgtacagcaggtgggcagcccacaaataaacttagtccgtctgtttcccgagacacagaatgcttccccttatcttccagcattagcctggccctgaagcccctctttcg

SEQ ID NO: 41446 - DNA, 2300 bp, Homo sapien
gtattggccccaagtctcagagcattcagctctcttctttatgagcatagagaactctggacttgtctccttatggggtttagaatttttagggtcttactgaagacagagatgtcatacctagattgttttagccttaccccttagagctttgttgcactatcggtcacaaactgcttatttcttatttatttcaccagtagcacagttaaaattaagagtgtgtccatcacaggtgtacagagatgtgcctgtactccatcaatagaaacatgacaccatctgttggcaatgtagaagatgacaccatgaagatgtgtcattgagggagagtcaggtgttaaatccgcgattacaaagaggtctgacttttggggtgctgctagctgataaagaatgctcattaagcaagttgctctctacaaattactctcactgcatttcataggcaccttttcaaacagataaaatgtttgggtgtataaatctcagaatggtaggaaaagaacagaccagaaattgtggccctgtgttgaaggtgatggtaaataaaatagttcttgtcatatactatgtggcataagttagggaaggacgaacgcatttctcgaagagatgtgaggggtaggggtggttgagagggtgagagaacaccttggttcttgctgcagtgatccagaaatccaattcctgagtaaaatgcagtcttcttaaacctcttgcgttcacccctgattttcgtactcatgaggcccatatgtgcattaaaaaaataaaacaaaaacgatgacccagtgtagcagaaaaactagcccatctctttgacagaggattttcggttaatttatgcaggcctctttgcacttcagcattttttccactggttgctaagcaactgtttgagttactgcgcatgccttttttatgataactgtcattatgattactttttaattatacaactgggactgtggattaaaacagcatgttgtcactcatgctttgccactgccttctagtattctcacaagctcctagaatcaccttctgaaatttttatggcagtgatttatgattaatttttgatatttctggcttcacaaaggaagtagagatggcatcctaaggggagtgagacttttgtgaaaaatgactgtatcacacaccacaagctgttattgatctgagtagaccaaatcagatattaggatcttgaacctaaattgtgaatctctttgtgcctttaaccacatctgcttccaacagtaagtgatgttaaaagctcatatgctttgtagcctgtgtttgaaaattacaaaaatgctaagcatttgttgctatagaacctgctttcaaataaacttaccatgaatttgggggagggtacagcactaatcccagaaatgtgaagcatccacacttaagcttgtgaaacatgttcttctttcacccaaattgctctacacacacacaatggcagttaggcaagatgaaggggttcctctggcaagtaataataaaggtatgtgtggtttacagtatgtaaaataccctaaaggaataagaccaagaaaatagtcagccagtaggtacgtacgaaggcttttcacttgagtttccagagtatattctaacatattattttgagttactttctaaatacaatgtgaatttgaaaacaaaggagtatggaaatacaatgtttaaatatgtatatttttatatatatgtacgtgtatatatatacatatatatttaccaattcatttaaaaatgaaatttttagctaacaaggatattttaaatatttctatcaaaataaagagatatatttgctctgaaagggaaatccacagtgtatttcccatattgtatgtgtgacagaagtggggaccaaattgtattttactgtgatcttaaaattatcacaagggacatcaatctccaatagagttgtgggatttttcctgacttaaaaagctccatatctatatgcgtggaatataatttactttgttgacatgttctgaaataaaaataaaacctttcctcagtaatgtttgatgtggcttgtttttgtttgtttcacccatcctacagttcagggcgacagctcagtgaagtcttcattcagttaccttcaaggaaagaattaccagaatactatgaattaattaggaagccagtggatttcaaaaaaataaaggtagatattttgtttaccaactttattcttcaagtaaataaaggagcagtgtaaagtcattgaaatggttgtagttggagctgaccgccactga

SEQ ID NO: 41447 - DNA, 2300 bp, Homo sapien
cagacacagagaggcacagtgatttttcccaagttacacagtcaatcagagatggagccaaaagttatgctttcttttgagtcaacaaaaaagctacaggattgaatacagagctgcagctaagttcactgaaagtttatttatatcccttggagaattagaaagtactcacacacgtttttcaaagttaagtcttattataccatatcaatgtatagcttgtagtatacctgtatctctgagtaaagtattaaaaacaagtcatatgactgtttattaatgctgcctctttttgtattgattccacccatcccttctactcctttcctcttctgtaaagcagtagctcatcagatggcatttcagaaccctgagaatatgaaagacatcatgcactaaggttttcctatcacatctcaatgccattaggtgaataacaccggcatgcatcttcactactaaatgtcatacaaacaaatttcagttgtttcacatgcaacctgtgtggctgctgcagtttgtatcaactatgtaaccacagggtgggcaaaatagcattcaaaatgagctatagtgcaagataccatccatacgtagagttaagccctttcatgcttagcagtcacaatcaggatatctttggcccacagaaacctatcctgactggaattttcctctcctgtgtgtctcctggatatagtaagttcctaataaacatctcctctgattgctagccttgacaaatttccaggagaaccagggcaaggagaagacagtgaggcagtgcccgctgctcttcagatcaccaacagaatagagtcagaatatgatattattgaaaccttccaagtttgaattaagataaaaacaactttttcaaaataccaaaaaccttttatttaagaaagtgaaatcgctcgatgtgccctcccactctggttagatgctcaacagaccacagcagacaatgcacctcaaccagggctaagtgtgcaagaaaactgaagtacacaaaaagcaaattatagactcaggtactgtcaggcacaaaagaagaaccaaccctttctaggagtcttgtctttgcttcctttattctttcctcgattcttgtaattgaatgttacaaagtatatcaagaggaataaacgtatggggcccctctcttccaaacaagaaaaggttaagcttttaattacaggccctcaaactatcattttgtgcaattagcaattaactataatcgttgatgagcaaatgcaaagctgcgctagcaatttcccttctcctcatcccaggctgggttatttcagtcttgttctattacagaggaccagccacaaccgcgcgcactctctttcaaacatacacactctctcacttaaagacacatttagttttcggcaaaacggcatctcagcgtgcgattgagaccggcatcccaaaccccacttttgagcagcccaaacgtttggagcccctccgcttcatcactttctgagtggatagaggaggcccgaagaagatgctacctaccagcctctctcaggggcgcaggagagggtggtagagagatgcttgttgcccctggaaactgcaagtaccccccaggtgcacgccccgtcagtggggaggcggtggcaacagcaacgatagttgcatcagcgctaactgctgctgctgctgcgtgttctgccggaggctgccgggagggtacagtaatgactgtagggagcgcacagccgctgcggcggcaggttccctggatcaggaaattaggacaggcacccgggattggaggcgagggcggcgcgcgagccaaccagcggtcgccccgggcccccgtgagccccaggcgaacgcgcggagcagccgggcccctagagcggtccgggtggcggcggcggcagccacgaccacgaccgcggtcactcacgcacgctcacactcgcacgctccccgcgcgggcacccggctgcccggcgcgtgcaagaggagcgcgtcgagggaaaggagggccgaagccgccgcgctcccgcccgcccgccgcgcctcccgttgaccacgccccctccggccccctccccgctgctcaccccgctctccggccgccgccggtgcgggtgctccgctaccggctcctctccgttctgtgctctcttctgctctcggctccccaccccctctcccttccctcctctccccttgcctcccctcctctgcagcgcctgcattattttctgcccgcaggctcggcttgcactgctgctgcagcccggggaggtggctgggtgggtggg

SEQ ID NO: 41448 - DNA, 2300 bp, Homo sapien
agttcgctctcacttcaggagcacgtgactgcaggccggcagggcccctgaagccacccggcgacgggagccagggactctggaacgggtgttaagggcctgggcggctttcagtcccaattccctgcagctggcaagcaagcccctcggcgtcacatctgaagatcacttcggggacgcgctaggattccgactgagtcctctcagaaaggcttcctgtcgcctgtccaggaaagttacgaggccccaagtgggaacgtggctgacgaccaggcggggcccccaggcccccgcggcagagtctggggacccgacagtagtcaccgccgcccttcccaacaagacagggccacacgctcgctctcgcgctgctcctttgagctattgtgtagaatgaaggctaattacagtcactagcctaggactcaattcctctcgaggaaacgtcaccgggaaggagggtcagcaaactaacctgattaagtctcccctccactccccctccgcgttcagctacacgggagacccgagcggtttccaaacgccgcccgaggcggggaaaagggagaggagaagcgcccagagcagagtcctgcgtaaagccccgccgctcccctaccccgcacgccggagaggcggccccgcgccgggggagtcgcagtccgggtgccctcggctccgcggagcctcccggccgccgcccaccgaacgtgcgccagctcgcggccgccggaagactctgaagcccggccggcccctggcgctccgcgtccccggaggcgctcaccttctccccccgtccgctcccgcactccccggggttcgagggtgcgcccgaggctgccgcacacgtcttggccctctgcctccttcccaacactgcgcctggcagaggaggcagaaccattgttcaatgctcagaagcccacgcacctcggcgcccgtcaagagggcgagaaacgaggcgaagcagcggctctgggggaggcggagtgaggggcagaagactagttcaggcgaggcgtcggggcaccccgaaccccgctgttccccaagcccggctccctttagcctcggcgctgacagctcagaggcgccaccacggaggggagggagggaaggcgaggagaaccgagaggcgcctcctaggaggcgggtgggcaaacggagacctacgcctcggggtctcccggtgccccggctgggtcccgcccgccggcggaggggcgcgtcctcactcaccggttccggtggcgccgctctcccggggcgcccagcacagcgcgagcagcagccagagcgcccagagcgcggacgtgcccatggtgcccgcctggatggtgccgccgccgccgccgccgccgccgttcgctccgcacgacaagttaccagtccttccgaaaggaggaagaaggtgggggcggggaggggaaagggggagaaggaggggaaggagttggcgggggaagggagcggggaagaagagggcaccccctcccctacaacttgcacagtctcctccccacccacccagccacctccccgggctgcagcagcagtgcaagccgagcctgcgggcagaaaataatgcaggcgctgcagaggaggggaggcaaggggagaggagggaagggagagggggtggggagccgagagcagaagagagcacagaacggagaggagccggtagcggagcacccgcaccggcggcggccggagagcggggtgagcagcggggagggggccggagggggcgtggtcaacgggaggcgcggcgggcgggcgggagcgcggcggcttcggccctcctttccctcgacgcgctcctcttgcacgcgccgggcagccgggtgcccgcgcggggagcgtgcgagtgtgagcgtgcgtgagtgaccgcggtcgtggtcgtggctgccgccgccgccacccggaccgctctaggggcccggctgctccgcgcgttcgcctggggctcacgggggcccggggcgaccgctggttggctcgcgcgccgccctcgcctccaatcccgggtgcctgtcctaatttcctgatccagggaacctgccgccgcagcggctgtgcgctccctacagtcattactgtaccctcccggcagcctccggcagaacacgcagcagcagcagcagttagcgctgatgcaactatcgttgctgttgccaccgcctccccactgacggggcgtgcacctggggggtacttgcagtttccaggggcaacaagcatctctctaccaccctctcctgcgcccctgagagaggctggtaggtagcatcttc

SEQ ID NO: 41449 - DNA, 2300 bp, Homo sapien
catgaagctgttactgccaaggagggcttggctggtgaccttcctttacgcagtccctgctcacatgagtgatcagtctttgataaggggtactatcatcgtcataccttcattggtgctatctggatgagccaagtttactttccatgccaaccagtttcctacctccaggtctattactaccaccagtaccaccaacccacttctcacaatgagggaattttctttctattcttaggctagttgctagccatatatgaatagctctcaaaaaaccttggttcttttagactctggccttaaagaatatatcataccacagatcttaatcttgactacttaggctgaaggaaaatgtcccagaacccccaggaattgtgcaatcaggtataccaacttcttgttagccttaagttccttgccagagtctcagtgttcacctgtcttgtccaggagtattgtggaacagcaccatgtgccagtggacagaaggggtatgtgtagaagctccagggtagaaagtcagcccacatgccctgagactttgaacttaagacagatgccggttgggattggtttagggtcaataactgcctcagcccaaatttcctccagttctggaagaatctgcttcctctcctttgaagaatttgtttttccattgttcatggcatgtcaaatatttcacatgtgacaaagtgaaaaggatcctcacctgcccaatacaaggtgaacatctggctttgactaactcatgtcagtagtttaggtgcattcctagcattctataaggtaaagttaacctctagtggaagggacatgcagcaaaaacgaaacttttctctcaccttcctggataattgtccctccttctggtataccttagcgttttgaaatgttacaaaaggcataatgcaagtcatggcactatactgagaaatcgtttaataagttagtattactcatctattaatgattaatgctagcgtttggaaactcttgtaagcagagcttttctaggctctcaggcttgttacacatcagattccatgttcactacacattcgtcctcttcaaagagtccaggcaggggaaggcatttgagagaacagcccgtaagagcctgtggagtctcctactttccattgaaaataacactgcccatgctgcccacttaagagtccgcggaaccatgtgaccaacctaaacgtgatcgcaccgctaaccaatcgcagagggcggaaaggccagtcccagttcacacgctccggacagtggcaaccaaagggcaggggcattcggagacgtaaaaaccccaggcgctgcccgacaggctccttgaccacatgctttaaagttcgctctcacttcaggagcacgtgactgcaggccggcagggcccctgaagccacccggcgacgggagccagggactctggaacgggtgttaagggcctgggcggctttcagtcccaattccctgcagctggcaagcaagcccctcggcgtcacatctgaagatcacttcggggacgcgctaggattccgactgagtcctctcagaaaggcttcctgtcgcctgtccaggaaagttacgaggccccaagtgggaacgtggctgacgaccaggcggggcccccaggcccccgcggcagagtctggggacccgacagtagtcaccgccgcccttcccaacaagacagggccacacgctcgctctcgcgctgctcctttgagctattgtgtagaatgaaggctaattacagtcactagcctaggactcaattcctctcgaggaaacgtcaccgggaaggagggtcagcaaactaacctgattaagtctcccctccactccccctccgcgttcagctacacgggagacccgagcggtttccaaacgccgcccgaggcggggaaaagggagaggagaagcgcccagagcagagtcctgcgtaaagccccgccgctcccctaccccgcacgccggagaggcggccccgcgccgggggagtcgcagtccgggtgccctcggctccgcggagcctcccggccgccgcccaccgaacgtgcgccagctcgcggccgccggaagactctgaagcccggccggcccctggcgctccgcgtccccggaggcgctcaccttctccccccgtccgctcccgcactccccggggttcgagggtgcgcccgaggctgccgcacacgtcttggccctctgcctccttcccaacactgcgcctggcagaggaggcagaaccattgttcaatgctcagaagcccacgcacctcggcgcccgt

SEQ ID NO: 41450 - DNA, 2300 bp, Homo sapien
aacaaaagccagaactgagcacgccatgggaccttgaaggagtgacgtggtcaaagctgtcacgtacactgccaggtagcataggttggcacagcttctaaggagtggagctgatgaaagagctccccgggcttcagccagttagtagaatttcaccagtgtgccaggctactgagtcacaggtattagcgcttccaggcagcacaggagcagcagctttgcattgatcagttctgaggctcttttgagactgtatatcatcaacagatatgagaacatgccgcatacatgaaatcagctgtggcgcccattctactcagtgtatcccagtgtcctggagatgtgatggtgaaaatgattgtgacagtggagaagatgaagaaaactgtggtaagaagatcagtgttgagtgacgtaacccaaagacccttttcctaaaggaagggtgggcaggggaaactaatctaagcctgaagacgcactgacattgactcacttttcagtgacttcactatctgctcaattacttgtccttcataactgccctaaaaccctaaaagacattcatgtggcaattgaccatcgcttggtgtttcttttaggcaaatagaaataagaaggtaagtcattcaaggcacttatatatagaagtagctcagggaagcagcaattgtgtgggcttttgttttgacagtaattcatgtgtcttttgcactttggcacaataaaattagaaggtgagtagggttggcaaacacattcataggtctaaatttgattgggttattggaataaattatttgagtattatacaagcatttctttgcccatgaactagattctggcataactttcccagaaaaaaaaaaaaaaaagacacagaagcatgaattaacatcttgcctcagatacccaaagaaaagtctacccaactggtgatacctttgtctcctgttgcagttcctgtctctgaaagctaactctgcttcctattctttcatgtttctggtcttggaaaatctttaataaaatgctgcatgttgaaggtgagggcctgggaaaatcactaggttgaacaaacagtgctttgaatgttctttcaagctactgccctttttatagggcctctaaaacctacagctcccaagtctgacaagcatgggcctcctgatatggtagtagtcaagggagctcagggcacttacagttgaaacaccagtcttgtgtgtagaagtcgcctcctgaggtcaataccactgcacctagtccaatgagttttagtgttcaatcctagaattgggttttctgtattggtaagccctggtgctgccaagtgtttcccttataaatctagactttgcttcccaagagagtcgtggtctctattctaattgccaccaaattgtgaccttgaaacatttggcaggaatttaagtcaaagtaccaattggctagtaggactagcttatcattgtcagcatacctgattgttaaatggtgattatagccctggcagtgactttttcaaaatggaaagtgtttaagacttgttattcctgatccttatttaaaggaccaaaaagaggaaccatatatggtggtatgtggttcacctcttttggtgacaaagtcttaatgcttgttgtgagtattacgttgcatgatattctcaactagtgataagatctgacaagcagtatgttgattcaaggacaactcaatctctgccttccaaattgaaatcccttgttacagtttgttatttatgatggccacttttagaatcaattgtggttctcatctcaaattaatttccagtcttcaactattttcttggttctttatttctgttcttcttatttattgtgtgccttcattttttgtacaatgagactgtacaaaagttcttgatttaactccattgtagcctttaagttgggctagtaagttaggattaatgaataaagatcaatgtattagattttgggacaagaatcttgaacggaccaatcttgatgcattttcagtggggcatcctctctcttaataggcaatataacatgtagtcccgacgagttcacctgctccagtggccgctgcatctccaggaactttgtatgcaatggccaggatgactgcagcgatggcagtgatgagctggactgtgccccgccaacctgtggcgcccatgagttccagtgcagcacctcctcctgcatccccatcagctgggtatgcgacgatgatgcagactgctccgaccaatctgatgagtccctggagcagtgtggccgtcagcc

SEQ ID NO: 41451 - DNA, 2300 bp, Homo sapien
agtagtatctgttctggagttcctgcccctgggacctgcaagtgcttcctacagtttaggaaggcagtcgtggggttacagccttcaagaacagggtgagtgatgaataagtcacttgtttgagttggactcaagttttggaaacagagcatgcaaacctggtaggtattcatggtatcatatgcaaaaggaatgatcaaggtacatatctaggggagagatctgctatttgacctatactgctgtattatgaggttagcagcattgttctcaagtacaatttcatgtttagtttgactattgtagtcactggctgtaccttttagaggcacttactcataaaggtacaacagccataccagtccaagttcatttacctactgccttgcacacgccagtagcaagatccatttgatagccacgactacattcacacttgtaaccgccttttaagttgatacaaatttgactgcagattcctggattttggcattcatcaatatctgggagggaaatcagaattagtcttgctgctcctataccttactaggtacatactatcctttcccatcacctgcagggtccaggttttcttcttagactcacctccacaggttttcctatctatcagttcaaacccagctgcacagtcacactcgtagcctataactaggtctttgcagatatgagaacatccaccattatttaccaagcattcgtttatatctggaataaaaatgtagtagtcacttgacaacttattttcaattaatatctttcacatttaaaacccaggctatttgtgataacttatctagttggcctggtcaaacccacgatttgtctaagacctaatcatttattttataggtatatatttcagggtggattatctaactcctcggcaagttaccagctggtcaagcatttagtcaagtttctctattgatgatcagttatctttaaggaggttaaactataaactagtttgggccgggcgcggtggctcatgcctgtaatcccagcactttggaaggccgaggcgggtggatcacgaggtcaggagttcgagaccagcctggccaacatggtgaaaccctgtctctactaaaaatacaaaaaaaaaaaaaaaaattagccgggcgtggtggtgggcgcctatagtcccagctactcaggaggctgaggcagaagaactgcttgaacccgggaggcagaggttgcagtgagccgagattgcatcattgcactccagcctgggcaacaagagtggaactccatctcaaaaaaaaaaaaaaaaaaaaaacaacaaaaacaaaaactataaactagtttgtcctacctgggcttttaagtcataaagtttcactctgaagtctacaattgaacttcagtacattcaaaagtttaactagccatcacggggggtccacacagtgttagctatactggattgtgtcaaacttccaggatctgtacttgaacaacaagtacacttacgacactctttcaggggctcatcactccagtccctgcagtcctgctcctggttacatactttgctgatatctatgcattctccacttctgcacttgaattttccagggcccaagcactgattgactacaaagagaaacaaagaagagagattccatgagtgggtctggtcagagcaatccattgcttaaccaacaagaagaaacccttaccatttttgcagttgacttcatcggaaccatcgacacagtctcggataccattacactgcctgctgccatggatgcagctgccatcctcacattcaaattggtcaggtcggcaagttcgagaggctacaaagggaggaaacaccatggaatgaagccagcaaattgtcccagttgatacagggaagagaactgaacatgccatgctagaaagctacttacgacagttgacctcatcactgccatccttgcagtcagggtccccatcacatcgccacttcttatggatgcactcgccagagccgcactggatttcgctggctggacacttggtgtgtatgactggctgacggccacactgctccagggactcatcagattggtcggagcagtctgcatcatcgtcgcatacccagctgatggggatgcaggaggaggtgctgcactggaactcatgggcgccacaggttggcggggcacagtccagctcatcactgccatcgctgcagtcatcctggccattgcatacaaagttcctggagatgcagcggccactggagcaggtgaactcgtcgggactacatgttatattgc

SEQ ID NO: 41452 - DNA, 2300 bp, Homo sapien
ttgcaagctaaacaacatcagtgaatgccacactagcagatgcagacctcataacgttacccgtctcaacaactttgaagcatagttaaaactcaactaagtgacaaagatagtaccacaaatcagtgaggaaatgatggattatgcaattaatgtgttgaaacatctggataaaagcttggaaaataaagttaggcccctacttcactctttacatcaaaattaatttctgatgttaaaactataaaaagaaaagttttatttacagagaggtgaagccttttctaatactacacaacacccagaaatcataaaataaagatttttacatggaaaaaatattaaagttaaaaccgaaaaaaggtgcaatccatatcacaagtaaagggtcttttttcataatgtattaagctctcctacaaatcaataagaaaaatgtaaacaactcagtggaaaatataggcaaagtcgatgaacagacagttcccagaaaaagaaatagcttttaatcacatgaaaaagtgttcaatcacatttataagaaatacaaattaacccacacatcatttttcacttacaaaattggtagagttaaaaaagtataagacattttcaaccgttgatgaattgtaaattggtaaaacttttatggagagaaatgtagcactactaatcaaaattacaaatgtgcaatctttgacctagtaatctcacctctaagaatttatcctttatatatcttgaacatgtgtaaagtgatgtacatataaggtatttgttgcataattgtccataaaagcaaaggtagaaacattctgaatgtctgtcattaggaaagtgctcagtggctatttttaaaataaggtagatatttgtgttcaaatatgaaaacatcttttatatggccaactggaaaaggcaaagtatatagcattctatgatttctattaataatgaagaggtactgagatgatggataaaggtaggtatatttttgcttgtatatgtttagaatatttctggaaggatagccaaaaggtagtaatagtggttgcttccttgaggtacacctgatgtcttgaaattatgggtgggaaagacataaactttctactgtaatatgtctttttacctttacaattttttatcatgaatgtgtattagctatgcaaaataaattgaatagaaaaaccaattccctgctcaaagcaaatccctcctgcttctctcctccccagtatttattgcatcttttgttatccttgcatgtttatatccccaacaaaaccaagagttctttgactgctacaactgtgtctccatcgtgtttgcatatccagcatttgcacattgccttaatcatgaaaagggttttttttttttttttaaagtgatgttttgaaggatgaagaagaccctttttttttgggtggaagtcaggctccctttaaatatggcctaatattgctgagcagggttgtgaggccctaaaaacgtcttcctaccattcctggaattctaccttgaaacatgtctctatcctttaagagaaagggaggagataaaaaggagagagagaagctgaagctgactcaaagatccgactggacctgaacagtgccccagggagaatccatttgaaaaaaaaaaaaaaatgtgatcatgtgaatggacaagaaggagatggctttagatcttatatgctctaaacgaagagttacgctgagagggaaactgacttgtcatgaagtcagctttgttccgttgctatgtgtcatccctgctaatggtgagtttacctagggcagaggctaccatctcaaccatgaagctgaagacacaggcatccgtattctatagctaattcagttgatttcatctcagcacacatacactgagcgcttcctaagagcgaggttgaccgacatttttattagcaataatctctgccttcttctgattacctagagatttaagaccacataatcatcctctacctcacagggtcaagggagtgggggaggaaatgggctaagaggttctaaatccctcctaacacttgcttcttccaaatcagcaagattagagcagtcaacagctgactgcgttcagaccctgcaggctgggctggcctgcccaggacctgagaaggggcagctccggtggcaatgtctgagcccctagctgtgctggtccgggctggcctctctaagacagtgcaggccacgtgatccatcctcctagaggcagtgagcaggtgagggacccctaccacagccaggaggaaaaagctaggcgtc

SEQ ID NO: 41453 - DNA, 2300 bp, Homo sapien
tgaagaaagctcacatatcctctatacatatgagctccctgctttcaagggaaggaagactcactgaactgcagacttttacatgtccagcctccccttttagaggtgagaaagcaggactggaagtgagggattaaggtttcacagttaattattcagggtcatggttaattattgacaggtctgggactagaatcaggttttctaaatcttctattatgctgcattgcactgtcagtggccttgggttggtttgtctcagaagtgcacaccagactatgggttatgacatacacaatgttgaaaatatctactttctgacatgggaaaactagttatatttgcttaatgtctttaaaggtattacaatctacttttcaaaagaaaactaaggaaaccatacattcaattctttccttcatatatgccgacttattcatcgatctgagaagacctgattaacatttatttccagggattcagctaccacagctcaaaatacagatatttgagtaaacagcacaagttataaaaaggcaaaggccaaagaaaacaatgacaaaaaataactgttacactaactgtacaaattcagcaatgcatgcaaaagaactaaaacttgaaagagactgtgcttgggtgtgggaaaggcatggagtttggagatggacaggactgagtttcagttctggctttgccacctctagctgtgagtccacattcaaactctctgtacttcaatttcactatctgtaaaatggggcaataatacagggtcctgaaagaactttagtgaagtcagagcaagtttcagtttgagatgcttctttccacactcagatttaagtggaaccagaggtggtgggatttcagttagagtcaacatggttcagccaagtctcacctccttctctgtataaatctacagtttctttcaaaaactgaagccatttctgcttgtccccttaaaaaaaaatggtggtcataaccatctcaaaggctgtgatgccacaatgagataagctttgtcaggacactggatgctcaataactggtaaataacagtaatgatgacgcatcttctttaaaacctgtcttttaaaggtttgaagacgaaatctagatttggagatttctacgactaagtcaaattcacttacttactgatctgctgagttctctttccaccacttttgacatccatcgccgttttgttagctgtatgcggcgattgggggtgggggggaagacgaggatcagaagccaaagcctggtggctgataaccaggggagggaggagcagctcactgggctggggaagaggatgggaaagcccagggcaaaggtactcaccgcggcccaccaccaggagtgggggatggtagtgaagttggtgctgggcacatcgtgctccacagagtagacagccgcagagaaagtgaagatgcccatggcgatgaagagcagcaggcagcccacctgctggtagcactggcgcagcgtgaagccgaaggcacgcagtccggtggagtggcgcgccagcttgaggatgcggaagatgcgcatgaggcgcatgacgcgcaacacctgacccaccttacccacgctgcccaccgtctggccgcgttggtggccctcgcccgtgaagcactcgagcagcagctgaaggtagagcggcaggatggccaccaggtccaccaggttgagggcgctgcgcgcgaagcgcctcaggtcgggcgtggaggctaggcgcagcaggtactcgagcgtgaagaagcccatgcacagcatctccacgtgctccaggatgggccgcaggtctgggccgccctcgccctgccccgagtgctgctgcatctcctccacggtgttgagcgccagcgccaccacggagacgagcacgaaggtgctggaggccaccccgatggccttggcggccaccgaggagaatggcttctccatgaggttccagaggcggcgccgctgcgggccgtagaagcgcatgtcgcggaagagttcctccgcctcctcgacctgcgcctgcgcgcgcagctcgtgctggatcttgagccgttcgctcagctcgtcgcgccgctcctcgaagcagatgcggcagcagcgtggcgtgtacttgagccgcacgccccagtagcccagctcctccaggaagcggcgcggacacagcccgtcgagcaccagcagcaccccggacaggtagaaattgtagaccagctggaagacggccgggtcgcggtcgaagaagtattcgtctgtctgctcctcgtagtcgtcgcacaggc

SEQ ID NO: 41454 - DNA, 2300 bp, Homo sapien
actatatgatacaagtaaatagatggaaaagatgggacaagtcttccctacagaaaagttgagaataacaaaggcaaaagtaataagagaaatagaagatcaccatttaaatgcagtaattgctgcaggcgatatccaccgacaaatgctaaagttagcaggtaaaacttaggaggacataggatgtctacatattctccaaacatcttgtctaaaatgtttattaattgctgtggtagtttaacgtatgcctggattctttagtacccctccttctgggaagtggagcttaattttcctctgactttgggctggacttggtggtttggatctaataaagatggaaaggttaaagtggcaacttcacagtggagaaacctggaaaacactactttgaccaagtgaacacggttaacataaacagtaataagtcatgttaatgtcatgtacctcttgatagagtactaccagaagaaagcttgacctctggtagtcttccaaaaaatgtgtagccttagcctaatcatgagaaaacatcaggcaaaccccaaatgaggaatattctacaaaatacaaaggagacttgatggccagattcagtgtatcctggtacagaaagaggatattagtggaaaaactggtaaactccaactcaactctgtagcttagttaactgtatgttaacattaggggaagctggggaaagggtatatgtgaactgtgtatcttttcaactcttttgtaaagctaaaattatttcaatataaaaattagaacaaacatacagagaaaacatgtaaatgaatggattcttagaaaactacaggtgtagaagagctgagagatgcaggtatggttatgatggccatagccaagtaataatgtgacccttcagttctaaatgccctgaggaagctgagtaattcagggactgtccatttttcaaaatcattagaaaagtctagattagaacagcactttccagagtactccttggaagtctgctgttcccttatgatgttccaggaaaaagtggttcaactggagttggaaaatcctgcatcctttagcctttgcttgagaattgattgtatatattagcaaattaaagaatctgaaaagccttttcttacgggctgattcttgtcatttaacttactgtttcccaaatatattttatcccagaacccttcttttctcttatggtaatatcctgagaaattagttcttgaatgggcaattctaatctagaaatatctggtgttgtctagggatccctaacatctgttgtttacagccagctttcaaatgagttgatcgtccaactttggaaagtggagaaatgagccaaatggctttttctcttgatctgttctgctgctttcagggaccttgggtaggtgaggggttataacttgtttatcctgtgcaccatggtgtctcagtagcctataaagcgcctattagacagattcctttcaatgaaatattaactatttcaacatcttattttggagttcactgccaattgcttggctgcgtctaaaacaatcacagattaaacactggatgctaatctttgttttagctgtgttggattgcataggaatctttcagataatcctttattttcttatattaaatgcatgtagtggtacatgcagcctattgtttgttcctggctttttaggctccaagaaatcaagcgataattttgtcagttattcatcccctagtcttcccaggttacaaaatgcaaactctgatgcttattatacttagtgtcaatagtggtctatttttagccagtactattgtggaagtgaagtgatgcctccagagatatcaaacactggccagggtgtgtgttgttcttagtttttttattgataccttgttcattttcagttttaaaatttgagtcagtgattgcaaaattgctggatttaagtacttgtccattctatatctggctgatttgtattgtatttgtagactgaaggactaaatgtggcaatgactatgaaacagctcttatttgatgaagagaactgcagtgattgtttttggttttggttttggttttccagagttgctacgatggaagttaaagggaaaaagcaattcacaggaaagagtacaaagacagcacaagaaaaaaacagatttcataaaaatagtggtaagatatgcttcccatgtgggtgtttggctgttataattgggggatgggagggcatgtagtaaatttcaatctgtattcattggctaggattaggattaaaatagtaggaagaagt

SEQ ID NO: 41455 - DNA, 2300 bp, Homo sapien
taacctcttggatgtgtgcaagtctagttgctctgattaaattgtgtatcacgcaagaagagcatcttaggcttgtaggagtacacctagtggtctacatttagatcattagatatttgaagaattaatgggtttgcttgacaaaaaaaaaaattacaggataagctttttttgtgctgttctgcaaaaccacacgatgctttcaattcactccaaaaaaaaaaaaaaaatccaaatcaatccactttcacagaagacttgataaaaaagtttttaataataatcaagggctttgatatgtgataacattttttttttcctccctggtgaaaaggcaaatgaatagcagggttttggtgcagatgcttaaggcaactgcatggacctatcttcaaggatatggggtgctgctgtctgtcgagttgaaaacacaaacgtatcccttcccagggttgtgtgatagggtgtattttgcgatttttctttctttttggccagcatttacttgtcaggtgtttcaaggtgtctaatatccccactactatgctatttgcccaaaaggcacagctgatgggcctcctgcaattcctgttccatattctcttctcttagcatttactgaattattgaaagcagtacggaggcagccacgttgagtttagagtcaggctcactggaccaaagctactatgttttgcctttctctgtaaaatgagaaaagacctatttaaaacgttcttatgagatttaaatgagctgaaatgtaaactagtaacagttaaggtagacgacaagaacttatcaagtatctatgtgctgcatagtgagataagtgcctggaaagtaatgatggcccctgtcatcaagaagcatacagtctactaaattaccagtttcaactctaactccttagtggccagaaaacggagtaagttggaagacagtaaaatctgaagtctggcaccagggatcaagtgccagttcctcaactttacagatgcagtgggttgaatagtctccaaaagatatgtctatgtcctaactcccaggacatgtgaaagtgaccttatttgggaaaagggcctttgcagatgtgattaaggacctccagatgagatgatcttggattatccccgtggactctaaattcaatgttcagtgtcctaaaaacacacagagaagtggcacaggcacaggagaaggccattagaagacaggccgagattggagtcatgcaacaagaggccacggaccgcctggaaccgttagaagctgaagaagcaaagcattctcccctagagccttcaaaaggtgcagggctctgccaacagcttgattttggaattcttgcctctagaacagttaaagaataaaattctgttgcttgacacgagcaagtttgtggtgtcagtttcttcatctggaaaatggggcatatatcctaaccacaatcttatttcctgaagtataaaatggaataacagcagtttccaggcacgagcagacactaaaaatggcaaacatttattgagagcgttccatgctaagcgctttgcacgtatcacttaattatttctattttattgatcaggaagccaaagctcataaaaactgtaattttcccagagccacacagctagcaagtgaaaaaaacgggattacaattcaaatcgactcacaagataccccttttatcctccacgctggactgctgaggaagtatgcaaattaacacactttagaaactttagctacttcaatatttgttcaggctacgggatgcaggcctcttattaaccgcgccagccaggtctgtccttcagcagcctgttctgcctcgcaagagctctccctctctttccagcacggaagccacagggttaatgacgtcatttcccgtggccgttgtcgcgtcctccgcccgacggattcttgcaagggccaaaatcctcgcgcctcaagaggaggcataacagcagcggaccaatagaaattccgaatttttgtattctctgggaagctccacctcttagtccctgatccgccgcggaagatgaaaaaaagcggcccgggggcggagcaaggcaaggaagcggaagcggagaggcggtcgggatccgctgcgcgagctgtctcggtcccacgtgtgcggtgagtgtggcaggctcagcggtcgctcttgggaggggttcgcaccctgccgggcgctggaagtcgggaaggtctctcggggctgttgtccactgggcagtctcctctggcctctttctgggctaggagtttgggactgactggagcct

SEQ ID NO: 41456 - DNA, 2300 bp, Homo sapien
ttctgtcaaaatcttgtggcaatgactacctccctgccttggctttaattattctatttccattagtccgggtcaacacataccacagaggtcatctctggacttgatgtactgcattaaaggcgagctcctctaggataattatgtcctcaaagaccaggcattggggtaatgccttggggagtctgaaactccaatcaccttgaactatggatatttcttctcttaacatacatttgtggaaaagaaaaccataggacatgaaataatgcataagtcgcaaatctgctgttttctctgcacatgactggagattaaataaattgactatagcaggcaaacagtactcttttctggaagcttgagtttcagaattcccaagagaaacactaaaagctacttcctttcttctcttacagccaaaagagaaatcagtgagctattgagtaagacttttgatccattaccaagactcaagcttcctaaaacactagtcaaatggtatttaatacttcgttttaagacccaaacttgcccatcccggcctacagtaaagggagaagacacatcccacggcttgctttcactccaaaacaagcatttattgagtgtctactatgtgcctgatcatgttctaagtctctgaagatagagaagtgaacttgtatccttatcactgaggagggagaaggcagtacctgccagttacttgaaattccctttggaaccaattcacagggcagaacactttaaactctactcagactctcagaaattgggtaggaagaaactccctaagtcttcggagcctcacagctgccttaggagctctgctttccacacttaaccagagacaggtattcaatatgagctgggggcaagaagcgtgaacccctccaatttttatgcaaagttttgtgagcaagtatgagcatttgctggagccaaagtctacaagtgtcctcgaattctcaaaaagatctggaatcctaccaaggttaaaagcattcccctaatatacccacaactcgtggagcccaggtgactgcgcttatgctttcttggtgaaggccacatgtcgaaccaaaaagtcatgccaaatggatgccacactgaccgcaacagccacttagcctggtgtacaccccgctcagtcctttctcaacttcacaacttcgctcaccagaaagcttcgcgtgcaactgtaagatggcctattcctttggaaaggaatgagaaacacgtaggcttggaagtactgagacattggcgcctctcctgttttggtcctgaatggattcccggcgaagaaatcacatgcctctcttctcctgaccccacttttggcatctcttaaggccgaagctggttctcagagctcgtctgcctacagctactaagttctctgagagcaataaagatacgacgggatccatctggacgttttccggacaggagaggcagcccggcatttcccttcagagagttgctggggatgcacacctgctctgggacagccggagtgcgcaacccgcacttctacacgcgcgcgccgggcaacatagcgcaccgcgggtacacgcacgccgaccggacacacgcagtctcgtacacgcccaacgagcgcacacacccgcactccatgcacgcgcgatgggcgcacacactcgcatccctacacgtgcacacacccgcgctccaattaccgcgctagcgcgcaaaagagccgcaacttccgagtgggactcggcatgcgggggcagtgcccggtacttcaccatcagtcaccttcgcgtccgcctcctcccctgctggttgcacctccagccgcagagatttccggctggggcaccagaactgtccaggccgaaagagctgctcctccgtcacaaagcgcagttgcacactgtactgcaggcgcgcggggacccgggccggagccggggtcgcagccatggtccaagcgcctctgctcctgagccctagcagtgcctcccccgcgctgctctgggcaccgagaaactgctggggcaagggggagggatttggaagcgcgcaccaccttccccagctcccgttgcaagttcagtcttcgacctccgagacgcccggtgacttctgctggcacctgctgccctcggcatcacctccctcatccccctggagggcacgctggaaagctgcaactccccaccctccgcacaggagcgccccgtagacgcgcagatgggcccagccacccagcggggcggcagccctgagcacacaagtttggagagcgcgcgaggcacctgaaagtg

SEQ ID NO: 41457 - DNA, 2300 bp, Homo sapien
ggattacagtgagcttcttggatgtgtagcacagagtaatatttttcagcaagtttggaaagttttctgccatttttttttaaatattctttctgcctcattctcatcttctgggaatcctataatgtccatgttggcacaacatttaatggagtcacataagtcttttgagactctgttcatttttctttctgatcctcacattgaacaatctctattgacctaacttcgagttaaaagattccttcatttgccaatttatatctgttgttgagctcctctagtgaatttttcatttcagttattatacttttaagctccagaacttccttgttttttaataatttctatctttattgatactctttctctggtgaaacaccattctgatgcttccctttaattctttagacatggtttcatttagttctttgaatgtatttgtaatagctaacttaaagactacaaagtctaaaatctaggctcccacagggactttttttgttcgttttttattatttgtctctgtgtgttttatttcctgtttctttgcatttctcaatttttgttaaaactgaacattttaggtaatatattttaacaaatctcatatcagattgctccacattattcccctaaattttttaatcatcagtgtgttgtttttcttgatgctgattctttagtactttcatgaacgaattttacagatcctgtattccccgtagtgtgtggccaccgagttctctgctagaactttttttttttttttttttaggatcttgtttttatttgtaagcctggcttccaagaagtcatacctggaccagtaaaatgtagtagtcaaccaatgatcatttaaaagatttccttaaatgctttgcctatatgtcttctaccttttgccaaagaaatcttcatgagaagtcataccttcaaacttcaggaagcttacaaatagcactgattttcacttcctgcttacacagtgcctcaagatcagtcagaggtgacattctcctttcccaggtcatttccgggcatgtgtacagacttgcacattgtacagccttttaaatacccaggaatatgccagagctttccaaagttccctatagttggctagttctccagactttccttttaaattcctggccagattcttcctttgcctcaactgaaatcacagccttaggcaattgacattttgccaacagtttgctattgtttcagtaatgccctgggggtaagctttttcttcccccaactgagctgagttcagagtcaaatcaaatatccagccactctctctgaaaagagttttcccagggagctgcaagttgggacaaaatattaactgtgctctggggatagtgccttcaatggggctccagaagtggtcagctctctccattgtctgcaatactgccagcttttagctacaccactaagctggagagagagatgagaataaccccaagttaaaatatcgcagaccccactggtcttcccaagattcactagttttctcttggacagatgattttcaattcatactcctgcttaattgccagaattctaaaatggctgattttcattattttacccatatttttgttgttgtataggcagcacaaattcactgaggccctcactccaccattctggaagttgatcaagttctgtaatattctgaatttataattttcaggacaaaaagatcttaaccaaaaaaaacaaaccctcacttagtttgattttttaaaaatatacttaaaatttttagatcactgattcttatctctaatagaaacttatgaaaaaaatctgtatttcagtacttaaatgagagtgaaacagatctgtgagacaggaaaaaataaactgcataaacaatttatcacatctttcctgttaactaatatgtgaatcatcaaaaacaaaggtgattactggtctcagagccactctcagtcctaaacggcctctcaaatcttttggggacaacagaaacaagtaaaagtgaggaggaaagcctagtccatcttgtcttacttggctgactgaggccaaaaccaactatactctgatagtaagaaatttttttaaaaccacagaaaactggaagtgggaaatcgacagaaaagaagaatcagatacttgacttaggaggcaaccctatctcttgagatttctctgaagagactcagaacagagattgagtttacctcagattcacccaagtataggccaaaatcgcgggcttctggaagagaaaagagttgttcattactatttct

SEQ ID NO: 41458 - DNA, 2300 bp, Homo sapien
tagaagtaatggagtagggtgaattataaacatttataactgcagatatgtttgactcatgttgctcaaaattgttaagaagtattgtgtagtcgtttagttaataacatataaggcctcatgtcagaaaatatactgagagtaaagtaagaaaatgtaataatatggttaaaattgccaaattcttttcgagaatccaagtgtgttgattattgtagattattacatttttgatgtatctggtttgttatcacctaaatacacagcaaacacctgtgattgttttagtgatccttgtcctgtcttcttcaagtaatctcaaatatgtgtatttagactgttgcctattcatatatactcagctgtgcctgtttgctttgttacttttctatgtctaatggagcaatataaaaatttatggcaactgtcacttaatgtcacctttacctttaaagaaaaaaggtaaagccaaatcatgccgggtaactacgatgctctttatagttaactaaattatcagatatacgttgtaataagttgatctctgatatcatgggccaaatttagggaacatacataaacacatacatgtaagtatgtttgtatatcattgctactccacatttactttattagccaataaagatcattagtttaaaaataacttgtgtattctccttccttgaacaaaagatctttcttttaaaaatttctataaaactaaattatttttaaggaatgagcaaatgcatgtcagctgctaaatcattctcacttttgcttctctacaagaaattagcagggtgattttcagaattgtttgctctctcatcttcacagtttaaaagcacatattcttttaaagaatgctttttctgagatttcccctaatttatatttcttattattacaatactatgattattctttgaattatagttctttgaaaactaaaaattctctcatgtaaaatcaaaaacagtatcttttttggctaaatcagaaacatctaaaaatatcagtgcattcatgtgaagaaatacttctaaaataattcagttatgtaattaatataattaatacttatctataaacttaataattttaaatagtcacatggcttctacatatcaaaaaattcatttttaatgtgaactaattgttcttgcttttaatattttaggccacttggtcattctggcattttatggtagagaatacgttgagtttggctctggaaggaatatgaggtaatttgaacacatgttctttataaataatgaactgtgtgtacataatacagagtattttcagatgtcatatatggagtctcatgtctgaattttttcaatagtaattttcttttttcatattttgatgtttttcctttcttgatggttggcaatagttaatatggtgaagaactttattttctatcactactatatatgttttcaagaaaacagtattatttacatagttatgtgttttcagtttatatttttaaatgcttcagttaacctagctttcggtggtgctgtaaaaaccagaagagaattccttcctttccacctaccaacttcccatcccaaccaatcctgccccaggtaggattaaggtcatgctgcatttaaaagtcataactgccacacagagttttatagaggaacaataaagaaagagcactggaactccaataatgtaaaattttcaggcactactcagagtgctttgagagcacaaatatgagactcataggttagtcttttcctgtcctttgatacccatatgtgaccctgtgtgatgtatgggtttgtcattctaaaatggcagtcaaataagtgtatatgccacatatattttcatagtggtttcatagactaaacattaagcctatatcaaaggaagtttcaattaaaggtagaaaaataatagttgactttatgaaattaagccaatgatacagtagcaggcttatcagtagatattaagtatttggtagagtaattggttaatatactgctgatgtcataattcccctactctactactcaataatagttttgttatgtaggaagatgcagcagcttgtttgtgtgaacttctgcttccactacaaacagtactttaaagacaggccttccactgccattcagaaaggtgaaaaaagcaggagtcagggtggggtggataggtgggaagggtgtcagagggataggcatagtgtctgtgagtacttgtaagctgtcatcattggtctttgaggttatgtttgcatccaaattacttccttacctttc

SEQ ID NO: 41459 - DNA, 2300 bp, Homo sapien
caaaaataaaaagcaacagctgacaatgaaagacgggacaggcaaactataacagacaatggaatttaaaaaaacaaagctattcagagagccatgtagtgtgaacatacagccctacacaccattataggaatgaggactttatcagtaaatataataaagagaatattcataacgactaccagttttcataaagctggaacgtatacctcatttcccatctgtatgtcaaatgggacccacactggtcaccacacaatcatttgtctgactagaagcccttactaccacagtgggtcaggaaaccttttagctttagcactaggctcaccactgttcactactgcaacacattattattgtaagaacatctctaactcatgagattatcaaaggcaacaatattacttttaaaaacgtacccaaagtagctggttcctaaaacaaggtaaccttgtattctatggcacgcagccataaactaaaaccaccgacttttaggactctcggcctgtttttcctcaaatgcgaatattacctaacactggtgttgttgggattacatgagataatgtatgtaaaacacttagcaccagttctgggacacagaatgagctcagtattattttagcgctggtgaacgcatgccggcccaaatcccttacttgcaggtgcaaaaattaagcctcaagaggagaactgacttcctaaggctctacttctactatgtcattgtcctggttaagcagcttagcggcaaatgttgggagattttgggtattggcagggcctgggggcatgtgcctgctggactcgagtctgcagagaattggaggagtctgtttgaaccatgaggcattacaggctgtgccttatcaacgggtgtttgagatggcaggttgtgttaacaacattcaacacagacggaagccattcgtctatctcaatacagccacaaacagcaagaccctcagctacagtaggctgagtaacgggggatgagagcacggcaggtaacaggatccgggcttgagctcaactcccagttcggtctttaaagaggggtgagcacttaagggctgaaactaacagaactagaaactaacaggatggtatcgcaggcaggtgtaagctaccccgcccctctacgccttccgtcgaggggaaccgccaaatgcgctttctcagcctccgggcagggcaatttcttgctctctacaggcacttactcccatcccttgtagatagggagtgatgacctcgctttttcgttatggagtgagggccggacacgcttggacctcacctctccgcgccacgctgcggcggcaccgcgggaggccgactcgcgcccacgcacaccccacgctcgccttctctaagatggcggcagaggcagctcgctcacgccccgccgcccgcgctcctccacaagtcgtgccctcaggaggcgggagcgggtgagagcgcggaaagcaggagggcgagagtgacgcggaccctccagtctagcgcaggccgcggagccctgaagcgtccaggaaaaggaaaagccaggaggctgacgctaccaggaacaccgccggcgcctcagaaactaaaaagcggcggcacatccgggcccctctgcccgccccgccccggaagtaacgtatcgggcagggcgggggccgctcttcaaagtggattcttccctcgccatagctcgtttcttcacaaagtgcctggaatcaccctcgccaccccctcccccgggttagccgttactctctcgtggctccgggacgtctctgtacaaagctggctgctgggacaggcagccctcgtttcacagatagtacccctcgcaccacgactcctgggcctcgccagcgcgtgtagtaacgtccctccgagaggactcttggtgacctcagccccagccaagcataggcgcacctcttcggagtcctgcggtggaatcccggcctcgtgccccgtcaccccgccgccccgccaccccacccgggtttgggggccgtcagtcacagcgctgcgccctccccttccggcggcttggccgggcccgcctcctcccctcttccctcccccacccctccccgtgcgagtgtctccctctccctctcgctctctctctctctccctctctctctctcttttgtgagttatagcaaccgttgccttgtgaatcaagcgccatagtcaccgtagtcctggcgactgttacccatcaacaacaactactcctctcctcctcctcctcctcttcctcctcctcctccccaccaccaccatctcca

SEQ ID NO: 41460 - DNA, 2300 bp, Homo sapien
cgcttataattttgctgtctccctctttcccactcccccctcccaccccactgcccttctaccaggtgctcctcatatactatatcgacacgtccactctgctatttccacttacaggctttcaagaattccttactgattatgttttatttcagggtaggggcaactataaaatagcatcattatacttgaacacacagctatccctgtgttaggacagaattagaggtacacctggtgctttctctctagaggaaagcaaagtggtaagaacaatgaaatttcaggtatagtcttgcacattgccattaacagtgaatatcaagtgtttcttcacagagttttgaatggtggtatggatggagatgaacgccagtgtagtgactaggcgaaagttgagattaccatcgtacacaggatgccacagtggcacattggaatcatcagtgttattttctgagtaatgtcttcaatggtggtgatgtctttcttaagttttgatagtccttccactacctctctagctcatcccaggctggcagacatataaacattgtttaggatccaaaagatcctgtgaaaaatagaacagtttaactgtggtttcctcacattaattgtgagcctatgtgattctcaagttagagtgggagatcccatatgatagaatgctctcctggagatgaattgatttgtgtttttgactccatatgagaagggacatgccagataaccaactttggaactcacatttgggaggaagggttaagaggaagtcctggcaccactgaagtgaactctacttccggaggtaggtgcaggacacgtggccctgcggtaatggtaagaaggccagtgtacccagcaattacgggggacaggcaacatagaagctgcctcttgaaacaagttgtctttcaccctgaaaaggaggtatcatcaggcaacttacgctttaggttggaaaagtgaaagttatataaatcctgactatagattcctgaaaggaagagaggccattggaaaagctgaagaagaaaaactatagggaacttttggctgtgattaaaatggagggagctacatctctgaaaggactgcagaggcctgaatgggaatctgcatagtgaggcagtattttagagtgaccaagaatcttccatgggcccgcaaagggcagattcgcagtagcaacacgatgtttaagttgtactgacatttttggactacgtaagacccaggattttggggataatttatggagacaagatgtatctgttttctgttgctgctataaccaattaccacaaacttagtggcttaaaacgatacaaatttattatcttacagttctgtaggtttgaagattgaactgggtctcacagggctcaaataggggtgtagtcagggccacatccctctggagactctagaggcgaatctgtttctttccctttgcagcaattgaggactgcccacatattttggctggtgaccccttccttcagcagtgaggctgagtccttcttacactgctgcctctggttctttttcttctgcctctctcttccactcataagaacccttttgattatattgagctcacttggatatttctcccatttttaggtcagctggttgccaatcttaatgccatgtgcaaccttaattctcctttgccatgaaacctaatattcacaggttccagggtataggaaacacatctactgggagggcctctattctgcctaccacacaaaggaatccaaacagagagatactgaatttcctggtaataccgtaggtagtaggtaagagtgcaggcaggctaaggtatagattcagccctggttcccaacactagctgcatatataatcctgtgaaagccttaaaaatgcaaatgaccagattacaccctcagacattctaatgtaatagatttggtatgggttccagacattgtaatattgggatacatagatctggataacccaggtgatttttatgtgcaggcaggattgagaatcactgatttaggatgaggaagtcgataccttaactctagaaggtgaggacagaaatccagagcactcatgtcctagaattctgttcttttctaatttccatcaggtattttagttacatatcctgtcccacttctttaatttacctctagctatcaaatttaatatatgagctttaagtattattagaagaaatatatgcttagaaaaaatgttattcttaattgcactttatacattttaatttactcttctgatctgtctaaacttgtttt

SEQ ID NO: 41461 - DNA, 2300 bp, Homo sapien
ctgaaagatagttacagatcttgctttatggaggtcactgaattcttcagtgttccatgaataacactgttcgggtctaagaggtcacagcacaaatagaaagtagtgttggatacacatttcttagtctctaccaacagagatcaccaacatgagaattgttcagaaggataacgatgcctcaagtatgtaaggtatgtctgtaatacaaatgaaacaggcatttgggggagaaaaaaccttttgccttactcgagagaggagccattccagaggcttgcctgcacggaagtctgtggctctagctgcatttcaatgcagtgcttagtttattcaccaggggtcatcaaaggtctggattttctttgtctacttgttgactcatatgtactctctatatacactcaagaaccactggattctttagaattgtgcatcaggagatgtggcttgctttccttctccccaccactccaggcccacccccagcacttactctttatagatttctaccagcacactgcagcaagcaagtccattagatgcatcacagaaatgccttttctaactaaactaacttatttaaaaaaaaagagagagaggaaacatggtatctaattaggtttttaaaaaataatcattttccaaagttagaaagtgaaaggcttttcacactattgttttctagattcatgaaccaaattgcatgcttggaaaacaaatgggtcacggttcacttctgttagatttcacttagtaacgggtcacagagggccagatcaggtcaccagatgaaccagttaacactaggctgggactttttagtccctgttgagcaagtaaataatgaaagttttcaatgaagattttgtttctggcacgggtaggatctcatgggtcttggtgaacctgatgtctggattgaataccaccttttgtgcagcccgcagttcctatctcagttttctgtgaagcacccttaaatacctttagtacatagctattgcaagtagtttgatactttcttacctctatcctctgaataaaccagattgcatcctttgaaagctcaaaagtgagacatatttcagccacaacgaggagtggattcagcttatagcttcttcccaggggaacatagcttctatttatgaatcagtggtattgagaggtgacaacctgctgacagccctcgcagccctcgctcgctttcggcgcctcctcggccttggcgcccactctggccccgctcgaggagccctccagcccgccgctgcactgacggagcccctttctgggctggccaaggccggagcctgctccctcagcttgcagggaggtgtggagggagacgcgcaggccggaaccggggctgcgcgcggcgcttgcgggccagcgcgagttccgggtgggcgtgggctcagcgggcccgcactcggagcagccgaccagccggcaatccccgggcagtgaggggcttagcacctgggccagcagctgctgtgctcaatttctcgcccggccttagctgcttccctgcggggcagggctcgggacctgcagcccgccatgcctgagcctccccccactccgtgggctcctgtgcggccggagtctccccgacgagcgccgccccctactccacggcgcccagtcccatcgaccgcccaagggctgaggagcgcgggcacacggcgcgggactggcaggcagctccacctgcggctgagtgcgggatccactgggtgaagccagctgggctcctgagtctggtggggacttggagaacctttatgtctagctaaaggattgtaaatacaccaatcggcactctgtatctagctcaaggtttgcaaacacaccaatcggcaccccgtgtctagctcaggggttgtgaatgcaccagtggacactgtatctagctactctggtggggaggtggcaaactttgtgtctagctcggggattgtaaatgcaccagtcagcaccctgtcaaaacggaccaatcagctctctgtaaaatggaccaatcagcaggatgtgggggggggtgggcggggccagataagagaataaaagcaggctgcccgagccagcagtggcaatcccctcaggtcttccttcgctgtgtggaagctttgttctttcgctctttgcaggaactcttgctgctgctcgctctttgggtccacgctgcctttaggagctgtaacactcacggcgaaggtccgcagcttcactcctgagccagcgagaccacgagcccaccgggaggaaagaacaactccagacgcgccgcc

SEQ ID NO: 41462 - DNA, 2300 bp, Homo sapien
gtcccagctgctagggaggctgaggcaggagaattgcttgaacctgggaggtagaggttgcagtgagctgagatggtgccactgcagtccagcctggttgacagagtgagactcccatctcaattaaaaaaaaaaagaagtagagagggtaaactttcacagtcataaggtacctggagaagtaaaattctgggaacaaagttgagcaacatgatcatctgcatgtttcaagtgttctcaagagttacggaaaatgtgggtcaacctgaagacactccactgatggctggagcaacttaggtatccttgccccttaggaggcaaacctaccacagccggaggctctaattccagagctcaaaatctttttgaggaccgaatatagaatagagtcatggacaaaaagtggacatttgcttggaatgacaaaaacatttcaagctgaaccttaaaatatttaaaactctaaagctttaaaaacactaccagacatataaaaacagacaccaagacaaatgtgacagtttcgaaaatgagccatatgctgtatgctacatacaacaaaggtgctaatgttttccatagatatggatagcattgcttcccaaacccatttctgagaggattaaatacagccagactagcccatcactagaaaccatttatattgtatgttaggccatttttcaatcacttctggttagtgttgactgttgactattgggttccaggtcttagtaagatcatagattaatgaactgaagtagtaggggaatgctttataggctgtttaaaattgtttgctaatttaatgtgctgaaataaatgttcatatatcaaatactgaacaaatcagacacacaaaaacaaaagctagtcatggtttttcatatatatatatatatttaatacaaaatatttatgtatgtgttggtaacactgcacattgatatatttgatgtctgtatatgaacctgtacctgaaacctctgtaagtttggtcaacccttcttcgtctcatctccctgtgtctcaaaaagcagaggctatgttgtccccaacagtaagtgcttaaagcaactgataaaggtccaatgggccatgattaaggcccagttttgatgactgatgctcttgcaatacttgcttactgccctttctctctgcatctgaatcaactgagaactgtcaaatttaaaacgttgtacaaggatgtctttctcccattccactgcaatgcatctgtaaattttaaattctaatggcttattcatacttttcgaaagaaaaaaacagtctgctgccaaacctggctctggaatcagatgggggtgggggtagtatctgcaacccacagaaaatagaaaattctcattgtctggaatgtggagctggtaaatcttttttctcatcttcatagcatgactgtaagagtgttccatatgtaaggacaatcactaattatgtttgcataagtatatcaccattacagagagtagaaaatgcataaaaatccaggctgagtaaaagaaaaataacttccttatggtatattaatcttttcttattttttttgttttttactacatacatgtaattttccaaatatagtcacctattattcaaacctaggcagatggaaggtggtctgggagtgtcatcccatctcctttcccacaatggttggcaaacatgaatgaacattcttataagttggtttgctgatgtgaaaatttccttagagacctggggcttccttttaaaacataaagatgacaacaactgtttcattaagaaatccacacgcagcctgctacctgcttaaggaggaaacatttccttcgagtctaaatcaagtgagtaaatgtaacataactgcgagggttgggtacactgaatttctggcagaagtccataactaaaagaggtaatgcattattttattttatttctttatgagaaaaaacaatctgctgccacacccagctcaggaatcagaaggggtggagagcaatttgcagcccattgataaagaacaacacagacgatcttaggaaaatttttctcacgtgagcattccttttaaccagagtaaaaggcctaaaaaagggtagttgtggttggctctgcctttgctgtctttacctgaatagaggtcaggcccgggtccaggggagcgtcccacggtcccttcagcagcagcatctctaggggaagtggccggctgcagggactgcacggtgaggcaatctgtgagcaggtctggatggagctctgtgctggaccgcaactaagaggac

SEQ ID NO: 41463 - DNA, 2300 bp, Homo sapien
tctcggtccttacattttaaacattgcttggtgtataaaatgtggatctaatatctgggtggaggaggggtggcctagcaaggtcttttgtcatctgaactgacaatatttctcccggcttgggagttgtaagcattcggtatcgagtggtgtgaattctgcagatcctaagtgaaaactggtcatcaactagcagtatgcagttcagagcctgctgaacaaactgcataaacctcagagtaggagaacatgacagaaggctgcgttatctgaaattttagctaatttttttttaactagcaggagccatctgtcatgattattctgattcaagggctaaattgaacggaaggcattgctgggcgattaaacaagttctctcaaaatattttcatacctttctgtcttgtcagaagcttttttttttttccaccaaagatgtcatccgattgtggattttttttttttttttttttttttttttttttttttttttttttttttgcagggggaggatttctgtctcccatgccatagagaaaccttgtcactgtgttggcactaaggaatggggtgagatgcaagtaaatgggtgtgtcctatttgaagcttattcttcacttctggctcttgcagccttatggtgatgttactcttgggcctgattgagatgttctgaattcatccagatgttctaaattaattcattagaggtttcttcagagggtgtcagaggggagcatttcaagagtccttttcctactcatacttagaaaggggaaggagttactgagccggaaaaaaaaaataggcaatgggacagaagactgcatttggtggcaagaatctgccatcgctttcttgtcattccagttatttttccacttcagcctccaatttggaagaaaaatttctgtgatttcctatgtcatgagcagtaacacagattttggaagctctgtcctcttggacaagtgtggaaatataaagtttggaaagatatttacatcttttaaagatgtatggaaggtaacctgcctcccctctcatcttctaacttcattattaaaagaaaaaaaaaattcacatgttgatgtgaaggcaactgggtgtcatttccctttaaatagtacaaaacatatgggggcaggattgcatttgtcacaaattgtcaaaatatttttttaaagaaaccaaaatcttctagggatggttccaaatgtgcctgatttccctgagcagtgagcagtgcgacctttacattagcagatatatttataaatacacatatggcccgccaggacctgattggctgctgatctgatgagacagcgacagatttaatggtgtttcacctacctggggtttagtttttttagttactgatttaccttagcagttttcacttacagtcacctaatttatctgtgttttattgacaggtgcaattttttaatgagggctgtggaagcagagagaggttttgaatttcttgatgttttctgtggggtctttatatgatgatagcttgatatttttcctcctaatgaatctgtgagacttgtcacgatggacaaaaaccagtgacataaaaaagaaccaaatatgtttatttggaagagtgcaagtaaaaccttaaggcatgttactggtttctagtctattttagactttttattttacttaaaagtaagcacctataaggtactttttgcttctcaaaaaaaaaaaaaatgatgcaatgcaaatgcagaaacacaataaagtaccctatccagaggtcagctaggttccagaaaagtgccagaggtttgtattccaaaaagtcaaatcgcccaaggttactttgacagatacagcagtaatggctcttactaaacagggttctgaaggtgttagtaatacttttaggatgactttggacagtgttattcaatttttaaaacaccatgccctcttccaataagcacaaagcaaatctcagtcctttccctattcctgtgcccccctgggagtgtacttgttttgtacattactcttccaactgcccactccctctcctgttgagaatcttcttggctgctagtttagaatgggcttgtctccatcagccaagaagatttcatagggctagactcaccaaggtttgtgttacaaaaatgaaaggtatgtttctatattcacaatataagattatattgtttaatgtcctttttcaaactacattgcaaccccagaaattctaatcttttcccattccagctgcaaatccctgatttaggaggcttctctcccctctt

SEQ ID NO: 41464 - DNA, 2300 bp, Homo sapien
gtgacgctcccactcttatgtcaagagatggagtctatttctctacccccttgaatttgcatgggttccaagactgtttgggccaattacatacagtagaagtgatgctacatctgttggaggcatgtttctaaatggcctgaaagccccctctttctgcctctcggaaaccagccaccatgctgtgggaagctcaagtcatgtgcagaggccatgtgttggtgttcttattgacagcctcagcgtagctcctagctgatagccagcatcacctggcagcacgggagtgtgccacttagatgtccatccagcccacccttcagatgactgctgtcctaggtgacatgtgactgcagtgcatgagagaccccaaatgagaagcatcctgatgggcccagtcaacccctagaaccacaagagataataataaattgttgttttaaggatgctaagttgttgagtggtttgctatgtagcagtagataatcagaacatgtatacaagtcatgtgaataagcatttaactttgatttttctttccaaactataataaactgttgacccactaccatttattgatctcttttcatccactcatttgtaaagcaataatatgcaaactttactatatatttgaggtcatgattttatacttctgttctctttctttatttagtttaattagtcttccttctgtgttccacaatatatatatattttgagacagagtctcactgtgttgcccaggctggagtgtagtggtgtgatctcagctcactgcaacctctgcctcctgggctgaagtgattctccttcctcagcctcctaagtagctggtattacaggagtgcacaagcacacctggctaatttttgtatttttagtggagacagggtttcaacatgttgaccaggctggtcttgaactcctgacctcaaatgatctgcccgcctcagcctcccaaagtgctgggattacaggtgtgagccaccatgcacagcccacaatttttattttcatatttttgattattagtactattttattcttccaagttagaattcattgtcaaggtagtgaataaggaaaggcccattaggactttgcattaattcagtggttttctctctgcatgatattgctccttggggacatttggcaatgtctagacagagtttaattttggttgtcaccacgaggggtgctactggcatctagtgggtaagaggctagagatgctgctcagcatcctacaatgcacagagcactcctgctcttgcaacaaaaaactatggaacacaaaatgccagtaatgcagaggctaagaagcactgcattcaacctataagaaagttaggaagaatgaacatacttattatatgttgctttctcctccagaaacatttacatatctatgtttatttaggtcttcagaaacaggtagttttcttcatattacatgccattcttaagaatttttaattctttttttcattatattttaaaacttataattgatggtatataagaaacctattgcttttgtaaaatttacattgcgtcttgtcaccttattgaattttcgtttataacaatttttagtggattctgttgaattttataggtagaaagaatttctgaaatttaactttgtgaaaaggagagagtgaacaccacgtttactcagaaaatgggttggaaaggatttgagagattatttaattactcacctgcattttagtggtgataaatctgaggcctagagaagttaaatactctgcttcatgtcacataatttgtgtaggctcctagaatggaaagtagcccaaacaatagcctttggatgaaggctgtgaaaatcctcataatctacattaaaatgtaaaccttgttattgtgtttaaagcctttgagatgttatagagttgggaatgtccttagggatttttctcttccattcccctcctcctacattctctgcaatatcctggcaaccccgtcgtgtattcttccaggaacaagaaccctgcctcacaaaggttcccagtcacttctgatttctagaaagttcttcctttggttccttcctgaggctcacacatcctttatggttgaagggtgttggaggaagcagagttttcatcagctgctgaagtggcaactaatagaggtttgaatggccgtagaaaaatattgtgttacttgtttgttgtctaggtgagatatgagactgggagggtttgaggttctggttttttcatacaagacctgtgcaaactggagatcccataaatatttgt

SEQ ID NO: 41465 - DNA, 2300 bp, Homo sapien
atgctctcttaaccgggacctgagaactttaagggtctgcgacaactggctgtgaggccttgggcaaaacctctaacgtctctggggctcggtttcctcatcaggtgaagccagggtccactctagctttaatagtctctcctcgagattcccggccccatactaaagggacctggtccactggggggagctgcagaacttccctcttctcacaaactccagggccctggggccccaactctcgggagatgctgaagtcttggaggaagttggttctgccggctcggggagagggtgcaagagcaaccctctttgtgaaacggggccgcgactccacgagtcctgtctctacggaccctactccctgtgattccggaagcacctccctaccccttccccaggtttacatgctccagagatgagggccaagcggataccggggcaaactagcgtggggctcaaggaggcacacagagcagtggtctcagtcctcgagaccactcctgccaagaggagggctggagaagtcgggagaggtgccgggagcgggggagaggcgcgtaggacaaggcaggaggagggcggcccttatcggttccctataggactggcttcgctgccggggtcggagattcctcggcgcggagctaggggcgggtccggaggcggaggcgacagcgcccggcggggtacgcgcggctgcgaccccgtcactcccccgccgcctccgcccctaaccctcggccccgtgcgcgagcgagcgagggagcgaacgcagcgcaacaaaacaaactagtgccggcttcctgttgtgcaactcgctcctgagtgagtcgggggccgaaagggtgctgcggctgggaagcccgggcgccggggacctgcgcgcgctgcccggcctggccggagcctgtagcccgggggcgccacggccgggctcgcagtccccccacgccggccccccggtccccgccgagccagtgtcctcaccctgtggtttcctttcgcttctcgcctcccaaacacctccagcaagtcggagggcgcgaacgcggagccagaaacccttccccaaagtttctcccgccaggtacctaattgaatcatccataggatgacaaatcagccagggccaagatttccagacacttgagtgacttcccggtccccgaggtgacttgtcagctccagtgagtaacttggaactgtcgctcggggcaaggtgtgtgtctaggagagagccggcggctcactcacgctttccagagagcgacccgggccgacttcaaaatacacacagggtcatttatagggactggagccgcgcgcaggacaacgtctccgagactgagacattttccaaacagtgctgacattttgtcgggccccataaaaaatgtaaacgcgaggtgacgaacccggcggggagggttcgtgtctggctgtgtctgcgtcctggcggcgtgggaggttatagttccagacctggcggctgcggatcgccgggccggtacccgcgaggagtgtaggtaccctcagcccgaccacctcccgcaatcatggggacaccggcttggatgagacacaggcgtggaaaacagccttcgtgaaactccacaaacacgtggaacttgaaaagacaactacagccccgcgtgtgcgcgagagacctcacgtcaccccatcagttcccacttcgccaaagtttcccttcagtggggactccagagtggtgcgccccatgcccgtgcgtcctgtaacgtgccctgattgtgtacccctctgcccgctctacttgaaatgaaaacacaaaaactgttccgaattagcgcaactttaaagccccgttatctgtcttctacactgggcgctcttaggccactgacagaaacatggtttgaaccctaattgttgctatcagtctcagtcagcgcaggtctctcagtgacctgtgacgccgggagttgaggtgcgcgtatccttaaacccgcgcgaacgccaccggctcagcgtagaaaactatttgtaatccctagtttgcgtctctgagctttaactcccccacactctcaagcgcccggtttctcctcgtctctcgcctgcgagcaaagttcctatggcatccacttaccaggtaaccgggatttccacaacaaagcccggcgtgcgggtcccttcccccggccggccagcgcgagtgacagcgggcggccggcgctggcgaggagtaacttggggctccagcccttcagagcgctccgcgggctgtgcctccttcggaaatgaaaacccccatccaa

SEQ ID NO: 41466 - DNA, 2300 bp, Homo sapien
accaattcagcccagaagaggtacagatctcattctgagtcattccagggttgtactggtacaagaacaactgcatttttactataacccatggaatataagaacattgcagatctacattcttggccagaaaaaaaaaaaaagaaaaaaattcaaccaaagcactatacctcttcagtggtaaatattttaggaatgttagaggttcatgaaaatcacacctaaataaaatgacattcccactcttgggctcttataaatgaagagattttggggatctccaggttgatgactcctaactttcccagtgtttttttccatgagctattgattaaagttgggtgtagcactatatttttttctcttccagctaagctgttcccatcatttgggaagttttagaagcttctgcaagcccctaggataccattctatgcatcaaaaccattgtatttaaaatgatatttgagggacattggaaaggttttttgcagtctccacccaggcttgtcttgctcctgggaagcagttgtacagcacaagaatctgatgaacagaagttcccatgatgcattgaagggttagtgttgccatcttgctctgttccttaaggctggagttaatgaggaagagtttttatgtgaatgtcaggcatgttgcaataactagccacaatggaatagtcatggcaatttccaccacttggtttctttgtttttgtgatgttgctgcatgcttcattttatgagtattttcttttcttacgtgtggttgagcccatctattgccatcttgggcttgaatacttgtatttaaaagagatgaacagagagaaactggaaaactgacagaatgacatatcctgacctcttactatttttcatcccctacttctgctgacaaatattctgatgagtttgtgtcccaaggtgaaggaaaagaaaagaaaaagtactgtggaaaccaggcttcttttggttatgttaatatcatggatacagaccaagcctagtagtattcccactgaaattagataaatgaaaactgccaatagtcttttagttttggctttctggggtaagtcatttgtgtccttgaggacttctgtcttgatcaaagcatctactacctgattgctaatttatattggagtggtaacagtagaatagaatataaggacttgtgaaattctaagtgtctggtggcatcctcactcatttcattcatgatggtgaataatactgtcaactgcagaaaggcctacctggaggatattgtgtgcattacatacctagattcccaagatggaagtccttgcatctgtggcaatacatgtgatgaactactaggagcagactttcttgtaacaaccttttgagggctctggtcaacacaagcagaagcggtggcgagtcagagcttaggtggggtatgaggctgaggatgttgaattcataaggataaagtgccactttatagacgtaacatacgcagggaatatacctccattcttaacagcctgtgttcagaattttatacccttctaacacttccatcaccttcctctcttccctgcctatacttggaaaggatgccaaagccttccttagtgcttcacctatccagtttcgaagctgtcatgtgcatccgatccgatatttcaaagcaacccttttgccatttttcactgtgttattctctccgtattactaccggatttttttggttgtttgtttatttttttatgacctgacatcaaatcctgtctaaacactaacactttttcatgttaaaataagtcagtttaacaaataaggccaggaagaaggcgaagtgtctccctgctgttaccctgttctggagttcctcgacttctggcgcacggggagtgtgtgtgtgtgtgtgtgtgtgtgtgtgtgtgtgtgtgaatgcgtcaagagggagacacaagctcggccttcgaattggccagcctagtgacccgcgagcccgcccccactcttccccctccccctccggcgctcacactcaggaagcagctggctacaggccggccctcgcggccgcacacacatccacactcctcgcccggctgccttcctccctccctcttcccccttcccctctccctgcagccgcgtccacactgcgccgcccgggcagcccagagcgcggcgcgcacgggcaccggcggcgagtgccgcggccactgcccctcccgggaccccctgtacgccgtccgcgccgtccagggtcacaccggcgacggaacccgccggcagcaattagccagcatcccg

SEQ ID NO: 41467 - DNA, 2300 bp, Homo sapien
ttataacatgtgccatcccatgctgttaaaaacttcataaacttcctttatgtaggctgcataaggtactgttgcttggcagttccataatatatttaccattccatttatgttggacatttgcgttttttccagctgtttttttactgtgggacaaatctgttctctcgcgcacgctctctctcttttttttttatgagacagggtttccctccggtcgcccaggcaggagtgctgcagcgtgatctcggctcaccgcaacctccacctcctgggttcaagtgattctcctgtctcagcctcccgaatagctgggattacaggtgcatggccctaaacccggctaatttttgtatttttggtagacgggatttccccatgttggccaggctggtctcgaactcttgacctcaagtgatccgcctgccttggcctcccaaattgctggaattacaggtgtgagccatcgcgcccgggactattctccctttcttgatagtttcccttctgacatttccttccttctttctttcttttttctttttttttgacagtctcgctctgtcgcctaggctggagcgcagtggcttgatctcagcttactgcaatctccaccttccaggttcaagcgattctcctccctcagcctcccaagtagctgcgactacaggcacgtgccaccacgcccggctaatttttttgtatttttagcagagacggggtttcactgtgttagccaggatggtctcaatctcctgacctcgtgatccgctcgcctcggactcccaaagtcctgagattacaggcaagagccaccgcacccgggtccccttctgacatttcttcagatcttcctcggacacccaacgaccttaaaatccctctaaccttctttctctcaaagtttactttctataaagagctgataaactcattcatactaaagtctacagggttgtaaatcttaatctattatcgcttaaaagatgcttgtatcaatttacaccaaagggatgaagctctaattgtggggatttagtcatcagaaaatctagtaggggaaattctccctacccacaatcagagtagattctacaatagcaaaaagggttccaggctcacttaactttaggaacgctgataagaagaccgcttacagctgcggaggtactgatttggtaaagggagggaaagagattgtatacgtgagagtgaaaaaattgggtagaaaaatggaagagcatcagaaattcacttagcaacaccaaatatatttggcaccactaacctagtttctcctgtgtttgcctttccaatccgttggaccttaggggatggaccgcccactttctccccagagcggctcccgggtccggttctcagttctaatcactgccccaagcctccatgctccagggcctgtggtcacagagcaagtcccaaggagcagaagtaaagttctaagagaaatcaccatctccttgtgcagggaacactcccaagcccagtgtccacagacaaatcacctccagcgactcgaagaggagaataatccctgtgggggcactggaggctccgcgtgaaagtttccaaagccatgttctgccccaggactcctttctctcctcccagaagcttcaggctttcgcggctgctggcacatcccagcctgagtagccgagcaagagggacccaaggcaggatcagcttcccccgacttgaaagggcacccgttctgcaggtgccggcgctggaaatagctggtgtggagaacggagagggagacgtgcaggatgaagtccgcgcccaggagggcagtggctccgcctctctgggttagggacagaagaaaacccttaacccaaagccctagcatgagtgaggcgtggaaagcgagacagactccagtggaaggctgtggggcgggactcagggttcccggagaggccgccccagctcctgccgcagcgctgggcgccctaccacgcctgctccctagggaccccgggcgtcccacgcacgcacccaccctccttcccgggcctgccgctcctccctccttcctcgctggttggcccaggcgccgcagagcgcggcggcagcaggaggagccgggcgcgcctgccacgcaaaactaccgggctggcagggcggcgggcgcggtgcgcgatcccgggtggcggcggcaacggcggtggtgacggcggcgactgcagcggccggctctcacctctcccctgtgcacccgcatctcgccgcgccgccgagcagccagcagtccccgggtcgcccagcccacg

SEQ ID NO: 41468 - DNA, 2300 bp, Homo sapien
ctaaagagcttctgcacagcaaaagaaactaccattagagtgaacaggcaacctacagaaagggaggaaatttttgcaatctactcatctgacaaaagggttaatatccagaatctacaaagaacttaaacaaatttacaagaaaaaatcaaaaaaccccatcaaaaagtgggtgaaggacatgaacagacacttctcaaaagaagacatttacacagccaacagacacatgaaaaaatactcatcatcactggtcatcagagaaatacaaatcaaaaccacaatgagataccatctcacacagttagaatggcgatcattaaaaagtcaggaaacaacaggtgctggagagaatgtggagaaacaggaacacctttacactgttggtgggacagtaaactagttcaacccatgtggaagacagtgtggtgattcctcaaggatctagaactagaaataccatttgacccagccatcccattactgggtatatacccaaaggattataaatcatgctactataaagacacatgcacacgtatgtttattgcagcactattcacaatagcaaagacttggaaccaacccaaatgtccatcagtgatagactggattaagaaaatgtggcacatatacaccgtggaatactatgcagccataaaaaaggatgagttcgtgtcctttgtagggacatggatgaagctggaaaccatcattctcagcaaactatcacaaggacagaaaaccaaacaccgcatgttctcactgataggtgggaattgaacaatgacaacacttggacacagggtggggaacatcacacacaggggcctgtcgtggggtggggggaatgagttaatgggtgcagcacaccaacatggcacatgtatacatatataacaaaccagcacgttgtgcatatgtaccctagaacttaaagtataatttttttaaaaaaatgtgacatgctctactctgtagccttccttctccccagatctccctcaatgacattgtttggggcaaaatcattagacttattaaggttaaaattgattccatctccaaattccaaaacaaaaatgttaagagattgtcagtgatgacatagtaataacatcaatattctatgaatagtttagtgtgaagaaggctggtaatgttttgactatttatatcaccatgttattcaccagaatggaatctagcctttatcactgtagctaaataatctaggtatgatctgaggaaacagtaaatctgaacagcctttttgttacaggattttagttacaggatttaactaatttcattatttttttttcgctatttttcttggtctaacacagttttttctaaggtccacagtttattaataatccctttcgtaaatgtaatgcaattacctctaacacctccaaaaacattcagaaatgctctctttgctccagttaaaaaaatgccatgggagttccaagaataggaaacatcaaccagggtatttagcactagattgacagaacttggctcagacctgcattacaaaagcaagtgttccgactgcggttttgcattgtgctgaagtgctttcggataatttttttaaaaatgaaatttaccaaataatgctgtaagaactctgttctttataagaactctcaggttatcttcagacaacaaaagccaatgagaaagtcaagatcaccttttcaaatctcatgctctcctgaatcataatggggaacgcagagggaaagctgttggtctccaggtactgattcatgaggtagaccccgaggtacacatcttgtttgccaggcaggaacactcctgggcaagaaatcttaaaaagaaagaaaacaacaaacaagggagagaaaacagactttgctttgttttgttacacggggctctatttctcttaagctcctacagacactgacattttccccatcacctcactccctcacctgtacctcccaacgccaacatcctcccctctgctctcctcacattggaaattccaactccctcccacgtctccaccaggtgtcacaatcgcgctctcgccggctcctctccccgcccctccgggatggtagtgcggaagcggaagaggctgcagggccgggaagcctctgtttggtccggccaggtcccgggatccgggccgccagctgcgatgccaagtccccggaggagcatggagggacggccgctgggcgtctccgcttcgagcagcagcagcagccccggcagcccagcccatggcggcggtggcggcggcagcaggtttgagt

SEQ ID NO: 41469 - DNA, 2300 bp, Homo sapien
gggactgggtgtgtatagcaactgccacatctccacagcagctgagagcctcaggtaaccatggcggggacaattaggagagtgtgaagtatccccatcaactcatttaatatcaccatagcagatttgcagaagtagctgtgcctggtcctttctaattctgcagatttcttttacccattgtgatgggacctctctttatccatgtacattaacccccacagattggcttgaccatctctgcatttaatattcaaaaatatttattatcttctatcctatttagggtataaacgcttagccatgcagagtttacagattaaggagacaaatagtaatcaagagtcacaggaacaaatgtaaaactgctattatggcagtcgctacaaagaggagatatatatatttatatgtatgacataagatatgatattgagattccaccttgtcagcagaagagaggtcttggtggggtatgtaaatctgtatacatgtgttaatcaatgtctgcaatggatgacactctaagtaaagggtatagagtgaggaaaggaaaggacctagaaacattgcttagccagaggaggataaacagacaaagaaagaatagccagaaagttggagggaaaccagaagagagctgtgccctagcagccaagcaaggagagtccagttagatcaagagttaagactaagaagagcatagaatggaacattgtgtctctagagatcaacaggatgtctatattgcagacccagtgatgtggtagggcacacctggattcaaatgtggctgctcccttattaggtctgtggcttttagtaaaaggctgtctagcttcagattctgcatctgtaaaatagggataatatctccctgatagagttattgtagggttgagatgaattagcatacgcaatgtgcctagcactttgcagatcctcagtaaagactgattcttctctcccaatacaactctggctatttattaatttgttttgcttgtcactctccttgatttcttagcattggtgttggtgacctacctgttaggatcatcacaggtcctgtcccacatcactctgggtgtcagcaagttgtgagtgacaaatcaatgatctggacactatagatagttaggtgcccacctgtatctcttgatatgcagagagacacagcactaggaactggataaggatacaatatgcccttcttcatcataccaagtttttcccttccagggaaataaactccagttaccaaaatgaatacccaatcttgtcttgaccatccttctgcactatttccaattgtataactctctaatgcaaaatattagtaataaatgactgaacataatttaggatttaaaatttttttttcagaggcagcattggccttcctagattttttggattgctagaaggagccactacctgctcctttccttcatttttctctattagatgtagtgaatgtcccctactcattcagaactcttgctctgcgcaccacctctgacagtgtttacagtaactgtggttttggcaaatgcaataactacccattggactactcaatgcttgccttaaactaaaccccagaaaaggctggacaccgttatggaaagactgacatatttctattgctgctaacaggggatacctaacttttaaatatgtttaagaattaaccttatatttctaattagcacacgtttgttattgacggtggccatgttttccgaagcaaacataacatttaataagcaaaagagtatttttaggaacaggcaactatattaaatgagaattgttacagaaactacaaggcttggggtcgtgcagctactaaacgtgtactatttaaattataacagacctatgatctcattctactttcagaatgaaaacggtaaacattctgacatggtaattggggatagcaggagctgatggaaagaagatcgggattgttagcatttctctatccgtctagcacgccagacagggccagtctctccggctgggggcactgcgtgggcaacagcgaccgtgagggcgcgcgtctgcgctggggcctcgcgcgcgttccacgatgaagactgcgcgtttgagtgtccctggcaacgccacgcttccgccttctggaagcctgcactccagcttcgagtgtgagagacccgtcccggtgggagggacctgggctgggggggacggtaggggaacaagggcgtgggactggggaagcttctgggaacatttgctctaggtattcagctaaactaagaaaaattggt

SEQ ID NO: 41470 - DNA, 2300 bp, Homo sapien
gaaagaacatagattcaagatgtatttgggggtaaaaacagtaggacttgctgttggtatgagaggtaaaggagagggaggaactaaggctgaactctaggttttggactggatggtgatgccattgattgacacggagaagacccaaagaagtttggggaaggcggtgagatcaagggtttggatgtgttaaatttaagatgtgtatgaaccattaaaatgagatgacaaatcagcgggtagacatgagtctggagcacaggggtaaggtcaggacttggatttcaatttgagaattatagatacacagatgttatttaaagccacaggaataaacaggattctcctcactggccaaaatatgaggaactctaaagttagaggtcagctagaagggaagaagactgaggagaagtagtgaaagaggtaggagaaaaactaacagcattagcgtttatatagggcttactttatgccaggcactattcaaagcactttgtggcttcatggaagcaaagagaaaaatgtttttcttttcttcctccctttccagtctctcctgtgactttcacccctaaattcaaaaggtttaggtgcaaaagtgattctcagcttttatttgtaattaattttatagtaatcttgtactgttataatcttgtactgttataatactataattatagtatacattcattggaaaaatattcaaacagcacagtacagggaagctaaatgtggaaagtaaagatcctcagaagctttccttcctaggctcacccaccagaggtaatcattaacagtttcttgcatatcctccaggaatgttctgcgcaaacacacacacacacacacacacacacacacacacacacggacgcaaacaaataccatccctctctcttctctctctgtatacgtacgcatatgtttaattctgcaagttgctttgtttaaaactcaataccttttggaggtatttatatatcagcatattcagatacaatttactttttttaaaaagggtaatatgccattgtattaatattccatactttaagttcctctatcgatggacaattagaatgcttttttttttcttgccacacacacacaaaaattgctgccagaaatctttgtagtaaatctttggatattggtgcaaaaataattgttgcatactttcttagtggtgaaattgctgaatcaatccgctcaagcctctcatattgtcaaattactcctcctaaaaggttatactaatgacattctcacatcatttccttacatcttggtacacatttggtattaagcgacttcacaagtttgccagtctaaacacatggaaaaaaatggcgtcatgttgtttttatttgggtctctttatgagtagggcagcaagacctgattgttaaacgttcaagttttgaagttaaactccctgggtctggatcctacttcttccttgtaaaatgtgtgatctcgggcatgctgggtctacttcctcgtctcaaaaaaagaggataaagagagtacatatctttaggcttaaacaagatacgcaggcatacaggaagcccttcttatgcgttcgctactagcggtactgatcctaatttttttgaagccgtgccggctccggtactttatttttggtgtgctcctccaaccaaccaagtttcgcagaattctgttgttgcctgtaattagaaatgagacgaaaattggctccgcttgttcaaaattctcctccctccgccccaactctgccttagaatcactggtttaaatgtcaatgtaaaggaatgagttgcaatttttaagcaacatgtaaagtgcacacctggtctgagtacctcccggcggccaggacccgccgttttcggtatagggaacaccagataacaatatataacgctacctaacaaacgtttctccacccacagcgccattagcggttaggtttgcagtgccgaagagctgcaagaaaacggggcttgaaacaggaatacaattgcagatccacccactacacgcaaagggcccgggacgcgcctccacagccccgccccaaccggaagtgacgcaccgcgccgactatttcttccgccgtccgccggtggcgaggcccaggctgtcgccgggtgtgcagcggcgtcgcggccagtagagggattctgggtaacggcccggacccccggctgggcttctggctcggcgcagcaggttccattcacgccaagtctgttggcagtggcagttgtagggccaagggcggttgtaggacccggagcagccgg

SEQ ID NO: 41471 - DNA, 2300 bp, Homo sapien
gatgcgcctgcctcggcctcccaaagtgccgggattacaggcatgagccattgtgcctggcctaacacttgtttttaaaggcatatgttgttttattgtgcttcacaggtactgtatctttttttacaaatctaagttttgtggcaactctgtgtcaagcaaggctattggccccattttcccaacaagtacgcacttcccatttctattttacatttttagtaacttttgcaatatttaaaatattttcattattattatatctgttaaagtgatctgtgatcagtgatctttgatgttactattataattgttttggggtgccatgaactatacccatataagatggcaaacttaattgataaatgttatgtgtgttctgactgttccactaaccagccattcccttgtctctctctcctcgagcttccctattccctgagacacaacaatattgaaattaggccaactaataaccctacagtggcctctaagtgttcaagttaaaggaagagagtggcacatctctcactttaaatcaaaagctagaaatgattaagcttagtgaggaaggcatgctgaaaaccaagacaggctgaaaccaggcttcttgcaccagttagccaagttgtaagtgcaaaggaagaccttgaaggaaattaaaagtgctgctccagtaaacactggagcacaagaaagcaaaacaaccttgttgttgatatggagaaagcttgagtggtctagaaagaagatcagaccagccacatcatccattaagccaaagcccagtccagagcaaggccctaattctcttcatttcagtgaaggctgagagatgtgttgaagctgcagaataaaaatttgaagctagcagaggttggttcatgaggtttaaggaaagaagccgtctctataacaggaaagtgcaagtgctgatgtagaagctgcagcaaggtatccagaaaatctagctaagatcattgatgaaggtgtctacactaacagattttcaatgtaaacgaaacagccttctattggaaaaagatgccatctaggacttccattgctggagaagagaagtcaatgcttgacttcaaagcttcaaaggacaggctgactctcttgctagggactaatgcagctggtgactttaagttgaagccaatgctcatttaccattccaaaaatccgagggtcttgagaattatctaaatctaccctgcctgtgctctgtaaatggaatgacaaagcctggatgacagcacatcggtttatagcatggtttactgactatttgaagcccactgttgagaactattgttgagagaaaaagattcgtttgaaagtattactgctcattgacaatgcacctggtcacccaaaagctctgctggagatgtacacggaaattcatgttgttttcatgcctgctgacacaacatccattctgtagcccacgcatcaaggagtaatttcaactctcaagttttgttatttaaaaaacacatttcataaggttcagctgctatatagatagtgattcctctgatggatttgggcaaagtaaatagaaaaacttagggaaaggatgcgccattctagatgccaggaagaacactcatgattcaggaagaaggtcaaagtgtcaacattaacaggagtttggaagaagttgattccaaccctcatggatgactttaaggggttcaagccttcagtgtaggaagtaactacacatatggtggaaatagcaagagaactagaattagaagtgcagcctgaagatgtaactggattgctgcaatctcataaaacttgaatggatgaggagttgcttttaatgaatgagcaaagaacgtggtttcttgaggtagaatctagtcctggtgaagatgctgtgagcattattcaactggcaacgagggatttagaatatgacttaaacttagttgaaaaaggagcagcgggtctgagaggatagactacagttttgaaagaagttctactgtggataaaatactatcacacaacactgcatgctacagagaagtttttggtgaaaagaagagtcagttgatgagacagactttactgttgtcttattttatgcaattgcacagccacctcatcatttagcaacctccatcctgatcagtcagcagccatcagccatggaggcaagaccctccatcagcaaaaagattaagactctctgaaggctcagatgatcattaacattttttagcaataaaactattttaaattaaggtaggtacattgttattttagacataatgcta

SEQ ID NO: 41472 - DNA, 2300 bp, Homo sapien
gcacccaagtgatactcccacctgagcctcccaagtagctgggactacaggcatgcaccaccatgcccgtattttttttatttagatgtaggatcttgctgtgttgcccaggctggtcaggaactcttaggcttgagcagtcttcctgtgttggctcccaaaacattgggattacaggcatgagccaccacagctggccatatgtttttatttctcatgggcatatagcgaggggaggaattgctatctcttatggtaactgtctttcccccctccctgcaagacagggtcttgctctgtcactcaggctggagtacagtggcgcgatcatggctcactgcagcgttgagctcctgggcctcagcctcctgcctcagcctcctgaatagctggaactagaaacacataccaagcacccagcaaatttaaaaaattttatttaagctgggtgcagtggctcatgcctgtaatcacagcactttgggaggcaaaggtgggtagatcacccaaagtcaggagttcagcaccagcctgaccaacatggtgaaaccctgtccctactaaaaatacagaattagctggctgtggtggcgcatgcctgtaatcccagctactcaggaggtggaggcaggagaatcgcttgaacccgggaggcagaggttgcagtgagccaagattgcgccattgcactccagcctgggcaacaagagcaaaattccgtctcaaaaaaaaaaaatatatatatatatatatgtgtgtgtgtgtatatatatgtaggtatatatatgtatgtgtatatatatgtatgtatatatgtatgtatatatttatatgtatgtatatatataagtatgtgtatatatatgtatgtgtgtgtgtgtgtgtatatatatatatatatatatatatatatatatatgtagagacatggtcttgctgtgttgcccaggctggtcttgaactcctggcctcaagtgaaactccttccttggcctcccaaagtgctgggattgcaggtgtgaatcaccacacagggcttggtaactgtgttcaacctttaaaaaaactaccacactgttttacaaattggctacaccattttataatgctaccagcaatatatgagggttacagtttctccacattcttaccaacacttgtttttatttatttttttgtttgagacacagtttcactctgttgcccaggctggagtgcagtggcagctattcaggtcactgaaacctccgcctcccaggttcaagcacttctcctgcctcagcctcccaggtagctgggactacaggcatgcaccaccacacccagctaatttttgtattactagtagagacagggtttcaccattttggtcaggctggtctcgaactcctgacctcaagtgatgcgcctgcctcggcctcccaaagtgccgggattacaggcatgagccattgtgcctggcctaacacttgtttttaaaggcatatgttgttttattgtgcttcacaggtactgtatctttttttacaaatctaagttttgtggcaactctgtgtcaagcaaggctattggccccattttcccaacaagtacgcacttcccatttctattttacatttttagtaacttttgcaatatttaaaatattttcattattattatatctgttaaagtgatctgtgatcagtgatctttgatgttactattataattgttttggggtgccatgaactatacccatataagatggcaaacttaattgataaatgttatgtgtgttctgactgttccactaaccagccattcccttgtctctctctcctcgagcttccctattccctgagacacaacaatattgaaattaggccaactaataaccctacagtggcctctaagtgttcaagttaaaggaagagagtggcacatctctcactttaaatcaaaagctagaaatgattaagcttagtgaggaaggcatgctgaaaaccaagacaggctgaaaccaggcttcttgcaccagttagccaagttgtaagtgcaaaggaagaccttgaaggaaattaaaagtgctgctccagtaaacactggagcacaagaaagcaaaacaaccttgttgttgatatggagaaagcttgagtggtctagaaagaagatcagaccagccacatcatccattaagccaaagcccagtccagagcaaggccctaattctcttcatttcagtgaaggctgagagatgtgttgaagctgcagaataaaaatttgaagctagcagaggttggttcatgaggtttaaggaa

SEQ ID NO: 41473 - DNA, 2300 bp, Homo sapien
tcccttcctctgctttccatgggttattttgatgtccttttcccaattacatgaattcaatgtttaattcatttattttcattcttttcattctttcttgcttagtaatgagtatgtatgagccctgctgggcacagtggggtggctcaagcctgtaatcccagcacttggagaggtcaaggcgggcagatcatttgaggtcaggagtttgagatcagcctggccaacatggtgaaatcccatctctacgaaaaatataaaaatcagctgggcgtggtggcgggtgcctgtaattccagctactcgggaagctgaggtataagaatcacctgaacctgggaagtagaggttgcagtgagctgagatcgcatcacagcactccagcctgggcaacaaaacaagaccccgtctcaaagaaacaaaacgaggccgggcgcggtggctcacatctgtaatcccagcactttggaaggccaaggcgggtggatcacctgacgtcgggagtttcagaccagtctaagcaacatgaaggaaccctgtctctgctaaaaatataaaattagccgggtgcggtagcgtgtgcctgtaatcccagctactcgggaggctgaggcaggagaatcacttgaacccgggaggcagaggttgccgtgagccgattgcactccagcctgggcaacaagagcaaaactctgtctcaaagaaaaaaaaatgtacaaggtatgtattttctttctttcttttccacaccagaaagtataaaggctaatgccttttctaagtaccaggctgtctacctattgaaatcccccatccattcactcagctacgattcactgactgtctcaccctgaagtcatttctatcttctttgaaatcagttctggacctctgaggagaatggtaactgtgttttattttcagagagccttctttctgccttagcatagtgtccgggacaaagcaatgatgataaatggacaaccattattgaacattgaccccgtagctggcattgcactaagtactacattattttaactcctccattctactcctctatgcccattttacaggcaaaatgatactcactcgaacgtttttgtcctctgtttccattcttgaaacatgccaaacctccagttttagggccttttcctaaaactggacataggaagggcccatgtctctctcttccatattctaattaagcactcagcacacatgccatctcttcaaagcttttccgaccgcctatctacaacagcctgcctccacagtttcacacactcttttacgttatttataaaagagtctcactcaatggaagctggatttcctctcctgtaaaatgaggtaggccctctcggctcaaggtcactccctgtgattctacacagagagggagtgggaagagagggcgctcggcagcagaggaggaggaggaaggagggaagggcgaaggcgggagtgggtgcagaagcggggggtctggcggtccaggggggtagaagggaggggcggattcgagtgggcgccaggtggaggtggggccagggttgtcaagggagcacgaaaggggtcgcggtgtgtccggcaaggactgggtagggcagcgcctgctatggactaggggcgagggctacgaaagggttgttggaggggtggatgcgggtggatcccgaaaccaagcggctccgaggggcgactagaggtggggagggggcgcgcaggagttgccaaggtcggacagaggggagcgcggtctatccggctgggaatgggccggacagggcgcggggttccggggtcgcggagaggcgcggaggtagatctgagccgagtggagggcgcgtgggggtgggtgcagaggggcgccgaagggatccgggcccagcggccggtggagaggggccgcggagaggcgcaggtgggagctgggcggccgagcgagcgcagagggggcgcggcttgcgcggcttgcgcggctgggcgggaacaggcgctcggtcgggggcggggggtgcgccggggtagccgagaggcggacgcaacagcggggtcccgcgctgtctgggcggccccaggggctgtcggctcacttccgggaacgccggggaaccgcagtagccgcctgctagtggcgctgctagccggccggcgcaggctgccgagcgggtgagcgcgcaggccaggccaaagccctggtacccgcgcggtgcgggcctcagtctgcggccatgggggcgtccgcgcggctgctgcgagcggtgatcatgggggccccgggctcgggcaag

SEQ ID NO: 41474 - DNA, 2300 bp, Homo sapien
tggccaaaatggcaaaaccgctactaaaaatacaaaaattagcggggcatggtggtgcaggcctgtagtcccagttacttgggaggctgaagcaagagaatctcttgaatccaggaggcagaggttgcagtgagccaatatctcgccactgcaccagcctgggtgacagagagactccgtctcaaaaacaaacaaacaaaagtgacaaaacagtaattcttagtatttaatcaacaaaaccctactgagtgcctactatgtgcaaagcactcatctgggctttatttgcttcaaactaatctgtataaacacttggtcattaaattagaatttgaatgaatttgacctcagtgtttttcagttggaacaaggtaggcagtgaggaacagatccatacaaaggcctgtgaatggcgaaaagactatgccaggcacagttgccaggagatttcacagactggcagttactcatttgtaatcaacaaccttttgcaaagccaaagttgattggtgttttgcgggcctgttaatatgaccacgacactcagcttttcatccccgcaatgacaggatgattcctcagctatttttgtttgtttgaacattttttttttctaaaccaaatttccccaggattttctttctggtttcttttggagctgaaacctcctatgttcccagctttggagattagaagtactttctccacaccttcagattttctagtattgcataagttgtacttgtccagacttgctcattctttagttagttctgttcaagttttctcatcctttcatttatgttgtttacttcatcccttcctctgctttccatgggttattttgatgtccttttcccaattacatgaattcaatgtttaattcatttattttcattcttttcattctttcttgcttagtaatgagtatgtatgagccctgctgggcacagtggggtggctcaagcctgtaatcccagcacttggagaggtcaaggcgggcagatcatttgaggtcaggagtttgagatcagcctggccaacatggtgaaatcccatctctacgaaaaatataaaaatcagctgggcgtggtggcgggtgcctgtaattccagctactcgggaagctgaggtataagaatcacctgaacctgggaagtagaggttgcagtgagctgagatcgcatcacagcactccagcctgggcaacaaaacaagaccccgtctcaaagaaacaaaacgaggccgggcgcggtggctcacatctgtaatcccagcactttggaaggccaaggcgggtggatcacctgacgtcgggagtttcagaccagtctaagcaacatgaaggaaccctgtctctgctaaaaatataaaattagccgggtgcggtagcgtgtgcctgtaatcccagctactcgggaggctgaggcaggagaatcacttgaacccgggaggcagaggttgccgtgagccgattgcactccagcctgggcaacaagagcaaaactctgtctcaaagaaaaaaaaatgtacaaggtatgtattttctttctttcttttccacaccagaaagtataaaggctaatgccttttctaagtaccaggctgtctacctattgaaatcccccatccattcactcagctacgattcactgactgtctcaccctgaagtcatttctatcttctttgaaatcagttctggacctctgaggagaatggtaactgtgttttattttcagagagccttctttctgccttagcatagtgtccgggacaaagcaatgatgataaatggacaaccattattgaacattgaccccgtagctggcattgcactaagtactacattattttaactcctccattctactcctctatgcccattttacaggcaaaatgatactcactcgaacgtttttgtcctctgtttccattcttgaaacatgccaaacctccagttttagggccttttcctaaaactggacataggaagggcccatgtctctctcttccatattctaattaagcactcagcacacatgccatctcttcaaagcttttccgaccgcctatctacaacagcctgcctccacagtttcacacactcttttacgttatttataaaagagtctcactcaatggaagctggatttcctctcctgtaaaatgaggtaggccctctcggctcaaggtcactccctgtgattctacacagagagggagtgggaagagagggcgctcggcagcagaggaggaggaggaaggagggaagggcgaaggcgggagtgggtgcagaagc

SEQ ID NO: 41475 - DNA, 2300 bp, Homo sapien
tttgtgggatcaaacaatcaaaacaatttaactcatggaaatagagagtagaaggatggttactagagactggaaaacatagagggggtggggatgttggggggcaggtggggataataaatgtgtacaaaaattagaaagaataagatctactatttgatagcacaacaaggtgtctgtagtcaacaataatttaattttcatttaaaaataactaaaacagtataattgttttgtttgtataataacacaaagaataaaatgcatgaggggatgagtaccctatccttcaggatgtgattatcacacattgcatgcctgtatcaaaacttctcccgtacctcatatatacatgtaccatctacctacaaaaattaaaaattaaaaaaattatatggaaccacaaaagacccagaatagccaaacctgtcctaagcaaaaagaacaaaactggaggaatcacattacctgacttcaaattatactacagagctagagtaaacaaaatggcatggtactggcataaaaacagacacatagatcagtagaacagagcggagaacgcagagataaatccacacagctacggtaaactcattttcgacaaagttgccaagaacatactctggggaaaggacagtctcttcaataaatgatgctgagaaaattggatatccatatgcaaaagagtgaaactagatctctatctcttgccatttacaaaaatcaaagaaaaatggattaaaggctgggagtggtggctcacacttgtgaggccaaggtgggccaatcgcttgaggttagaagtttgagaccagcctgggtaacatggcaaaaacccatgtctatacaaaatacaaaaattagctgagcatggtggtgcacacctgtagttccagctaatggggaggctgaggttggaggattactagaactcgggaagttgaggctgcagtgagtcatgagcatgccactccactccactttataacacactgttgtctacataaggctagctacatcccttaatcttaaactcccaccgctttcagacactatcataccccgccccccttccccccgcgaacccccgtgcattctgggactcatggtttggtgagtgttgtccaggaatggctacaaacccacattactatgatatcggacttctacttgtgtagtcatttgttagttaactgtacattttggaaggtttttgagtagagaagtgaaataatccaacgtttgggaagattttcttgtgcaggattggaggaggacgggaaagagggaaaaagcattgcgcgcgtgtgtgtgtgtgaagttattacaactatctatcttgaagcatgcgaggtaggagggcctgaattgccatgaaacgcaatgacgataaacgaagggacccgtgagaaaggggcaaagaggtgtctcaataaaataagcaacggcctgctgtgggaggattcgggtctcagtataggctgccactgtcagctttgcaatattcctcgagcctttatccatgagtaggacaggatggctctaccttgcagggttacagcatggagctgcgggactgcgccggcagtgcgctgagcggcatccctgcgatagggtgagtgcaccaacccttgttgtctctcttagtaagaaagaggaggggtagataatagcatcttcaccccagtagttgccgtaagtagtaatgctaagaatccggcacgtcgtaggcatcaatctcagtccgccatctccccttgctaccacgccaggaggtacacagaggagactgccccgactggcaactcccgcgccggggttccctggccatcctcccgcgttccctccagccgcgcgctgttgccagggcccgggcaccgcccagctccactacggaccaatggcagcgcggcttgggcaccgcccagcttcagcggaagccaatggaggcgcggcgcgggcaccgccctgatccggcgcgggccaatagcggcgtggcccgaagcgggggccgccccggtcgggcggggaggcggggaggtggccactggctccgccccgctcccctctgacccggtgtctagtctctccgtcttcctgttccaaaccacgtggacgcgtctgggctgctggaggcagcccgagccgccgccgtcggtgtcgccgccaccaccaccatcggagtcacgagtcccgcgtctgtccgaagtcgccgctctcgggctgctcacgtctcttcggagagcgcgcacatggcgactcaggcgcactccctcagctacgcagggtgcaacttc

SEQ ID NO: 41476 - DNA, 2300 bp, Homo sapien
gatgaagtccaatttatttattttgtctcttattgccatccttttggtgttgtatttaagaaatggttaagaaaccgttgcctagcccaaggtaatgaatatttactcctgtattttctttagtgaactttatagttttagctcttacagctatgactttgatctcttttgggttaagttttgtgtgtgatgtgaggaaggggcccagcttcattctttcacctgtggatatccagttgttccagcatcatttgttgcaatgattatgctttcctcattgaggaaattagccataactgtgtggtttatttcttgactctcaattctcttccattgatctatgtgtttagcgtcagtgtttttaaagctccttaggttattccatgtgcagtcgagattgagaaccatctggccagagtggagagtttggctggtttgattgggagacagtacagtgcgaggtttttgtaatacttcactatagatgtgcaagccatcattcttcactaagccagtattccctaaccttgcccaatgagacttgccagggattcttgttaacaacatagatttctggcctctatgaactggggagtacagggcctggtggagggtagggagggatcagctttgtgtgtggactgtgattctgggctcttccatatggacatttcctaccagttgcaagttcaccataaccttcaggaacctgtgtatttaatgaactgttcaggtgagtcttatggtcaggctagctggggtgacgctaggtctgccaggcgagaccattagaagcctgtgcacctgcactgcggttcatccacagaattgctcttcccaaggtactcttggactgatgccatcgccctgtgatgccattgtccttgttgtgtttactgtgcacacttccccggccaccttatttaatattgccttctgccaaatatgtacaaatactgtcatacccacagttcttccccgtctgtgttgtttgctttgtttacattacatagcacttttcaggaataaaattaatttatttatctagtctctatctataccactagattgaaatcctcctgagggaaggatttttatttttattttttttcatttgagtgcaatattcccagcaccaagaacagtgcctagcatacagtaggcacttgatacatattaagtaaatgcgagggtattattggagaatgaagggagggacttgtctgtttcagcatcagtagtcattgtgcttgttttgaatgtcatggtgctgtgaatcatggaaataggtgtttctgtctttgtataggccactcaaaaatcattgcctaagccaggtacattgggacacccatagtcccaggtagtcaggaggctgaggtggaggattgcttgagcccaggagcttgaggccagtttgggcaacatagtgagaccccatctcttataaaaaaaagagtcatcaccatatttctgtccattttctgctaggtctgaactaaataacttatgtgtcacgtacgaacttctaacctttccccccccagtttaatttatcttgctgtattgcgtgtatctctgcaaactatctaaatcttctttggaaactggctggctgaaaggaagtactatttaatcagattcgatgagaaggtcttaacttcagccctctaggtctgggagattaaaaccttggattctaggtggtagaggataatttttttttgaatgaatttctttttatttatttatttatttttttcctttttaggatagaatttttgcggcatttgaagagctttttccagattatgtttaaaattgaaaccaagccatgtggtgaagaactcaagggtggggataaagtgctgatgacctgtgttggcattggtttctccaaccttagcaagaccctcaagtgataaccatcacaagataaggccccaatgcctacagacaaagcagaagctgccacggacaccaatgggaccaagtccaaatggattaatccaggacagaatagccacttgcttaattttctgtgaagaaatatcaatatacaaataaaagacatccctgtagcatatggtttccagctgtttctccagtggcattgccattgcccaggaggggcccagtcaccatgagagctcccttgccttacctggaggaagaatgtgccttcaggccacagtcgtgctgctagaacagtctcgtagctgcagttcagctgtgcttcctcagcctactatcataggcttcctcagccctctgtcatatggctgttttgcaaacctgtg

SEQ ID NO: 41477 - DNA, 2300 bp, Homo sapien
caggctgtggacagtaagagataccatgcctagttacataagtatatcactgcaaaatatagaaacatcacttataatgaaagtaatactgtttcagagttctaaaacaagcattttcttcccctcacaaaatatcacatttccatttccacagttgtgatgcttttcatttacccatgacgttaagctcatctttagctcttcttcattatgtgggtctgtgttctagcttttacctcagtagcagtttttgtttgcaggaaaaaaggaactcttttggtagtcactgtttgtaattgcggccttgatattctaagccattgagtcacaattaataattagaaattcttactaactttgcccatatattacctatgaagcagtagccgtaggaatgcaattttcctgtaaatccctccctcttatacagctctagttcattatttaaaagattcagggtgaattcaagtaatttcctatgctgctatcatttgcttaaagaccttttgcaatgggtcttatgtaagaagaaatgcaggagttgctttggtgaggtttatttaaagaaaccattaagtgcaagacagacctgaagagcagcatcagttgtgtatggggaaacaggagctatgaatgcgtcacttcatttaggttgacagaaagagggctaatacttgaaaaaaatccctacacgatctggtgccaggctacttctttggcctcacctcttaccactgccccctccttccgtgtcctccagccacagtgacctctttcctgatccttgaacttgccaaacactttcccttctcaaggtctttgccttcaggagtccctctgcctgaaattcttttcccagatagtcatgggactggttcattctcatccttcagatctctgctcaaatgtcacttattctaggaaatcgttcctggccaccgtaaaatagcacaccccctcctcactttctactccttttctttgttattatgtatatggcagcagaaaactatgcattttcttagtggcaattacacaccccgcacattatgcatttaaagcgttgtttgttgttttgtcgcttccatcagaatacaatccagtagggcaaggagtgtgtggggtcgtgttcacctggtatctctggggacctacagcccggcacctagtagacactcagtaaatatttgaatgaatgaatgaggccctttggcagccgggaagcccgtcacagccgttgtctccaccctctcccgggctacaccaggccacgccggtaaagttgtttctcctctaggagaaacattcgctaggccttgttgccaacccgcaggcggctgggcgcttcatcccaccctcacccctttccagccaaggtggctgatgggagtcaggctctcgagggcgcattgccacgaaacagcgtgtgtgagcgcgttgtccccggcccccggcgccacttcccctcggcctagcagcctggactggggaaggacgggtctgctgtacccgggaggtggaaggaaaagccgaaagcggagaagtgtgcgggaggggagtctccgcgcggaggcagcccggcctcctccagtgcaggctgcgcgctggggagccagccagggtgagtcactcccggccgcttccctggagggcggcggccacacacacacccgcccatctagtgagggccgggcccagcgctggcgcctagctccagccgggcaccagcgtttcgcgaggcgccgccgccttaacttccttgcgcgctcacgcccaggggccgtcccaggaatctccacgcgcgctcgccggcttcccgagaggcagctgccctgcgtggcccgcgcctgccggtcccgcgaccagcaccgagcggcgcacgcgcactgcaggacgcgcgtccggctctcccccagcctctatccggcccggtctcctgccattcggggagactgcaggccaaccgggaggctgagttcgaagctagcagggcggcgaagccagtgtcgcccgcggcgttgagaagacggtgtggccccggagagggtggagacaactgtgacgggcttcccggctgcccgaagtgggagtggtgtggggctgcaggaaggagagaggaagaggagcagaagggggcagcagcggacgccgctaacggcctccctcggcgctgacaggctgggccggcgcccggctcgcttgggtgttcgcgtcgccacttcggcttctcggccggtcgggcccctcggcccgggcttgcggcgcgcgtcggggctgagggctgctgcggcgcagggaga

SEQ ID NO: 41478 - DNA, 2300 bp, Homo sapien
ctacttctttggcctcacctcttaccactgccccctccttccgtgtcctccagccacagtgacctctttcctgatccttgaacttgccaaacactttcccttctcaaggtctttgccttcaggagtccctctgcctgaaattcttttcccagatagtcatgggactggttcattctcatccttcagatctctgctcaaatgtcacttattctaggaaatcgttcctggccaccgtaaaatagcacaccccctcctcactttctactccttttctttgttattatgtatatggcagcagaaaactatgcattttcttagtggcaattacacaccccgcacattatgcatttaaagcgttgtttgttgttttgtcgcttccatcagaatacaatccagtagggcaaggagtgtgtggggtcgtgttcacctggtatctctggggacctacagcccggcacctagtagacactcagtaaatatttgaatgaatgaatgaggccctttggcagccgggaagcccgtcacagccgttgtctccaccctctcccgggctacaccaggccacgccggtaaagttgtttctcctctaggagaaacattcgctaggccttgttgccaacccgcaggcggctgggcgcttcatcccaccctcacccctttccagccaaggtggctgatgggagtcaggctctcgagggcgcattgccacgaaacagcgtgtgtgagcgcgttgtccccggcccccggcgccacttcccctcggcctagcagcctggactggggaaggacgggtctgctgtacccgggaggtggaaggaaaagccgaaagcggagaagtgtgcgggaggggagtctccgcgcggaggcagcccggcctcctccagtgcaggctgcgcgctggggagccagccagggtgagtcactcccggccgcttccctggagggcggcggccacacacacacccgcccatctagtgagggccgggcccagcgctggcgcctagctccagccgggcaccagcgtttcgcgaggcgccgccgccttaacttccttgcgcgctcacgcccaggggccgtcccaggaatctccacgcgcgctcgccggcttcccgagaggcagctgccctgcgtggcccgcgcctgccggtcccgcgaccagcaccgagcggcgcacgcgcactgcaggacgcgcgtccggctctcccccagcctctatccggcccggtctcctgccattcggggagactgcaggccaaccgggaggctgagttcgaagctagcagggcggcgaagccagtgtcgcccgcggcgttgagaagacggtgtggccccggagagggtggagacaactgtgacgggcttcccggctgcccgaagtgggagtggtgtggggctgcaggaaggagagaggaagaggagcagaagggggcagcagcggacgccgctaacggcctccctcggcgctgacaggctgggccggcgcccggctcgcttgggtgttcgcgtcgccacttcggcttctcggccggtcgggcccctcggcccgggcttgcggcgcgcgtcggggctgagggctgctgcggcgcagggagaggcctggtcctcgctgccgagggatgtgagtgggagctgagcccacactggagggcccccgagggcccagcctggaggtcgttcagagccgtgcccgtcccggggcttcgcagaccttgacccgccgggtaggagccgcccctgcgggctcgagggcgcgctctggtcgcccgatctgtgtagccggtgggtgttatctctgcctggcttctgggtggggggcagcagctgtctctccacccccttcctaccttttggtcccgcctgccccctgctagtggcagcaaacttctgagccagaaaaatcttcctctttaagacgacacctagaacgagtcttgctggtgatatttgcttccatttgtgtcttataattccctcgctcccgcctccttattcctttttaaaattttctagacacttaaacagcctagaaaaagcatttgtttcccctggatttatgtggtagtagttaactgctgcttctgtttttaggtttcagaagcaggcaacaggaacaagatgtgaactgtttctcttctgcagaaaaagaggctcttcctcctcctcccgcgacggtgggtgtgctgtcctttatcgctgcagtaaaggcgaaggtgtctggagctgggagtgcgtgcgtagggaaggttggaagcgtgtgaagagaggcagggctcattgttgcttactcttctgaaaatgtc

SEQ ID NO: 41479 - DNA, 2300 bp, Homo sapien
ccatgttggccaggctggtcttgagctcttggcctcaagtgatccactcacctcagcctcccaaagtgctgggattacaggcatgagccactgagcccagcctgtctcaagatattttttaaactccctttatatttcttctttgacccactggtagttaggaacatgttctttaatttccacatatttgtgagttttcaaaagttcctccttttattgatttctactttcattccattgtggccagaaaagatatttgatattattttattcttctaaatttattaggacttgctttgtagcataacatatgatctattctggtgaatgttctctgtgcattttagaagaatgcgtattctgttgctgttggatggaatgtcccataaatatctgttagctccacttgttccaaagtatagttcaagtcttttgatgagtctcttgtgggcagtatatagttgagtctttttttttttatccattcagccctgttttttgatcaaagaacataatccatttacattcaaagtagttattgatgggttagaatttactactgcattttgttaattgtttagtggttattttgtagatcctttgttcttttctttttctcttgttctctttgtgattagatgatatcctgtagtggtatgcttgatttcttcttttttatcttttatatatctactataggttttgccttgtggttaccacaaggcttacattcatctcagtatgattaatattttccgttctcaaaaaccttacctgataaagttctgactaggactcatggcccactatagtttggacataagttattttttaaggaaggtgattaaattttactaatctatattatatcaaccatttaaaaaatccaattggcagttaatttaacagcattcatggatgccactgggaagcagggaaaagatagggaaacggaaaattaagaaaaagacatagagtcagaagacagaaaagaaagggagaaaaaaataaaattgtatagggaaatggtgagatcactgataagcttgcacctgtggcttcagcatcctgaaccttattcctgagacagccaccgaatgccctcttgtggccgatagtacatccttccacgccaacacactagtaacacagaacttcatttaaaatgataaagctacctatgccgattgcgcttcgcttccctgccccttccctcctaactgagcaaaattatctcacctaaatgagcatttcatgctgcatgctgttattcttacaaggcaaatcctctaggggtccctgtcacaagttaatttggtaatacacaatcctctacattatctaaccgaaagaaccagatttccatcccaggtacctcaagacagcgtccctacttcttttttctggagattgaggctaaggcccatgcctccctgtgaaccagtaggatttttctgaagaagctttgaacctgactaaacgcacatggccatatgcaacacttaaacgtttcaccacatatttgattgccagctaaatgccagatcccggggtacgatggaaagcaagaacagacgcaggcccttgccttcatgaagcgggggtctcaggaaagaggttacacgcccacaaatggaaacaggtcgattaacaccgtgaaagagatgacagggggtttctgtgagggagacgaagctttattaacaacctggcaaacaagaacgagaaacgcattccaggtggagggagcaacactttttaacctacgttatcaggtaacagggatcctatgttctcacgcttggtgaggaatctcccattgaggaaggaaagaaaaatgaatcaaactagggggtggcggggtagtgaggggatttttggctttcattttaggagccagggcctgctaccttcgaccacctgagacccctgagctggcgggaaagccttgacgcagccggcgcgcgccttcccttgaagttctggcgacgcccccacgcgctcggaattccgcagtgtttgtgcgcgccgctcggcctggcgcaggcgcagacagggagcagggtccggccgaccgccattgcacaacgcggaggactagcctggggtcacagggatgccgcggctcctccgcttgtccctgctgtggcttggactcctgctggttcggttttctcgtgaactgagcgacatcagcagtgccaggaagctgtgcggcaggtacttggtgaaagaaatagaaaaactctgcggccatgccaactggagccagttccgtttcgaggaggaaacccctttct

SEQ ID NO: 41480 - DNA, 2300 bp, Homo sapien
ctccagttaggcaattataacatcctagactggagcccctgtggccatttgtagggcagccttactgatatcctcatccatcatggcatcgatcacagtttcatagcctcgtcccattcccttatgatttgggccgatgggaggataggatatcccagaccccgagtaaagttgatgcctccccaagacactttatgttgcctgggacatcttagcacctcccttgacacctggcatgggacatatcataattacagtaacaactatactataacctttattcataatcacactgatcagtccctaatttgcaactccatccatatgttttccttatgggaactaatatttctattacaacccaaaattccatgtttgtgacccgggtgcaaggacaggctttgtttgcctcatgtaccactaattacaatatatctaatttaaatactactagtgtcatggtattaaggagacaatctgaggcattcctacccgtcaatttgacacactattggcaaggttcctcttcctttgccaccttagaatgtgccctatcccaggtcagacccaaaagatttataggcacacttataacctttatagtctcagccatagtcatcctagcaactgctagtgtggctatagcatctactaccgaatcagtgcaaacagctgcttttgtagacaatttggccagaaatgtgtctaatgaacttctcttacagcagggtatagatcaagagattcttgcacgtctgcaagccctcgaggctgccttggaatttgtgggggagcgacaagatgccctagcattctgatagcaattaaactgtgactgggagcataaacatatctgtgtcacatttttaccttggaatcaatcaatacatagttgggatgaggtgaaacaacacctctggggaaactttcatgacaatttaacagcagacgtaaagcaacttaaaactaaaattttagaatcccttcacatgatagatctacatactcaacaaacagccatatggaaaggtgtgcaagatcatttctcctggttatacccccgatcctgggggtcacactttgactggaaaggaatgttactaattatactcatgattgtcttacgttatttgctaattctatgatgcaaagccggaataaaagcaaaacctaacaaacctgttgctgcacacatctgtactcttaagtcaacagaacccgatgcaaagaacagaaaggggggagatgtgagagttcagtcaggctggtgggaaaattttttcagatagttataagaaaaagacgcaaacctttttgaaacgccggaggggtttgtataagctccagtaatagatcaggctgaaggcagcctaatccttaccttgagttaatagcttaaggcacagatacaaatgaatgtagtttatctagtttgtttactcatgtggtcctaagactaatctttgatcaaccgcgggtgcataattgctctctactcgggaggttggcaatgtcaattaccttctagtggtgtttactcaagaccttcgtcatttaatctatgctgaataaatgtgagctttgctggctgatcggggccacggctgcaactctttacagcaccctccttggtgtctgtaggtggcccggaccctcagctggactgacaggcaaactatctgtgtcagtgtatgttattcatccgtcgttgggtcagggtctgtgggacagacccccgcaattaaaagcttatatgccaaatgttaactaagataatttctagccaatgagcttacaggtcagttctatttttatttcatctaagcaaaggacattaaaaattaccattattttagtaagcataaaaatagtattacaggaggaaagttaagaaaaagaagtagaacaaccaaattcaaaacaagcaaagtgcagcagcacattgggagcaaagagggatatgagagtgtgggtagggcaagtagggagactaaataagaactgagggagaaagttccttgtaggtgggtgggaaaggggtggaactgacaccattgacgcaaaagctgagtaatagccctaagcaaataaatgcctgatgaaggcatgcagaaagcagtctggagcccagaagggacacaccagcacagtctggtaggctacagcagcaagtctctaaagaaaggctgagaacacccagaacaggagagttcaggtccaggatggccagcctgttccggtcctatctgccagcaatctggctgctgctgagccaactccttagagaaagcctagcagca

SEQ ID NO: 41481 - DNA, 2300 bp, Homo sapien
tgacagctgtatgcatggacatatttattgtttctccttaaaaagatttcctttttatttaaaggacttgaaatgccttttagttgtgcctgtaaagactgtgaatcttgcatttgcctgtgatccttagcagtagggtaagcccacatctggcatatgtgctggccaaaattaccctgaataagtgcatgacaactctcaatctgtttcttctttctgtaaaatgggaaagcgggcattgtactggacagttttaaggactctataaaaccatgtaggcaacataaaaaatcaaaatatccctggacactttgggaggccaaggtgggtgcatcacctgaggtcaggagtttcagaccagcctgtccaacatggtgaaacccagtctctaataaaaatacaaaaattagccaggtgtggtggtgcacacctgtaatcccagctacttcagaggctgaggcaggagaattgcttgaacctgggaggtggaggttgcagtgagctgagatcacaccattgcactccagcctggcgacaagagccaaattctgttaaaaaaaaaaaaaaaaaacaaaaaacaaaaacaaagaaatccctggaaatttacatttttaacgaccaattactttggagtacagccttgcacatggattgtttttacaaggactgtcaacccacaaaaatgttttcaaacctcagttttgagaggcctctctcaaactgcgtgttttaatgaaaactcatttaaaagcattgattgcatctgaccatctcatagtcttggtcaggtattttttgaagaattacacattgcttggcatttgaccaatgctaagtgggcctactgacatcaccagcaatctagaaattagaattatttgattccatagttatgtttgtaactaagagattgttattcttttatttcaaagctaccctaatgtcctgcatgtctccagtttatctgatggagctgaactaatctgagtatattatgaacacaagcaagtaagttattttaaaaaatgaacctacttgtactaaaaatttacaggtagaagggttgtctactaaccatattacctagaacagtgtggatctttagaaagttaaattaaatgatggtaaaaaatcacctcttaccaggtgcagcaaacacaaaatacagtaaacaaacaaacatatctttgtgctgtaatttgttaccaaaatattctttgtgggattgtgggatttccactgcttttttttcttctctctctctctctctctctctctgtgtgtgtgtgtgtgtgtgtgtgtgtgtgtgtgtgtgtgtgtggtatgttctccagtctccagagatgtagattagaattttaaattaaaatgttcagataactagttacaatcaaatttatccccaagagtggaaggaaagtgcaatggagaaattgttttgtaaattaaagacattactgcacaagcctaacatgatgttactggggattttaatgtttttacctgcattcagattaaaagtcatcagttttccctgtcatcaacaatttatttattcatccattctatttttatatttttatggattgatatacccaacactatactaattaacccaatttacaagataatctataatcttatttaggttagaagggttttttggcaaatgttcactctagaaaactgagttgtaagaatatgggtgatctcaaatttgtttctgtgtgtgtaaaaggaaaggcttcatatctaaaatgactttacctcagtatactaaattgtttgagggtaatgaatgagaagaacacaactgtaaaagggccaaggacagagggatgggcaaatgaaggaaaggcagagagggagaccaagagctgagggggaaaattctgtggaggggtgtgggaaaggggtggagctggcacccttgccttaaaagctgagtgatagcccaagggatacaaaagaccgcttgagccgggtagggaaagcagcctaaagcccgggacaggcacacaggcccaggtgtgtaggccacagcagctgcagtcctgaaaggctgcaacgtcccgacctccaggagagaccaggcccaggatgcctcgcctgttttttttccacctgctaggagtctgtttactactgaaccaattttccagagcagtcgcggactcatggatggaggaagttattaaattatgcggccgcgaattagttcgcgcgcagattgccatttgcggcatgagcacctggagcaaaaggtctctgagccaggaagatgctcctcagacacctag

SEQ ID NO: 41482 - DNA, 2300 bp, Homo sapien
atctgttacggccattttgtctacagtgcaattcagtttcaatatttccgtattaattttctgtgtctttgatctgtatgttgttgagagtggagtattaaagtcctctctcattactgtagaagaatccagtagacatgggttggaaccccacctccagcatgtgacagctgtatgcatggacatatttgttgtttctccttaaaaaggtttcctttttgtttaaaggacatgaaatgccttttagttgtgcctgtaaagactgtgaatcttgcatttgcctgtgatccttagcagtagggtaagcccacatctggcatatgtgctggccaaaattaccctgaacaactctcaatctgtttcttctttctgtaaaatggaaaagtggccactgtactggacagttttaaggactctgtaaaaccatgtaggcaacataaaatttcaaaacatccctggacactttgggaggccgaggcaggtggatcacctgaggtcaggagttcgagaccagcctatccaacatggtgaaacccagtctccaccaaaaatacaaaaattagccgggtgtggtggtacatgcctgtaatcccagctacttgggaggctgaggcaagagaatcgcttgaatctgggaggtggaggttgcagtgagccgaaattgcaccattgcactccagcctgggtgacaagagccaaattctgtctcaaaaaaatcacccaaaaacaaacaaaaaactctggaaatttacatttttaatgagcaattaatttggagtacagcctagcacgtggattgtttttacaaggactgttaacccacgaaaatattttcaaacctcagttttgagaggcctttctcaaactgtgtgttttagtgaaaatccatttaaaatcattaattgcctctaaccatctcatagctttggtcaggtattttttgaagaattacacattgcttggcatttgaccaatgttaagtgggcctactgaaatcaccagcaatctagaaattagaattacttgattccatagttatgtttgtaactaagagattgttattattttatttcaaagctaccataacgtcctgcatgtctccagtttatctgatggagctgaactaatctgagtatattatgaacacaagcaagtaagttatttttaaaaatgaacctatttgtactaaaaatttacaggtagaagggtcgtctactaaccatattatctagaactgtgtggatctttaaaatgctaaattaggtggtggtaataaaaaaagaatcacctctaaccaggtgcagcaaacacaaaatacagtaaacaaatgaacatatccttgtgctgtaatttgttatcaaaatattatttctgggaatgtgggatgtccactgctttttttccccttcttctttctcttcttcttttctctctctctttctctctctctgtgtgtgtggtgtgttctccagtctccagagacatagactagaattttaaattaaaatatttagacaactagttacaatcaaacttctcccacaggagtggaaggaaagtccaatggagaaattgttttgtaaattaaagacattactgcacaagcctaaaatgatgttactggggattttaatctttttacctggattcagattaaaagtcatcagttttccctctcatcaacaatttattcattcatccattatatttttatggattgatatgcccaacattatactaattaatccaatttataaggtaatctataatcctatttaggttagaagggtttttggcaaatgttcactctggaaaactgggttgtaagaatattggcgatctcaattttatttctgtgtatgtaaaaagaaaggcttcatatctaaaataactttacctaagtatacaaagttgtttcagggtaacaaaagagcgaaaaacaaaactgtaaaagggccaaggacagaggaatgggcaaatgaaggaagggcggagaggcagaacaagagctgaaggagaaaattctgtggaggggtgtgggaaaggggtggagctggcaaccttgccttaaaagctgagtgatagcccatactaaagactggttgagccgggtagggaaagcagcctaaagcccgggacaggcacacaggcccaggtgtgtaggccacagcagccgcagtcctgaaaggctgcaacacccagacctccaggagagaccaggcccaggatgcctcgcctgttcttgttccacctgctagaattctgtttactactgaaccaattttccagagcagtcgcgg

SEQ ID NO: 41483 - DNA, 2300 bp, Homo sapien
cttcagttatctgataatcattattatggcacacggcagtattaagaagtgcccagtgaatctccaggtgtcatgcatagttcttcttgccctcaatatatagatgtaacccaatttccttttggtatttgggatgaatcataccattctgtcactgtgaggaatcaaagtgaccagagggcagtttcagctttcgaatcaatgaattgaaattcaattcaattcagtgacggggtcttctagtggcagcattccttcctttggatctaggcttccaaacacaataaacccaaggttgtagaaatggtgtgctggaatactatgcagccataaaaaatgatgagttcatgtcctttgtagggacgtggatgaagctggaaaccatcattctcagcaaactatcgcaaggacaaaaaaccaaacaccgcatgttctcactcataggtgggaattgaacaatgagaacacttggacacaggaagggggacatcacacaccggggcctgttgtggggtggggggaggggggagggatagcattaggagatacacctaatgtaaatgacaacttaatgggtgcaacacaccaacacggcacatgtatacataggtaacaaacctgcacgttgtgcacatgtaccctagagcttaaagtgtaaaaacaaacaaaaaaaagaaatggtgtgctggatattttctatttctccctccaggcattgtgcctagtaggctgacctctacagactacacagacctagctccactgtcttctggcttcctggtggatccagccagcggaagaccccagctggatatcagagctgggagaacagagaggtgggtcttctccactctgtccctgctttgggctgacgtctcagcactggctacaactatagaatctcaccttacttggtgaaaagttggcattgcttgctttcctctactgaacgacacggttccagttggttactctctcgtacagccacagctaccgctctcgctctcgcctggttttagtaactgcttccttcccccacccctcagccctatagttactaacagctccccgctgttactggttactactggttacggaaggcgaactatgtgcccgacactgtgctaaatgcccacatatattatcttttagtcctcacaatccaataaattagatggctttagtcctgttgcagaggtgataaattcagagtgacagtgacagagctagaaattgaaggtaggtgtgtttatgctagagtctgtgcactcaaacacgattccttacttcttgcatcagttgttaacctcccttcaagagtgtcaaacctcctggtaacccgcccattcccttaactggaaatgagggtgctgttgcaattttctcatccagccattccacaaatggtatctggaatgtgggacccacagtccagaatcctgagggctgctgttgagagcatcaagacgcgcccaggaggtcagggcggtgtgcactcacacgctgagcctggagaaagttagacgccttctccaccgctgtggtggttagcagggactttcctgaaggccagagactggtgacgttcatgctatttttccaagccatttggtagcaaagaacagagtgccaacaattcaagcattctctcaggctgggagagagacgtggcttattcaagatagaaattgctggtgaggttgaggcgagaccgacatctctctgagcagcaggggagaaagacggctctgttcaaaaaagaatgggtaatttcagtcaattctcttctttctcgtttctgtcttatctttatgactttttaatagtgccaatttaacagatgaggggacagaggcctttaattgagaattccactccgcttcctctgcctcatctcaaaaatctggcagctgagtcgccgcggctttgaatttgcctcttttgaccttcccctcccacctctggtaacactgagcctggcccggaaggacacacccggcttctggcggaagtgccggctctttaaagaagctgagggctgcgcgaattggctgaggtgcgtcatctactgtgtctgggcgccaatcccgacgctgggcggagcgaggcccggtccctgcagcgggcgaaaggagcccgggcctggaggtttgcgtaccggtcgcctggtcccggcaccagcgccgcccagtgagtgaacaccggccgcaggcgggtggggagaagggtcagcccggccatgtcagtcagcgcgatctcctgggctccgggcttgccaggcagcgctgggcgcccgctcc

SEQ ID NO: 41484 - DNA, 2300 bp, Homo sapien
aaaattcacacagagtttcaggacttaaccccccactcattaaccatctgttttgctttacatatttttctgaggtaataaaatttctctttttctaaacacagcctgtttttcaatctccgggtagttgatcaattgtatgggaaaatgaatggctgaagggtagaaacaggtgggaaagatgaacaaaaacacgaatcctcacattactaatacgcaaatcactgagcagcaagctgagcaaataccctcaattcccatcagcaactttagagaaaggcaaattccgtttgcctcattgatcatttaggtagaccctgaacactgctttcataaaacaaaaacaaaatacccatccccagtttaaaaaattattcatagatcatccaggccatctaggaggatatgatttaatcctggctacttggtaaattatttgcccaagttaactcagctagttagtggtagatggctctgaagccagttgtttttttttgttttgttttttgcagacctcaagagtcatgatgaactagcagatcataaagtttatgccctgggtcttgaccatttttagaaaaataaaacattaaatgaaaatatcagagggcattgcagatagtagatctaagtattttttcatgaaacttgttgtacatgtgtgtgtcatacacagactatatatatgcagtacctgtaaactgtattgccacataatgtctatattttcctagaggtcacagtcaccaaagttgggaagtcacccaacttcgggaactttgggaagtcacccaaacttacagtcaccaaaattgctctattctactatgtgacctcaaaagtgatttgaaagaaggaacatctgagctgggcccaaaccctattgcaattttattggggccaaagagaactccatgctcctgccaaatcaaggcagtgtcagcctcaataatttcccagataaaaataaaaatctgtgatacaatcagaatgtgaaaattcttattttggaagcaaatgtcataaccaatgcaagggctatctcaatattcattcattatgcagtattttgaactgcagttgaaatgaataagaaggaaaggcaaacaacgaagagtccaatttctcaatttagaaaaagagaaaaaaaagaaaagggagcacacaggcacggtggctcaagcctgtaatatcagcactttggcggatcacttgaggtcaaggagttcgagaaaagagagcacctagaagttcagcgcgggataatacttaagtaaattatgacaccatcgtctgtcatcttgggcccattcactaacccaaagctttcaaaagggctttcttaaccctcacctagaataggcttccgcagccttaatccttagggtggcagaatatcagggaccctgagcattcttaaaagatgtagctcgggatgggaagttcttttaatgacaaagcaaatgaagtttcattatgtcgaggaactttgaggaagtcacagaatccacgatttaaaaatatatttcctattatacacccatacacacacacacacacctactttctagaataaaaaccaaagccatatgggtctgctgctgactttttatatgttgtagagttatatcaagttatgtcaagatgttcagtcaccttgaagaggcttttatcagaaagggggacgcctttctgataaaggttaaggggtaaccttaagctcttacccctctgaaggtaaaatcaaggtgcgttcagatgttggcttgttgtaaatttctttttttattaataacatactaaatgtggatttgctttaatcttcgaaactcttcccggtgaaaatctcatttacaagaaaactggactgacatgtttcactttctgtttcatttctatacacagctttattcctaggacaccaacactagatacctaaactgaaagcttccgccgatttcaccgaaggtcaggaaagtccaacgcccggcaaactggatttgctgccttgggcagaggtgggcgggaccccgcctccgggcctggcgcaacgctgagcagctggcgcgtcccgcgcggccccagttctgcgcagcttcccgaggctccgcaccagccgcgcttctgtccgcctgcaggtagggagcgttgttcctccgcgggtgcccacggcccagtatctctggctagctcgctgggcactttaggacggagggtctctacaccctttctttgggatggagagaggagaagggaaagggaacgcgatggtctagggggcagtagagccaattacctgt

SEQ ID NO: 41485 - DNA, 2300 bp, Homo sapien
cttattttctgtaattccattatattactttaataataaagaaaaaaacataaaaaataaacgaatgttattattctacgtcagtttggatgtttggactccattttggggttctttccattatatcacttggtctgctaaacattctacggtttggtaaggtgaagtgattcatgaaattttggttttatttttttcctgatactaaaaataaaacattctttcacttggaaatttggacacagaacaccaaaaaaaatccataatctcatctctctttttctgtcttttccttccttttttccctttaaaaacaataaagagtgaaacctacctgttctccctctaatttaattcctaaatataatcactgtcaatatcttggacatttcctgtgtctaaacacacacacacacttttttttttcagcaaaagtggatttctgctacatgtagtgttctgcaacttactttctatgtgtttacaaaatcagtacatgtacatatgctgaattcagtccttaatggtattatattttgtgaatataccaaaatttgtttaaccacttagacaatctaggatattctcagtttgctgttatgagcaatgctcttcctttacatatacagacatatatatatatatgtgtgtgtgtgtgtttttgttttagtaggatagatttctaggagagggtgaaaggtcttatgacatccgcatttacgattgtaataggaagtatcaaagtgccccctaaagaaaaaaatcctcccattagtgggtaagaaagcctatttgttcatatcttcacaaacactaaatattagaaatatttacaattgtggtcaagctcataagtgaaaatggtatttcatatcttatattttttattgtgagattgaacatctttcatatgtttacatgtcacctgtatttcttattctctgaactatatgttatgacctttcactttttttcctcatgggttatgtgtagtttgtatagttgtcttattgattgttaggagctatttatatattaggaacattaatctcctgtcttatatatacgtggcatcgattagttgatcatttgtgagttcatgtctgtatacaaagattggagaggcactaagagggaaaacttacctctttcttatcaaagtttgtaaatatatgtataacagaagagggagaaaatattaataaatgcacagattggctgaaatagagtataaatcttttactcccctacttcaacataaactgcaaaaggagagtgacttttctttcactctgacttccgtattcctcatgcttaaaatagtgcctagcacagaagaggtgctcaatcagtgtttgctaaacgaaataattagtcacatttcaagcaggatgactaaatgaagaatagaatctaggcagatactctggaagagtggctgtgagtcattcatatcttagtatgaattagtcaaatccaactctctccccttcccactccccactgttagtagaagaatctgtttattgagagaatagatttataatttagaataagtgagaggggcagaagaggagattttgaaggatggcacctgaaggaggactagcatggctgagacagtgaagtggaagccttgaatagctaaagggtaagatgaaagtatttagctgtagggggaaaaagcattgacaggttggaaaagtaaaagtcagattctccttgctctgaaattttgtacagggcaggttctactaggtatgttacaatgcagaaaaaacatgaaataattgagaggaatttggtgcaatattatcttcttggcttcttttgagtgggcagatttttttcacggcctgtaactataataaatttgaaacttctcatcttttagtaacttttttcacttaagtttatgtggctgtgggcaatggaatgaagatattgaacttccaattccctgttgggtttccacaattacaagtcaatcatgactggttattagaagactatttcagttagaaccaccaagtcccatattgtcatattgtatgtttaattattaagtgaagcagtcttcttttcgtgttttccataattagggcattccagaaagatgaggatatttgctgtctttatattcatgacctactggcatttgctgaacggtaagacaccaaatccttccattaggttctatattttaaatattttaaccatgagtttaaaactaaaatgatcatttaaaatgcatgcaattttcttatagagagaacattctattctttcttctactttac

SEQ ID NO: 41486 - DNA, 2300 bp, Homo sapien
gattggagaggcactaagagggaaaacttacctctttcttatcaaagtttgtaaatatatgtataacagaagagggagaaaatattaataaatgcacagattggctgaaatagagtataaatcttttactcccctacttcaacataaactgcaaaaggagagtgacttttctttcactctgacttccgtattcctcatgcttaaaatagtgcctagcacagaagaggtgctcaatcagtgtttgctaaacgaaataattagtcacatttcaagcaggatgactaaatgaagaatagaatctaggcagatactctggaagagtggctgtgagtcattcatatcttagtatgaattagtcaaatccaactctctccccttcccactccccactgttagtagaagaatctgtttattgagagaatagatttataatttagaataagtgagaggggcagaagaggagattttgaaggatggcacctgaaggaggactagcatggctgagacagtgaagtggaagccttgaatagctaaagggtaagatgaaagtatttagctgtagggggaaaaagcattgacaggttggaaaagtaaaagtcagattctccttgctctgaaattttgtacagggcaggttctactaggtatgttacaatgcagaaaaaacatgaaataattgagaggaatttggtgcaatattatcttcttggcttcttttgagtgggcagatttttttcacggcctgtaactataataaatttgaaacttctcatcttttagtaacttttttcacttaagtttatgtggctgtgggcaatggaatgaagatattgaacttccaattccctgttgggtttccacaattacaagtcaatcatgactggttattagaagactatttcagttagaaccaccaagtcccatattgtcatattgtatgtttaattattaagtgaagcagtcttcttttcgtgttttccataattagggcattccagaaagatgaggatatttgctgtctttatattcatgacctactggcatttgctgaacggtaagacaccaaatccttccattaggttctatattttaaatattttaaccatgagtttaaaactaaaatgatcatttaaaatgcatgcaattttcttatagagagaacattctattctttcttctactttacacaatggcaaagtcttctttctactttacgcaatgataaagttacctgtgtcattttgtaaaaatatagagaatatagacaaattgaaagacacaaaataatctattacccatttcccagggttaactactgaaaatatctggggaaatggcctgtatgtatacatttatttgtttgctttcaacaaggccaagatcctttgatctttcagtcttggttgctctgtgacatgcctttcctgatgaggatactttaaggaagaattgtaagatacatggaaaatgtcaggctaacacagtactggcatcaccctgtgctctttcctgaactccataccaatgtacttcttgccagaaaactgatcaaaagtttagggaagtaaaaagagatgactgttagaatctaccattccctctatgtaggaagcaaataggtgtcctgtcaaaggacattctggggatgtctacatgaaaccaactctccctggttgtaaggactccatctccatataatatttatacagtaatatatgtttataaattgtgggggcaacttgtttagctaattttattattctgctattgggacactgtgtctcagcatgagatatagtgtcccaaaacatatttcaagcccattggataaaatatgtgtttagcaagttcttaaatataatgataacataaccgaccagataaagtgatttataaacgctgtgccaattttgtaaatgtttcgaggaattttcccttttctgaagattgtccttctttctttttagcatttactgtcacggttcccaaggacctatatgtggtagagtatggtagcaatatgacaattgaatgcaaattcccagtagaaaaacaattagacctggctgcactaattgtctattgggaaatggaggataagaacattattcaatttgtgcatggagaggaagacctgaaggttcagcatagtagctacagacagagggcccggctgttgaaggaccagctctccctgggaaatgctgcacttcagatcacagatgtgaaattgcaggatgcaggggtgtaccgctgcatgatcagctatggtggtgccgactacaagcgaattactgtga

SEQ ID NO: 41487 - DNA, 2300 bp, Homo sapien
gagtttacctatgtaaaataaaagtttaacaaaaaactaaaaaagttacctatgtaaaacaaaagtttaacaaaaaactaaaaaaagttacctccacccagaaatgcctttattaacactttggtttgtaaccctccattattttctctagacatatagatttatgaggcaggctaatgtgctgagacactagcttgagtttcatttggccttgctgtgaatatacctgggccttcctttgcttcaggatgccctaaactgtggcaaagcagagctgaactgcccaaaggaaagtgtgaagaggagaggcaggccaagcctggagaaaggctacccaagagagaggaaaggaaactgtggtgagtgcacctcactcctaaagaaggacaggaactctggtaggtgaggtgtgttttccatagatactaaaactcaaagccacacaggggacatatgtccattcctcagccagtcactgtggccaggaacagagggtcaggtaagagaatggcaactcctaaggaaaccacatgcctggagccgtgggtgtagaagcagatccccagaggaagcacgggtcccacagacacagtcccaactcttgccgtctaggcagccactcccatctgtaggtactacacagcttcgtagtacttcttaaagtacttcttgttcaagcgatgggacgaaaagaggatgcaggacaaggaggaggaaaggagatccttgcttttgtagaagaaacaaggaggcagggaaggcttagaggacaggcaaggagagatgttttcttaaaaacatcctctgtctgagtgttcagccccacatctctgctggtcctacccctataagcacaaggaaaagggcgggaggcagcaggagaaggattgatcattcaggcctatattcaagtttgccttttcttgccatgtggttttaatctcaccaatcacaagcctgaaggtatagtggggccactgaggtccgagttcaaattcagccatgcaactaaggaaacattgtttgatcttggtcctgttttctcatgtgtaaaatgggtctaactctaaaccacacattgcactgagaatgaaatgaggcactatgaaatgaagtgaggttagttgaataatgttccccccaaattcatgtctactgaggacctcagaatgtgactatatttggaagtagggtctacgcagatgtagtctaaatgaggtcatactgcattagggtgggcactaatcaaacggatggtatcctcataagaggagaggaatgtagagatacacacagaaaagaatgtcatttgaagatggaggcagagattggagtgatacaactataagtcagggaatgccaaggacttgaggtcatgtgttacagaagccctaggaaatgagtcaatttcctggcacagcactaagacatgctggtattcttcattccatccctttcccctattcctaaatgtgctccagggacaatggggaagctggagcacatataagaataggggaaagagagggaataaaagggtattaaaaactctcaaggtatgttaaaaaaaagactctcaacaaaccaggtattgaaggaacatacctcaaaataataagagccatctatgatgaacccacagccaacatcacactgaataggcaaaagctggaaggatgccccttgaaaaccggcacaagacaaggctgccttctctcaccactcctattcaccatactattggaagtcctggccagagcaatcaggcaagagaaagaaagaaaaggcatccaagaaggaagagaggaagtcaaactacccatgtttgcagatgacataattttatatctagaaaatcccacagtctcagcccaaaagctccttaagctgataaacttcagaaagtttcaggatcccacatgaacatacaaaaatcactagtattcctaaacaccaaccatagctaagccaagagccaaatcaggaatgcaatcccattcacagacaaactgctaaaagcaaaaccaaaactttccaaataagccaggctttcgtcagttcctcagaactagttctggtttgactcactctcatgttacggcaaaccttaagctgaatgaacaacttttcttctcttgaatatatcttaacgccaaattttgagtgcttttttgttacccatcctcatatgtcccagctagaaagaatcctgggttggagctactgcatgttgattgttttgtttttccttttggctgttcattttggtggctactataaggaaatctaacacaaacagc

SEQ ID NO: 41488 - DNA, 2300 bp, Homo sapien
cttgatccattttgtttaatttttgtatatggtatgaggtaaggctccaaatttgttcttttgcatgtggacatccagttgtccctgtacaattgctccatttatatttatcttagcagaaaatacagatgtaaatctttgtgaccttgactaggcaatggtttcttaggtattacacctaaagcacaaacaataaaagaaaaaagtagataaattggatttttttacttaaaatcaatttgtgtttcaaaattaaataaaatcaaaattaaattaaaacatttatccttcacaggattctataaagaaactgaaaagacaatgtgcagaatgggaaaaaatatttccaaatcatatatttgataaatagtttggcaattcctcaaaaagttaaatatagagttaccatttaattcagcaattctactcctacatatgtacccaagataattaaaagtatacatagacaaagacttgtatatgagttttcataggaactttattcataatagccaacaagcagaaacaatccaaatgaccatcaactgatgaatgggtaagcaaaatgtggtatatcatacaatggaatattatttagtcacaaaaaggaacgcagtgctgatatatgctacaatacagatgaaccttgacaacattatgttcggtgaaaaaagccagccacaaaagtccacatattgcttgattccatttttatgaaatatccagaataagcaattgatagagacagaaactagattagtggttgccaagggccatagggaaagggaaggggaaataggaagtttctgctaatgggtaaggggttccttttcagggtaatgaaaatgttctaaaattggataatagtgtttgttgcacaactccgtgaacatactaaaaaccacagagtcgtgcacttaaaaaaagtttgtgttttaaatatatatacacacttagacacatataaccctctttcgtatatcaattatactttaataaagctgttgaaatttttaaaataaaattttaaaacaaagaaaaaatatataaactcgccaacagaccacttctcacccctactagcccctctactctaagctatcagcatttctgcaaacacattcctaaccgatctcactgcttgtaatcttgccagcaacctctccctctcagcaatagtctattgcctacaccaaagcttagttgtctcttaatgatgtaaatgaggttctatcattctcctgacccaaaccctccactgcttttcatcacactcagagcagctctgctgttgcctgatttagatgtatggctccaacagatttcccctgaagaaatgattccatggctgataaaagttggaaagcctcctcagtttcagaccattatcagattagctgtgtgctctgtccctttcctcaaccataagaagtccatggataaagaaagcttcagagtaaaggagaaagcatgggaggtacagcaggaccaaggtggggcattcgcagcccccaccctcatcagagccagttccctactctccctgtctaaacctcttagtaagaggtagttcaagagaggggcaaactcaattccagcactcaaaagcacttgactactttgctcagtcaactagcaagtatttattgagaatgtagctctgttctatggagtcttattttcaagtgtcagactcccagacatccagtccaggtaaagaagatggtgtccattattcatttgacaaacaaagttggggttcaagggccagctattgaaaaaagctatggaaagcttcatgagacgtgcaggtaactgccaatatgtgtggttcacaaggactggttcatattcagaaacggccattagaaaaggaagaagaacttctcatttggatttataaagagtgtcttgtttactcttaatttatatcttctcttctccaggaaatcaacctataacttctcctcccagctccactctaccatggtctgtcaccttccccaaatgatttgttattcccctgttttcaaaagtgaacaaagaaccaaagacccagcaaagtttcacaaggccctgagactttcaattgtctatttcagatcaaatacagaacatgatcttcctcctgctaatgttgagcctggaattgcagcttcaccagatagcaggtaagaaaggacaaagggagaggcttaagaaagaagagcaggtggtggttcctagccaaagccaaaaatgagaatgtggccctcaggctgagggctttctttgagaggacgtatgatttctgggctatt

SEQ ID NO: 41489 - DNA, 2300 bp, Homo sapien
cctccaccacaatactgagaggtagagttcaacctcattttatagataaagaggctgaagctcataaagattaaaggacggactcacagtcaaaggactcctaatcctgagtcagcatttgaacccaggctcacctgtcactatatcctatgctcttccgtatcacattttatactgaaacaacttctggaatagctaatgcttagaagcagctcccaaatatttgttgaatgaatgatttgattgaatgaatgaataaatgaatgaagcaagctctactgaacataatttgatctaatcttctgtgattattcagaaactacttcaagattttcctatacctccatcataatgaatacccattcattaatgatggaagcagcctaattttgtcatttttcacactttattgatgtaacactacctttactagtttggccactccttatgctttttttatagaactatttagatcaattcaacttttaaaaaataaagccacatacccctgtggtagatgaaaaacaagtatcatttgcactggtaaatagagaataggaagaaaaataaatgcagtgaaaataaagcagtgttatcaaatcctacccagatactgttatctacccggaagcttcctgtttgattaaaaggaaaaatagccagtgttagaggtgtggaagtctagttgaaattatatgcaattgaaggattaaaatagaattgaaaagggaataaattcctctctgaataatttaactccctttaggctttgattctgcctcatctaaaatcatcttacatacttctagtggcgtgtccctcacattttggtaaactctgagtggaaactacggattttgtagtcaaacatctgactggctctggattttaactttactaacatatgtcctgaagtgaactgcttggagccagtttcctcaactatataaccataatgacaaaacaggtttcacggtcatgttttcagtattaaacaatatagttaaaagtacctagcacagtgcctggcatagaacatactagatatacattaagtatcagttccatttttcctttccctttattgtcagaaaatagaaagcatctacagtgggcttgtatgatgtggtggttagaaatacctgatctgattctggctgtgcaatcttgggcaagttacttaacctttttgtgcctcatttttgttttctgaaaaaaaggatagaatattattacctaccttgctggcttctgggaagaagctcagtgagacgatgtgttagcagagtgtctgacaattgtaagaattcaacaagtaatagttattattaccatcactggtgagaggaagtgatacctggcacaaaaatatatggattaatcaatatggattgagggaaacaaacctggagaataggatgtgaaggtatttaagtaacatgagctcagaccttgatggtagggaagtcgaaaggaagcattttgttcttatatgacagatgacctggaatgactgcagggcttggggggtcagggactggaggtgggagaggcctctgagagcaagcagtgctgtccaccagaagctcttgctggggtgcccagagaggagcaaagggcagtcagctgcacaggagggaatgtttggaggagagagccacctcagatcagcgggtcaagaatcccactcttgcccagatggatggggcaaaggagaaaaaggattcgccacgggaatgtccagataagacaggtgccttttggaaaatgggggtgagatgggtctcaggttacacttcgtaagaactggaatgtaaagtaaaggcagacaatgacaaaatatcttgttttcttttcagctttattcacagtgacagtccctaaggaactgtacataatagagcatggcagcaatgtgaccctggaatgcaactttgacactggaagtcatgtgaaccttggagcaataacagccagtttgcaaaaggtggaaaatgatacatccccacaccgtgaaagagccactttgctggaggagcagctgcccctagggaaggcctcgttccacatacctcaagtccaagtgagggacgaaggacagtaccaatgcataatcatctatggggtcgcctgggactacaagtacctgactctgaaagtcaaaggtgagtggtgtcaaggactagaatccatggaagcatctctccaacagaggatctgcaagtcacagaaacccattaaaggtagctcaagcaaaaacaagcaggctgcttttaaggagacagctatttcagagaaaa

SEQ ID NO: 41490 - DNA, 2300 bp, Homo sapien
acattcagtaacactgccagcaaaattgctgcactagaacattttcatttcctctttctgccaagtgcataactgaatctaagatgaaagtatgatgcaactttgttattctacaatttgaaattggcaagttaagaaacctctctgggcctctttgtctaatggtgtagctcagctggatcagggtttcctccacggtttgtctgacaaatactgccagcttactatgcttactatgttccaggctgctgtgttggactgggggagggtagacgccaaggagacaatctgatcgcaacaggctggtgagtggtgaggcagtttcaacctccatttgaggaatacaggattctatcatcaccttccagggaatgcagtgaatgtttagaaaaattacagaaagttacatatttggttatgaataccagctacaatgctatatctaatatgaattaagtttctttgtttccttttttctgtttatgttgctacttttttttttttttttgagacagtctcactctgttgcccaggctggagtgcagtggagggatcttggtttgctgcaacttccgcctcccaggttcaagcgattctcctgccttagcctcctgaggaactgggattacaggcacctgccaccacgcccagctaatttttgtattttcagtaagacgggggtttcacgatgttggccaggctggtctcgaactgcttacctaaagtgatctgcccgcctcggcctcccaaaatgctgggattacaggcgtgagccccagcaccccgcctacgttgctactttttaatgtggggtcattttttaaacctggctttttaattgaaaaagtaatacaaacatatggaaaaattcaaactgtactaaaaaaggtagacaatgagaagcaaatctttcttctatttcagactcctccttcccccattccacaccatatcccctcaaccctccttctattcagacgttaccactgggtcaatccgttgaaagttacagctaaggtgatacctggggtccaaaagctaaatatggacctacgctatcaccagtcccttccagttctaaaactaagtccaagccttttgcagcacgaaagagatagcctcctctcatctaaagttatggctggtaaggctgagacgaatggaaatggatttcaaagacatagatttagaactcctgaaaggcaggagacagaactcaatactttcatggtgagtggtttatttactgattaaataaacgctcccttagggatgtaagctccacaccggcaggagcttcatcaccagctctcactgcagaccccggcattaaaggagctcacacggtaaaagcccctaccgcccaccacagccacagcggccggcagcccaaagtgggaaaccgcgccggccgtcacgtgactccagctccccccggcaaccggcccgcccccaccgagaccccgccaatccggaagggaggtccaatttggccaggccagggcgtgttccaccggcccagtagccttgctgctgcgttatccctagactcgccccacttgcctcggagtctcaggccgttgcctaggtcctcccggtaaaaccctggagactgctagggagaggagcaagggaggggccagcgcgcagaagtgcggacgcaacccggcggccgcgggcgaggcttatgcagagcttcaagaaacagctagggagaccgcaggagtctccagagcgcgcgcgcgggccctccccggcccgacccacgcggcgcggcgtggtgacgcccgcgcggcctgaggaaggggcggggtcggggcgggcctccgcgctcctcccgccctctctgtgtccctactctccctccccttccctcccccacactcggccccgtcagcttgggggtgccttcgtcgcgcagccttgcgtcggcccggcccggccaggccagcgggcagatgccccgagctgccgccgccgccgccgccgactcggccggtggcggtgtgggaggtgggcgaccagcccggggccgctgagtgtgacggacgcaactgggggcgccgggggctccgcacggaccatgtattttctgagcggctggcccaagaggctgctgtgccctctggggagcccggccgaggcgcctttccacgttcagtccgacccgcagagggctttcttcgccgtgctggccgcggcccgcctcagcatctggtacagccgagtaagtagagccgcccgccgcctttcgccgctgcctccccggcctcccggcgccgtcccacccccaacttcca

SEQ ID NO: 41491 - DNA, 2300 bp, Homo sapien
cctaacaaaatttcaggtaagcaaatcttgttttatcatctctacgagcatgtctccctgccttcaaatgccctcaagcagctgtaagacttcaactctgtaaaatcctgtagatcttcacatattattataaaactacttgtatctacagcctctcaaaaatcaaagcttttagcagctccatgagaactttttaaaccaattcactctaaattatggaagtataactgatagccctttaatttacctaaaggcattttcacttttaaatgaagtttgttaacctaattaacttacatactttcaggaagtttacaaattagaaaatcaaaatgaaaactttcatacagagtaagaaagggcatatcccaggaagagaagattggaagctggagtctagcatatgtatcccactcacctaggcatgtaatcatacaccttataatcacttggttcaatatttgatttttttttttttttttttttgagacagagtcttgctctgtcgccaggctggagtgcagtggtgggatcttggctcactgcaacctctgcctcttgggttcaagcgattctcctgcctcagcctcccgagtagctggggctataggcgtgcaccaccacgcccagctatttttttgtatttttagtagagacgggatttcaccatgttggccaggatggtctcgatctcttgacctcgtgaatatctgatttttttcagtgacaacaaagctggtgcccagagaccaaggttaaccactcatactacagtactatacagcctcctctaaggtattcctgcatttcatttcactccagacctctaaacccatgggttccctacagcctaacttttgcacaacagaacttaatagtaggggtccctggacttctgtggaaaaaggaagttgcatgtgaggtgggaatttgaaagaagagtatgaatagtttaaattccagaactgccttggatttctagatgtcgtatgtaactccaaaaccaaacaatagacatgcttaagaatattcacaatgtccctaaattaaagcatatgtttatgcttctcttatgggggaataaagtggtttacaggcttctggtcaattcataggtcatattgtttacttttatttaaaattaagttaggtctgcctttttaaaggtaagaaaagttaaattttagacgaaagtctaaatttgttacattcaaaaggaattatgtattaaattcaaaagacaatttaaattcaagttctatttttttctgcatgtgctttaaagttgagttatatacacctaaacaaattaaaaattattcaactggcatatacattgtaaacgaatatctcatttaggaaccagatgatactttatatatatttacacatatgtttatatatatacacacacacatacatacatatatattcaaaatacaatcaggcactagacaaaatagtcatattgttggtattacgattttataagtttgttttgttctgatttgcatttgaaaattagatcagccaaaacttgatggcaaatagtctgatttacagcccaactatgacagtcaaaggagacaccagaattacccgtcactaaatcccatcaccagtattaccagggaagtgggtgaggactgtcaagggcattacaggtaatggaacagcaacacacaaagatttggggattttaacaaactaaaaccagtatttcacgaacacctaataaggacaagatcacaacctatccccacatggtcaaattaacttggaaaggagaaaaacttcactctgacatcgattggtactgccttctttggggaggaaaaaaagcatttttatactctgaactctgtcgttctcatagacaaagttatagcagtgtttgcagagagtagggagtatcccatccaccacttatttctttctcatatctactcagtaattcaatacaagaaagaaaaagataaccaggacttaaagcaaaaacagaattcagttccatgctcctcccaagccttattatttccaggtgttataactgggagttccgcggacagatttgagttctacttccgctcctttaaccccctattccgaagagtccaagagcagcagcaaagaaaaagaccaactcgaaagtggggaagggatgttggggttaaagaggggagttaaataaccagacctttagtgaagaataaagaattcaggctgtagtttgtagaaataagttattacaggcctgtaaagtctggcgctgggtaaagcccaagaggctttccctaact

SEQ ID NO: 41492 - DNA, 2300 bp, Homo sapien
tcaaacaaggtaggatggtttaagaaaacggggggagtggatgagaaaattctcagaatgaaaagtacaatagtagaaatatattcagtaaaagcattgaaagaaacagttgaggaactttccctggatatagaataaaagacaagaataagagagaaaagagaaaattagagtttaatatgaggtttaatatctaactgactaggagttgtagaaagagagaacagggaatggagaagcttattattatattaaggaaacaaaacatgtaaatttcctagagtttaaactaaatacatcagtagattgaacaggtctaccaggtgctcagtgcaatgataaacattcacatacttgtagaaaaattaattattttgaaatttcagaacccatcggatatataaaaagaagatcctaggtacttcagaggaaaaagagctagtctgtgaataggaatgtcattgaactccacagccacacttgagaatctaaaaggacatgtccccagtgtacttatctcccagattcaaaagttgtcaacatccccctctccccatgcatgcatactttttaattattaaagcaactttcatatactatatcattcaaccctaaatgcttctgttttgtctgtaacaggtagacattttaaggaaaccaaaccacaatattattacccaacagaattaatagtttattagtgtcatcaaatactcagtctgtgttcagttttcccattttaactcagagctgttattttaggagttggtctgttcaaatcaggacatacgtcttttttgtttgttttcctttttatctttattttatatatatatatatttttattatactttaagttctagggtacatgtgcacaatgtgcaggtttgttacatatgtatacatgtgctgtgttggtgttctgcacccattaactcgtcatttacattaggtatatctcctaatgctatccctccctgctgcccccaccccacaacaggacctgatgtgtgatggtccctttcctgtgtccaagtgttctcattgttcaattcccacctatgagtgagaacatgcggtgtttggttttttgtccttgcgacagtttgctgagaatgatggtttccagcttcatctatgtccctacaaaggacatgaactcatccttttatatggctgcatagtattccatggtgtatatgtgccacattttcttaatccagtctatcattgttgaacatttgggttggttccaagtctttgctattgtgagtagtgccgcaataaacatacatgcgcatgtgtctttatagcagcatgatttatattcctttgggtatatacctagtaatgggattgctgggtcaaatggtatttctagttctagatccctaaggaatcgccacactgtcttccacaatagttgaactagtttgcagtcccaccaacaatgtaaaagtgttcctatttcttcacatcctctccagcacctgttgtttcctgactttttaatgatcaccattctaactggtgtgagatggtatctcattgtggttttgatttgcatttctctgatggccagtgatgatgagcattttttcatgtgtctgttaaagagcttctgcgcagcaaaagaaactaccatcagagtgaagaggcaacctacagaatgggagaacatttttgcaatctactcatctgacaaagggctaatatccagcatctacaaaggactcaaacaaatttacaagaaaaaaacaaccccatcaaaaagtgggcaaaggatatgaacagacacttctcaaaagaagacatatgtctttttaagtttccactgaaaggagtctacctctgtgttgttttctgtcttaagctttctagccctatttgaattttaacttctgtatatatattactttggaaaataaaatttaactttaaaaccagatatattaatacatcgaagacatctcagtaaatcatcacagactgtgtgttcagcagtttaaatgtgactcctataaactaattactttcatgtcctttttacaggctgtcacatcagtcagacatgttagttgaacacgaacctgtatggttaaacattagctagtttagtcatttagacttagaaggaattaagtaagtactccagttcatagtagtagcaggatagaatggtaataaatcaccacaaaactttataagaaaaatagtctgtaacaaaaaaataagcaaaaataagtaagaaagaaaactaaaaaaatgagcatcaaaatatatttcccaaagccaggaac

SEQ ID NO: 41493 - DNA, 2300 bp, Homo sapien
ttagtagagacgggtttcaccatgctggccgggctggtctcaaactcctgacctcaggcaatctgcctgcctcagcctcccaaagtgctgggattacaggcatgagccacggtgcctggcccatagtgaattttattaatttattaagctattgatttagttggattttaagttgacttaagtcaacttaataagtataacaaataattagtaagtaaagcacttgataataagtgaagtataacaaacagttttatcaaattttatcaaggttaatacagatgtttagagcatattgcttttacttaattttctgtcttcacattacatacacaatcttactgggtttgattgctgttgacttagctttttaatttggcatttagtttttcaatatgtgacaacttttcttagagtaaaatgaaaaataaatttgaacagatcgaagcttttcttattccaagaacagaagactctttgttcagttctgttaattctcgccccactccaacatgtgctcatgaaaactaatcagcaggctagagagatcaatctcattaaaacgaaaatttactttatctacattgatatcccatgtcaattatttaaattgaaaggtgttgttagggtgatacaaagacaccatgttcaaagatgtaagacagacaacgtggaaaaatgaacgccttttcttgcagatagagttaatatttgtaatatattaaaagttcttgtagataagtaagtcaaataccccaatagaaaaataatagcttacatacactctttcatgtacatatatatatgtttgtttagagatagaataaaagctaaccagtggttgtacctaagtaacagagaatttcattttgtcaatttttatattgcataatttcataagtttttttttgttttttttttttggagacggagtttcgctcttattccccaggctggagtgcagtggcgcgatcctggctcactgcaacctctgcctcccgggttcaagcgattgtcctgcctcagtctcccatgtagttgggactacaggcatgcaccatcatgcacggtttcgtatttttaatagagacgagatttcgccatgttggtcaggctggtcacaaactcctgacctcaggtgatccacctgcctcggcctcccaaagtgctgggattacaggcgtgagcaaccacacctggcctaagcattgctgttttaatcagaaaagtgtaaaagtaataaaaatatttccattaaaaaccagaactttttctgaggctgtaattgtattagattaggttgttttggaatggtttatatcagcaaacccaaactgttcatctgcacaattcatagctgccctcacaggtgccttctctgaaaatctcttgtcagtctgtatttattgaattcaatatttaaaacaaacagaaacataaggggcaaggggcagggagaggaaagcctggtgcctagaaacatgaaataacgtaagatgtaaaacattgattcatatacaaatggtaaattccaagtgctctgctactaactagggggcaccttaaacattgttcggcaagatgaatctcatagtgtgataacttaatgctttaagtttaaatatatttcataagttttaccaatctgatgtgttattttctatagatttccagcacctatctagagagcaattggcctatacgggtgagttgttattttgttggtgttaacttttgttgactagcatttgctgcaagaggcattctgggaagagcccttcagtgggtgtactgagaaaaataaaactcttgatctattgtaacattgctagtatattaacatctataattttgtcagatataactgaatatttggactttaaaatatttaattagcaaacatttattaattgtctgtttgcctgacacaatactaagctctttatgcctaataaagtatataggtttgcaaggaaaagttcttatttttttttttaaacagttttcagctattgataagcttggacagaatattgctgtggttggcaagtttggttttgcacattactctttactcaccaaaaaatggaaactttttggaaacattacccaggttagtcttttttgagattaaaaacctatttctcaaagtataagagaactacaatatgaaatagctataaagtttatcactaagtaattttggttacttattaaaaataaggaaaatcagatataaaaaagtgatattgaataatatgtaagatttgattctgataaaatacttgatatttgataaa

SEQ ID NO: 41494 - DNA, 2300 bp, Homo sapien
ctgttaatagtactgaaccctatatagcactatcttttttcctatacatacatacctatgataaagtttaatttgtaagagattaataatgactaataataaaacaattatgacagtatattgtaataaaagttgtatgaatgtggtctctcagaatatcttagtatactgtactcacctattttcagaccatggttgactgtagataactgaaactgtgaagagcaaagccatggataagagagactactgtatctggttttttgttttgagaaacagctggtcttattatgtatcaggtctaaatctgcaggtctaggccaggtgcagtggctcatgcctgtaatccaagcactttgggaggctaaggcgggtggatcacctgaggtcaggagttcaagaccagccaggccaacatggtgaaaccccatctctattaaaaatgcaaaaattatccaggtatggtggcacacccctgtaatcccagctacttgggaagctgaggtggcagaattgcttgaacccggaaggcggagggtgcagtgagccgagatcatgccactgcactccagcctgggcaacagagtgagaccccgtctttaaataaataaataaataaataaataaataaagcaggtctaaaaggaatattttataatagtacattcagttttgatcacttcattttttgcttactcatagaatgagcctagtctgcaaaaatatgtaaacataatccatttactgttaaagcttagatagttcttttaactcctgttactaaaaaaaaaaaaaaaagtcggaagttaaaaacagcatgtttaaagtatttggtcatccctagtagttatcttgtttttataattttcttcatttttgttttcttcagcttagagtatacttgcgaacatcaaatctggacaatgcctttgctcatgtcaccaaagcacaagcagaaacattactgcttagtgtcttccaggacatggtaatagtatttagagcagactgttcaatatgcctttacagtattgaaagaaaatctgatgggtaagtatctggcatatgagaagtcactttttgctcctatttaccacgtttctcttttgtagtttttgttttctcaaaacagttattccacttttatattcaatcttgtttttgttagaggtaaaaaaagcaaggagttttaattagtgatattgatataatagctaaaaaaaaaagaaatatcgtacactaacttctttagcttatcttcctggagtcatttgaaaaaaatctagtttgggatgaggtaaacccttagatactaaattttttttcacaaccttgaaaataaatggttactgactctcctggtgctctcgatacttggtgggaatttgaaggagttctacaactttaagactgtaggaagcatgtccttagcaaactgacttatatttccactgagctagatggctgtagtctggggcagtaaaaaatcagcagtgttgttgctgctgcacgttgccttatatttgtcttggcatctggtctacttgcaacgtatttagaccacacctcttgagttttatttttgttctcagaggttaattgaagtatgtatttactgaaacagcacagtgattgagaagtaatgcaagataaaaattaagacatctcactagcctcaatgattgaaccatcattctttctcaacccactagttttttccacttaaatatttgtattcttatagcttcttccctagttttcgtcttccctcctatttgttactccctttctttctctctcatccccatatactctggttcccctcaaccttgccaacttcctgatcgaaggatatatggggagaagatgataggtagtaagacatctgagtcttccataagcatgaaatctaatactattactagtggaaaagaaagaaaatcttattagcattgttgttgaggtatgtgggtttcttttgtttttacagtccaaatactactgctggtattcaagttcttcaggaggtttccatgtcacgctacattcctcaccctttcctggtggtatctgtcactctgacatcagtgagtacagagaatggaatcaccttgaaaatgccacagcaggtaccactccattatcaaaggtctttggagtttacatttctgtttttagtatttgagtccatattaggaagtatttgtttggcaaataaatactaagtgtctaaaatgtaccttatatgagaatgctgggttgcagtggcaaattaaaaagacatggtttctgctcaggca

SEQ ID NO: 41495 - DNA, 2300 bp, Homo sapien
ttccctcatgtgctggagctcatgctccatgaagtactggaagaagaagctacctcacgggagcccattcccgaccctctgcttcccactgtggcaaaatttatcactgagttccccctcttcctgcagacagttgtccattgtgccaggaagaccgaatatgccctgtggaattacctttttgcagctgttggaaaccctaaggacttgtttgaggagtgtttgatggctcaggatttggacacagctgcctcttaccttattatcttacaggtaacaattctcttcttataaaggggcaagaattaatgagcttaaacttagaaaaatagaaatgtcctgttttgacaccatgattgtgtttaaggaattcatagtcaaattttctgtttatatctttaatttggaagaattcagacagattcctttgaatatcataaagtaacattgcagagatattttttccattgtccataaataggcctaaaacagattaatgagttcagagtagtgttttgaaattttaatatattgaagaaatttaatatgtatattagaatacatgtaataggaacatggaagaaatattacataagattattgaaatattacataagaaacatagcaaagaaagtattatttgagatattagtgagtttgagcttctcacaacagtagatttgtttcctttcagtgtgggttactgaggggacacttattagagcatggtcataacagagcaccttgagctagtcttccccaaagcaagctgagaaggctcaggcctgccacagcaaagaccctcatagcacacagtttttctcaaaataatggcttctttgcaactcctgaaaatttatttcattagctatttgacaaaagggcttgacagttggttatttgataggctacacttaaagattctttccagttactgcaaagttgtttccattgatgtaagaagctaaccataaacctggtttcaatctctgcctgaagcagatttcctgtcagcttctttgcttcatgacaatgaactgaaaccagaggagacactcaagcagaggccaggtggccttgaagtatgattccatggctaaccctaaagaaaaagacatagggttttaaaaatagaatcaaaataaatgcagctgttttttggttccgggtcactccctgcaacttcactgtatctccctgacaatgtaatttttttctgcaacagaattcctaagttgctatggattggcagataataattacaattacagttgtctattaggcacctttccataaagaccaagataggcaggttaaatttgtgaaagaaaaatggaggattctgaatgtgcagcagaactttactacttgctattgcccaaagcaaagattctagtcacatcctcagaaaactctgcaacaggagacagacctgacctattttggagtcaggcaaacctcccttttttttcttccttttctgctgatcttcaacaatttacttaactcagtttcctcacttgtaaaatacaaatgatatgcctatctgcagagtcactgggagaaataaatgaaatgacttaaagtatatgtatgctatctggcatgtagtaggagtttaataaattatagtttacatacaccagaagagtacttgcctcgcttttccttgtatggtactttttaatcttattattaaactaacccctgtggtggtgtggctacattctttgagtttagaaaacgagataaagaattgctcatatcttcccaaattgtgtagtataaaaagaatgctgtcctggttgttttttgtagaatatggaagtccctgcagtaagtaggcaacatgctacccttctattcaacacagcactagaacaaggcaagtgggacctttgtcgacacatgattcgatttcttaaagccattggctctggagaatctgagacacctccatccacacccacagctcaggttagttgcaaaagttacacatcttctctaggccatacacccacgtagcatctttctctaatggtactgcatatggtgtgtaatcctaggaacccagttcaagtggtggatttgagttcttcaggaatcgaagcatcagtttatcccagtcagctgaaaatgttcctgccagtaaattcagtttacagaaaacactaagtatgccatctggtccctctggaaaaaggtaaaataataaagagccattactgctttttgggcattcatgacacattgcatttcaagacatttacaaaattaggtcttaatggaaacaactattt

SEQ ID NO: 41496 - DNA, 2300 bp, Homo sapien
tgctgtaagaatataggggaggcgagatgaattttgcttgtggaagtcagggtggctgagatggcaacatttgaattgtttccgttttttttttgttgttgttgttgagacagagtctcactctgtcgcccaggttggagtgcagtggtgtgatcttggctcactgcaacctctgcctcctgggttctagctgttcttgtgcctcagcctcccaagtacctgggactacagatgtgtgccaccatgcccagctaatttttgtgtttttagtagagacagggttttaccatgttggccaggctggtctccaactcctgacctcaagtgatcctcccacctcggcctcccaaagtgttgggattataggcatgagccactgcacctggcctgaatggggtttttgaagcatgtgttaaaatataccaggtagggaacagattgatgagcggtttaaggtgggaatgtataaaatgcatctgtgtcagttagtggacagtccagtgtggtgaagacaaggaggtagtccaataactggaaaaggaggccagggtgaagtgggagcatgattctaaaaatcaatggggccactattaaaatgttttgggcaggtcagtgagagaatttgtgattttgtgagaaaactgataacaatgtataaagtggactggaatggagcaggagtgggcaggggatgaatagaggtgaggaggaaaatagattcgagcgatgttttatctttggtgcagtttgggcacttaaaatgagatctttgtttttgaatatctgagtggcattcagcttcaaattgaactataataataattttcttatttttaaagaccaagcctcttgatcaacgcagtgttaataacttaagtatttagcagctgtagcctatctttcattgttgggagcggggaggggttgttacatgaactgtaacttgttttgaaaacacgtcacagaaactcttgagcccttgaagaaggagaaactttaatatatctatttctccatttccatctttgtatttatgcaccgtaattaaaactttcatgtttgtgtgaatagaattactcatgcagatgttaaaatgtattaagttcatattaggccaggcacagtggctcacacctgtaatcccagtgctttgggaggctgaggtgggaagactgcttgaggccaggtgtttgagaccaggctgagcaacatggcaagaccctgtctctgccaaaaaaaaaatgttttttttaaactttgctgggtgtagtggtgtgtgcctatagtcccagttacttcaggaggctgaggcagaagaatcacttgagcccaggaggctgagactgcagtgggccgagatcgcaccactggactccggcctaggcgacagagcgagaacctgtctcaaaaaaaaaaaaaaaaagtttatatggcaactttattttgaagagtgcaaggtgctacataggaacccttggactttaaatctcaaaaactgtaagatcaaattttataataggaaatcatgaggaatacaagaagggggcaaaggtgcagtacaagaccaactggagatagaaaaaactcatgaaaataagccaaactccagattgctttaaaggtgctgcagttttccagatgtgggttattggtggtgctgcagcagttcctaacgttccttcacaggtcatttctctagtttgcttgaaacagtgtttggaattggcatgaactgaaaagcttacagagatgattgttttttaggagagtcctttcttctattttggaaaatttctacttttagcctagtagaagaaaagcatagagtacatggagcatttatactctatattgttaaaatgccctttcttgtgctacatttgaatttactacttcatgatgggggaggtagctttgttagtgtttactttaaatcagtttaaagagcagactgtgtttaaaacaaaatgtagctttcctgagtgatggaaagtgtgttactataataaaagctctttatgcatgacccctgaatgagactacttgtatatttttctttctttcagaatgccagtgcccagtatctgggagaagtattttttgacatttcgctgtttgtccattgctgttttcttgttaccctcacttaccaaggactttgctcggcgtttattagtgctgtctgggtagcattcccattgctcacaaagctctgtgtgcataaggacttcaagcagcatggtagggtatttttgattttgatatacatgggagaataccttaaaatacttaaggctttc

SEQ ID NO: 41497 - DNA, 2300 bp, Homo sapien
aaataagcgttgataaagaattatttaaactgctgctaaatattttatctcgtaacagcacacaacaacttagactctgaaacatttcaagcagaaatatttcaaataaaagaaacagtttaaccacaagcagttcattcatacttcgtgacactggtccatactagctattggtctgtagtgtggactttttaatgggacttttcattagaagtcaatctgtacaaaccatttttcaatagtttctatgtggtacttttatggagtgcctaaatatataaaaattgactgcttcaccaagactaaaagtaaaataagcatattaatttaatatttaaaaatttcttacaatataaagcaaacattgtcttaagatttttagctttctgggaagatataaacaaactgactgaaaaacttcaagcacattctacagcaatgccagtatttgtagttttagaggaaaatacttactcttatgtttgggctgcaaaaattttttgcccaggtacaaaacaacacccattaccaccatgtagtttatgattgagccaatacgagaggggtaggcaatgacaaacaggcccagcacatcaaagaagaccatgtttccatgtcgatacttagaagcagcagccagcatatcagatgtagctagatgcttaagaactgctaaaatgttgtcacctattagtaaaaacaaaaaaaaaaagaaagaaaaggaaaaagataaaaaggctgaataaactatttgtgatttacacataccactatttaaagcagaaataaaccatatactgtttgaatgaagaaatggttagaaagaatgtgaacagaaatcgctttctaccatcctactgctctccctcactttttttactaaatttctcaaataaggtccatcccctgcctttctccatttcctctccactcagacgctcagccaactggcctgtatcttttcccttctattagaactattctctgtgatcaattgtaccttcattgttgacaaatccaatggctgtttcttggtacccattcatttaataatatatattaactgtactagacactcttctagatatcagaaatttagtggtgaaccaagagacaaaggcctttcacgaagctcagagatgctgaacaagctgtcacacatgtgttaaaaattgaggagagctagcagagttccacaggaaaacatcatgggagactaacagagctacattcttaccactcagcaatcctcccaaccctgggccaactcctttttcatttcctcacaatgaatattcctgaccttaattgctacactagactacaagactaaaattcaagatctcatctctccaactccaaagccctagctcattcacattgcatactgcctctctaatgcacaggccacagaatatttacaagtttatgtatcatccctaacattccatcttagtgtatatcaaaagtctaaattggaataccaacctgctctctgaatggaatctgttagaattctgtccgctgtgtcatacttggtgtgataaatgtatccattctcaataaaagctaagtctattcctaaaacatatatatagaaaaaaaaaagtcattttgctttaaagatcaaccttgctttcgacctatttctttaataaattcctaaaagacaaaatgtcaaagcagtggcacgattgctttgtcacatttacaaacgactgatataaattctcttccaaattcttacacagtctatagctttggtacataattcgatacataatgattgaagaagtatattactccacaggtaggcattacaagtcacacagcaaggataggaatattgagtttgggaggtcatgaaaattttgccacctacattcttgccaggccagagccaaattttaacttcaaataagttgtacatacaagttgccaagggagttggcaaaccaagacaacaacgaaagacccctgaaggatctattaccatcttttgggaatgaggtgctaaacagttcacccctgttcttctatggggaaagatgacatattttagaggaggccagcatttaaattagtatggagtttaaaaaaggaaacaaactctgttttagtgagtcaatgtatatttctcacataaagaatttgatctcagaaaatgctgtttactcacatactttcaagatttaaaatttgcttttgataaataaatgctgcacagtaggccgtaaccattgacaatatacctggaatgttcccaaaatccctgtagatacgaaagtcagtatctgaag

SEQ ID NO: 41498 - DNA, 2300 bp, Homo sapien
tatgaatgatctttcattttcagacagacttttgtattgctgttattttatactttattttcacaaaaggtttttattctaaaagtcaaacacatatatcagagaaacattggaaactacagaaaaagggatgaaaaggtacatattggacccgtctcccaaaaccaccacttttactgttttctatgtgttgaaaaacattagtatgttaaaaaaaattgccggaataccttctattgtgttgtcatctttcattttaggtcctgaaaatccttggttggttcaagcttatgtttcagcagctaaacacccttttgcttctgtggtggctcaggaggtttttcagagtggaatcattccttcagatactgactttcgtatctacagggattttgggaacattccaggtatattgtcaatggttacggcctactgtgcagcatttatttatcaaaagcaaattttaaatcttgaaagtatgtgagtaaacagcattttctgagatcaaattctttatgtgagaaatatacattgactcactaaaacagagtttgtttccttttttaaactccatactaatttaaatgctggcctcctctaaaatatgtcatctttccccatagaagaacaggggtgaactgtttagcacctcattcccaaaagatggtaatagatccttcaggggtctttcgttgttgtcttggtttgccaactcccttggcaacttgtatgtacaacttatttgaagttaaaatttggctctggcctggcaagaatgtaggtggcaaaattttcatgacctcccaaactcaatattcctatccttgctgtgtgacttgtaatgcctacctgtggagtaatatacttcttcaatcattatgtatcgaattatgtaccaaagctatagactgtgtaagaatttggaagagaatttatatcagtcgtttgtaaatgtgacaaagcaatcgtgccactgctttgacattttgtcttttaggaatttattaaagaaataggtcgaaagcaaggttgatctttaaagcaaaatgacttttttttttctatatatatgttttaggaatagacttagcttttattgagaatggatacatttatcacaccaagtatgacacagcggacagaattctaacagattccattcagagagcaggttggtattccaatttagacttttgatatacactaagatggaatgttagggatgatacataaacttgtaaatattctgtggcctgtgcattagagaggcagtatgcaatgtgaatgagctagggctttggagttggagagatgagatcttgaattttagtcttgtagtctagtgtagcaattaaggtcaggaatattcattgtgaggaaatgaaaaaggagttggcccagggttgggaggattgctgagtggtaagaatgtagctctgttagtctcccatgatgttttcctgtggaactctgctagctctcctcaatttttaacacatgtgtgacagcttgttcagcatctctgagcttcgtgaaaggcctttgtctcttggttcaccactaaatttctgatatctagaagagtgtctagtacagttaatatatattattaaatgaatgggtaccaagaaacagccattggatttgtcaacaatgaaggtacaattgatcacagagaatagttctaatagaagggaaaagatacaggccagttggctgagcgtctgagtggagaggaaatggagaaaggcaggggatggaccttatttgagaaatttagtaaaaaaagtgagggagagcagtaggatggtagaaagcgatttctgttcacattctttctaaccatttcttcattcaaacagtatatggtttatttctgctttaaatagtggtatgtgtaaatcacaaatagtttattcagcctttttatctttttccttttctttctttttttttttgtttttactaataggtgacaacattttagcagttcttaagcatctagctacatctgatatgctggctgctgcttctaagtatcgacatggaaacatggtcttctttgatgtgctgggcctgtttgtcattgcctacccctctcgtattggctcaatcataaactacatggtggtaatgggtgttgttttgtacctgggcaaaaaatttttgcagcccaaacataagagtaagtattttcctctaaaactacaaatactggcattgctgtagaatgtgcttgaagtttttcagtcagtttgtttatatcttcccagaaagctaaaaatcttaagacaatgttt

SEQ ID NO: 41499 - DNA, 2300 bp, Homo sapien
gaggacgcggaagaggagccccgggggtagcggcggcgcgagcaggggcgcggggaccgggctgtctgaggtgcgcgccgcgctggggctcgcgctctacctgatcgcgctgcggacgctggtgcagctctcgctgcagcagctcgtgctacgcggggccgctggacaccgcggggagttcgacgcgctccaagccaggtaccggccgctccctcctggcacggcccgcgcgtccgtttgcggctcctgcgcaggctccggggcaccgcacctgtgtgcacccgcccctgccggaccgctgggactcgctgacccctcccaggctgcacgtggggtggggtgaccttgcttgtccttcttctggggtctgaattgccgggacttggggcttgcctgtccccggttaagctcgtggtgcagattggggttgccaggtagattgaacctgctttccactgtctgcccttcgtgcagatggttggttgtgagtcgtctccccatattctggaacagcttcccctttttaccttgcttagcccttctgctttccagatggaaatttgtgtacctagactgttgtataaattcgctttgggggcggggagttttggaaggcgctagtgcactgttctaactttctgagggttacagcccccacatctgaaggctatagaaactctttctggaacaccgcccagtcaaaatttggtatgcagtctgataaattctcagatccctgcagtttatctttaggccccttggattagtgactgtgtaaggtttgacttttttttttttttttaagacctttaagaatgctaggaaaggtgattaagtcaaagatattgtaacccaggtgtgtcaaagctcatgaagtgttaagctggcgtcaagttttcaacagctactgtgttctaaaaagtttttgctagaatgcaaagtgttgcaagcttattaaggactttctgaaacgtctcccacccccacttccagctttccccacttggaatgcagtgaaaagacaaaaacagttttgttttcattaggggtacagttggttttggcctgaattgaagttattagaccttgggtgtatgctaggagggctaggtccatcaaaagtttcccccgcccgccttatttaacctcttgacttgattatttttgctcattggtttctgctacttaaagtcattaacccagaatctgtaacgttcaggagtatgcacagtgaagttatattctatcctgcttagtctttagctttttttgtttgttttctgagacagggcctggctctgtcgcccaggctggagtgcagtggctccatctcgggtctgtagcctccacctcccaggttcaagcagtcctcccacctcagcctcttgagtagctgggactacaggcggatagtagtctacatctggctagtttttgtagttttagaagagatggggtttcaccatgttgcccaggctggtctcaaactcctgagctcaagcaatccacccacctcagcctccgaaagtcctgggattacaggcgtgagccaccgtgcctggccagtggtcacacgttttgaatacatccctagtccttgtattggtttgatatggggagaagttgggagtgggatggtggagaaaactgaaggggtcaactcgtgggaggcaacaataaaaatatggaactttataagtgatgttcacttggtgtctgaaataatgaaaggcggtcccttttatataaggcaaagaactaagcttttttggggaggaaggggtgtgtagtggaaaagttacccacgctaagtgtcaattttaactacaaacctttgttattcttttggttacttccagggattatcttgaacacataacctccattggccccaggactacaggaagtccagaaaatgaaattctgaccgtgcactaccttttggaacagattaaactgattgaagtgcaaagcaacagccttcataagatttcagtagatgtacaacggcccacaggctcttttagcattgatttcttgggaggttttacaagctattatgacaacatcaccaatgttgtggtaaagctggaacccagagatggagcccagcatgctgtcttggctaattgtcattttgactcagtagcaaactcaccaggtatgtacctgttttttagtcatttggaacttgtcacagcccagaaagtttattaacataaccccaagctacttgggcaattgtggggaccattttcttgggcaaaccttttttctttgtgatggaaagcaggataatt

SEQ ID NO: 41500 - DNA, 2300 bp, Homo sapien
gcctttcaggaactcagctgtaacttaactcctaccacctagagttctatgattatcatgataggaaagtagcttttaatctaatctacaaaggatttcatgagaaggaaaattctgaaaaatagtttttaatgagaatcttatgtgaggatctttcacacacacacacacacacacacacacacacacacacacacacacacatctatctatccatctatcatctgtctatctatctaatcctcactgaagccccttaaggcaggtatcatctgcattaccacagataaatacacgtggactctgtgagattgtaacttgaataatgccatgtgtactaaaggtaccagatccaggaactcagatctacccgtccccaacagccaggcagccaggcatttccctattatggtaccatgggatattgtcagacatacacacacacacacacacacacacacacacacacacacacacatatatacatacatatagttatgaccatgggctaggctcttatccagagctaagcactatggatacagtgatgattaaataagatagacactgtctttagtctcatagtgcttacagactgaaagggatcttgtagagctaaaattatgcttgctgccacaaaagtggtatgttttcattttttcattcactcaagaaatatctattgactacatactatgtgtcatgctttgtgttaagagcaaggaataaaatggtgagtaaaaccagacctgattcctgccttcgtggggcttacagtctaatgaggaagttatgaaatagtcacatgcaaacatggtgctgtgagatcctacaaataggggaagcaagcttaattaaattaggagattcttgcttgaggaagtaccacttaatctgagatttaaaggataactaggagttaaaaagacaatgaggagagagaagaacactccaggtaattcaaacagcatgtgagaagatcctattgtagaaggaaagatgcgtgcaggaagtctttgaaagaggccagtgtggctggagagctggaaataagaagcatcctggtgtcagaggagcctgagaggtgggcaagagcaggactatagggcattgtatgaaatctgacatatgtgctaagtcaaaatccggcagtgtgctctcccagttggtctctaggttaatgctcatgctaatgtagcaactccaagctagggacaaaaaaccttggagcagagaggctcatgggtaccggcaagctggaagaagactagataatcactaggatctgcactgaaaccaaggctctgctgcttaaccgccccagagagtcgtcaagtgaagaatggcctttctgaaccttcacttgcagagtgctaatgtagtagtggaacagaatgctgttttgggagcccatgaaattagatttacattcttcatctgttatctctacgtttctcaggttataaaatgggaacaaagatatttccttttaagtattgttaaagataattaaataagatgatgtattaaaggacttgacctagcgcttagctcatagcaggtattcaataaataatagccattatttttctttatctgttaaatggagacagtaatagcacagattaagttgctgagttatgaagatctgattagattatgcatgtgaaagcaataggccgggcctcctctgcgtaatcttatttctaattttaagagccaggaacccacttttttggagcctgatgttctaatattccttccttacgaaagccaggtcattgcttttttcatctgcctgatgcactgtaagagccttgtgtgttctttcaaaagcgatctctcatttttctcgttttgggtttttaggtgtctttacatttggcaatctccgtcctacagagggctggaaaagccctgcgggagacggcatatccaccacccgctgctgggtcggccctgcagctgtgtgcacccgagaactgccaaagaagctgggtcttggcgcggcgggacgggccaatcagaagaagtttggccctctgcagtttccgtccgctcactaggaggcgctgcggcagcgacggcggcgtcggcggcggccggggctgtcgcgggttggggcggttgggctggcagctgaggctcgtggccatggagtggggttctgagtcggctgctgtgaggcggcaccgcgtcggagtagagcgtcgagagggagcggcggccgcgccaccgccggagagggaggcccgagcgcaggagcctctggtggatgggtgcagcggcggcgggaggac

SEQ ID NO: 41501 - DNA, 2300 bp, Homo sapien
aagctgatcctctttcaactacactagaaattgccgaagaactcaacgtcgatcattctacagttgttcagcatttgaagcaaattggaaatgtgaaaaagctcatttagtggttgcttcatgagctgagtgaaaatttaaaaaacggtctttttgaaatgttgtcttatcttattctacacaacaacaaggaagaatttctcaattgagttgtgatgtacaatgaaaagtggattttatatgataactggcaatgaccagctcagtggctggtctgagaagaagctccaaagcacttcccaaagccaaacttgcaccgaaaaaaggtcatggtcactgtttggtggtctctgctggtctgatccactacatctttctgaatcccggtgaaaccattatatctgagaagtatgctcagcaaatcaatgagttgcaccgaatagtacaacacctgcagctggcattaatcaacagaaaaagcccaattgtccatgacagcacctaaccacatgtcacacaaccaatgcttcaaaagttggaataaattgggctacgaacttttgcctcatctgccatattcacctgacctctcatcaaccgactaccacttcttcaatcatcttaacaactttttgcagggaaaatccttccacaaccagcaggatgcagaaaatgctttccaagagttcatcgaatcttgaagcatgaatgtgtatgctacaggaataaacaaacttatttttcattggcaaaaatgtcttcattgcaatggttcctattttgattaataaagatgtgtttgaggctgggcgcggtggctcatgcctgtaatcccagcactttgggaggctgaggcaggtggatcatgaggtcaggagatcgagaccatcctggccaacatggtgaaaccctgtctctactaaaaatacaaaaatttgccaggtgtggtggcgtgcacctgtagtcccagctactcaggaggctgaggcaggagaattgcttgaacctgggaggcagaggttgtagtgagctgagatcctgccactgcactccagcctgggcgacagagtgagtctccatctcagaaaaaaaaaatgtgtttgagcctagttataatgatttaaaattcatggtccgacaccgcaattacttttgcaccaacctaattgatgtctaagtaggtcatattctacctgcaaaaagaaaatttcatctatccctttcacatagatggaaacccactatctccagtggacagttaacaccaaaggcatcacagagaactcatggagctcagctgaggaggtttcagggatttttctatttccttttcttgattatgagagtctgggactagatgctctccagacctgtgcctaaagactcttcaaccctttgagatggagatgagggagggaatagggaacccagtttagtttggatttcagatccttttgtgggtcataagcgtgatgattgggtttccatgttcacgtgtgagatatgcctccctcaaaccttgttacaatgacatgggcaccttacctatctgacatgagaaaaacaaatgtggatttcagataaacaaaaaataactcttttagtgtatatgtcccatagaatatgtggacatatttatcctaaaaatattgtatgggacatagttgtattaagaaactgttcattgtttatctgaagttcaaatttaactgggcatcctcctcagctgagctccatgagttctctgtgatgcctttggtgttaactgtccactggagatagtgggtttccatctatgtgaaagggatagatgaaattttctttttgcaggtagaatatgacctacttagacatcaattaggttggtgcaaaagtaattgtggtgtcggaccatgaattttaaatcattataactaggctcatgtcatattttatgtgacatggcaatcctatggaggagggaccaacatttaaaataaatggcttccctaggatagagcactgggactggggaaaacagaggccacagtcagctgtgactttttgaaggaaggaataaagttggtttctttcatgccaatttagcaattacagacgaccccgtcagaaatctaaacccgtgactatcatgggactcaaaaccaggaaaaaaaataagtcaaaacgattaagagccagagaagcagtcttcatacacgcggccagccagcagacagaggactctcattaaggaaggtaagagcgttgccttctcgccataatcatagtcctcttctcccagaataggatttgggaaattc

SEQ ID NO: 41502 - DNA, 2300 bp, Homo sapien
tatgtcttcattgttcctgtaagtttctatgaagagataactgtgttatctcttcctttaaatggaacataaatatctgttgacttcataactaattggtaattaaaagatctcaaaatgttttagggcatgtttagttgtaggagtatatgttttcatttagttctaggggtatatgtcttcatggttcctgtaaatttctacaaactgcatgcaaaatataccctattccttgtgtagtgagacaactgagatgcaagtaaaaattcctctgtggtttgccatatgtgcaaataagaaatctatgatttgatattaacaagtacaccaagttcggtgaaagaggtatagccatccacctgcaagctctggggcaaatttgacaccgtcatcataatagtagattatactatgaaaagtttagtcctcactgaatacttaataaaaatccacggtagggacaacattgttccaagtcttcatagttacaatagaagttgaagacgctctctagttctagacccacttacctggttggccagtccactgcttgaccatcagcatttctttcataagtaaatttggcaaattggaatgtgtagtttctaataaataccagctacactgtcccactacatcattgtattatttctactctcaaattgtttaatctgggttatttaaatacatattttccctacttggtcaattctatgaatttgaaattatatagatattcctaatatgtaattgttaataaaaattatctgtgatcattttttcttaatctcttaggttgaactgtcttgccatttttgtggataaaaagcatatcagcaatttcatatggtttaacctaatagaagaaatttaaggggctctgtcttatttttgtcactcagtagccacaaggaattatcttgttgtgacccacttttgcttttattgtttttgtttgctcttctaacagaagaaagtgccctttaggaaaacagtcccctgacactgaaattaatgaatgtatcgaacttggggctgataaaagctaatggtgaattagtaatttataagtacagtttttttttaattatcacatggtataaacattacaataagacttttcattaatctgagatttttcctctctattcggttgtagttttgtttcagaaatctagttctttttcgcagtaattttttttaaatagcttaaattattttaggaaaaaagtatattgaatgaattggagaaattcagtataattttacaaaaactaagatgtagttactaatatttttgttactgttgttgacagttcactaaaactttagtaattaaaccaagctagtttagttgttagtaattaataattattttggccatttgccaatgttaccaggtgaaatgaaatgagccacacaattatgaaaggaaatagatgctatctgtggagatggttttattaaagactactaaactgatattaagaatgtgtacttcattttgtttaggtctttgaatgtgttacatatagttgcagtccttttagcaaccccaacagcaataactaaggtttgttaaattgtatagttagcaaaccaaggcaaaggtataacagttctccaagagtgtgtttattcacctactgggagactgcctgatgaagcatttcttaaaggtgatttgacaacctgtgaaatctagggtgagtttccagatctttgtcattctgggctgaaagttaatgatgttaagaaagtacccgaattataaagcaaactgaaaggtggggatgtgggatgaaaccaccaatgttgaaatttcagcttcttttatactaagcctgaagttcatacatcatagcaagtaaatatattttaaaatataaactgcagagcttttcttgctttttactattacagagaaaaataattgtgaattcagtgtgtgttaaaacaacttctgttaccacattttgggtgttttatattatgtgttatcaagctgtgtttttgtgttttattttagcttatttgcactaatcttgatgaactcagggaattaatcacaaaaatcgagaatgaactcaaagatctggaaaacagtagaaaaaaatcggtaggtgttgatccaaaagttctatctattattgtcagcattaaaatttattcctgctttttcctaaagcctttttgaaatcttgttttcctggattacatgaaaatttaccatgaaagatagaaacattgtttcttttatttctcctgtgtggtctagttttcatttttaatagacagaa

SEQ ID NO: 41503 - DNA, 2300 bp, Homo sapien
ttcatgggactatcaagggtgacctctgttgtgcttataaatgaatacaaaatcaaatggcgctttttttttaagctaatcagagtagggctggtggggagaggttgaggaagaattttatttcctccaaattactgtttttataaaaccttcccatacataagtcagcaagatcattcagttttttcttgtgaactttaaaaaatggtaaaggcagtgtatagaggaaaggcatcttggcattcaaattcatgagcccccttcagcaatacttatggcactcagtttaggaatcaattactagctgtattatagagatatcaagaatttaatcacttctccctgagtattgcttatttaagcagcccacccacttacctatctttgtaggagtatacttctgttataaggtactgtgtaagcacagaagtaaataacaatggtgaataaagaaatatatgttgggttattttaatttaattgaaagcagatgtcaaatgatacccgtcaatacttattaaaataagacagttaaacccctgtgaacctcagcaactcaaaatttgcagttcagtcatagtatacatggatttcattgagccaaaagttagaaattttataaattacagttctgcgatatgattaaaaagtaatacaaaaaacaaattataaactggaattgtgtcaattgagttgacatatttcttgcaagatgattatatttatataggaaaatgtttggaaaggagcattaggattatgtacagcaaagttactttatgtacgcattcattttcccttttgaaaaaaatattgacatttaagtggattttagtctgcaaatgattgtgaactaaaaatgacagaaaagtattgctgaatattttttgtgcccttgtgtagattgtaagctcctagaggataggatttttcttttttataattttttacttccttgttgtccccgtagcttgtacagtgtcctgtatctagtatttgttgagtaattagcagtttgttaattgattttgctaattacaaattgggggaaaacttttaatgtgtttctaactaaaaatagaattttattttattattatttttttttgagacagagtttcactattgttgcccaggctggagaacaatggtgcgatcttggctcactacaacctccacctcccaggttcacatgattctcctgtctcaggctcccaggtagctgagattacaggcacgcaccaccacacccggctaatttttgtatttttagtagagacggggtttcgccctgttaactaggctggtctcgaactgacctctggtgatccgcctgccttggcctcccaaagtgctgggattacaggtgtgagccaccgcgcctggtctaaaaatagaatttttatgcatgtatgtatttttttgtcacgttaaatacaaaaagtagatatatttcagtgtatactgtgaattggctctaagtatgaggtttatttttttccagtggtttctgattccacaaataactaggtgcactttaaagggagatgtttatcttcttttaaaactttgggtattgataccgccaagggcagcctattaggtgagtgcagagctaaaggagtagaaaaactttgttacctaagctacttaaggggattttcacattaggctggctagagaccatagtcttcagctgtagttcttatgcaagttcctgactgcgaagtcaatgttaaaggtaaggtttttttccctatgtagtctcatcttaagttgcaaatgtagattttaattaagcagtagtaatgtgacttttttgcctaatcttgcagtagattctaccgtataacacattggagatggtaatcgttcagttcatataaacataaaacagcatttgttaatatgtctgttaacaggtagttaatagtttaatgtttgcttttactggggcttgttttgattcatcatttttatttgactcactagcagccatctgttagttacaatttaactttcaaggatctgcgtaatttgttttttgttaatgaagtgctataaacagcattatgaaggttttctcttttaatcttgaaaggaaaaaaatccgtctctaaaaaagcaatcacaaagaagaggaaaactgtcataaagtcacctactgtaccagagtttcaggtaaatgtttcaactttgtctcgaaatttttcaattttttgtttcagtgttcatatcattcctcgagagtttggctgaattccaagaaactgtagcacacttacttgtaatgaaatgtt

SEQ ID NO: 41504 - DNA, 2300 bp, Homo sapien
gctgggattacaggtgtgagccaccatgctcggctacaatgtaatttatgagactacctactttgtctatcatctggttaatgtaaaagctacgactttctaatttttgtgggtatatgcggcagcactttacaaaaacaaaattaaggctgcttggaaaagtttaagacagaatttgcagtaagtgaagcctctgatcatgctgcaaaaccaagagtagttaatggggaagcaatatggtgaaaagagcatcagtgtcactttcagaagaggtagaattgagactcaggtgtgtcatcctaggcaaatcctgtaacttcccttagtttccacttctcacctaaatttagtattatatctatcctagcaatctctcaattctgtataagggtcaaaatgagtgtggcaagtgctaatacaaaagtaagacctaatcattgttataggaatgaaacttgtttttgattgacacacctgcctgaattaaagaaacaaactggccaggcgcggttgcttacacctgtaatcctagtactgtgggaggccgaggcgggtgatctctcacgaggtcaacagatcgagaccatcctgaccaaacatagtgaaaccccgtctctactaaaatacaaaaattagctgggcgtggtggcatgcgcccatagtcccagctactcaggaggctgaagcaggagaattgcttgaacccaggaggcagaggttgcagtgagttgagatcgcaccactgcactccagcctggcgacagagcgagactccatctcacaaaaaaaaaaaaaaaaaaaagaaacaaatttagtttcatcaacatttgtttcttggaataacctcagcagcttcccactaatggttagttaggattctagttaaccgcatcccttcatatttcagtttagacaagatgcaaggaaaatcttgagtaacttgtcctaggatacaaaattaatttagtgacaaggccaggatgcaagtctgtcttctgattattagttcagatcactttctaccatactttactcagttgtctttcccattctttattataaccaacaggccaggtgattctgacacacaccagattttgagctaccactctactgcattagatgtggtagtggggaagtaattattattttattatcacacttattattttataaagctttattgtagtattatttatatgccatacaattcaccaatttaaatttaacaactcaatggtttttagtataatcacagaattgtgcaaccatcacaattaattttagaacatttcatcactcagaaagaaacaccctatttgatagcagtcattctctatcctcccctccccccaacctctggcaaccactaatttctgttatacaatttgcctgtttggtacctttcatacaaatggaatcatacaatatgtggttgtgactggtttctttcacttggcatgttttcaagatagacttattgttttaaaattatcaaagtaacaatatagtttagaaataaaagaaaaaaatcactcataatctgaccagaagcagtggctcacacctgtattcccagtacttcgggaggccgaggcgggcagatcacctgagcccaggagttcgagaccagcctgggcaacatggcgaaaccctgtctctataaaaaacacaattagccgggcgtggtggcgcgcgcctgtggtcccagctactgggggaactgaggcggggaggatcgcttgagcccaggaggttgaggctgcagtgagcagggatcgcgccgctatactccagcctaggtgacacagccagaccttgtatccaaaaaaaaaaaaagtcatgatcccattctaatcaatgcttttcttctctcgcctgcaagtgcacgtttatcttattgaaaaacaaatggaggatgccattggcctccacacggctctcacctctctccaaaacctagctcgcagcctgccagagcgcagctagagtttctgggcagaggagggagaagcaccccgcccatccccgccggcgcctcgcctacgtcactgcttcgagccgcagaccccctccctccttcccggtcgcggtagctttgacagagcgcaatggcggcaaccgcgtctgcaggggtgccggcgaccgtgtcagaaaagcaagagttttaccagcttctgaagaacctgatcaatccaagctgtatggtgcggaggcaagcagaggaaatctatgaaaatatcccaggtctgtgtaagactaccttcctcttagatgccgtcagaaatagaagagcaggt

SEQ ID NO: 41505 - DNA, 2300 bp, Homo sapien
caagagttatagttcatgactgctgggagaaaattgaataatttttagaaattgtttcatccaggccagacacagtggctcacgcctgtaatcccagcactttgggaggccaaggggggcagatcacgaggtcaggagatcgagaccatcctggctaacacagtgaaaccccgtctctactacaaaatacaaaaaattagccgggcatggtggcgggcgcctgtagtcccagctactcaggaggctgaggcaggagaatagtgtgaacctgggaggcggagcttgaagtgagctgagatcacgccactgcactccagcctgggcgacggagcgagactccatctcaaaataaataaataaataaataaataattgttttatccaaaaaagagcataagccagggggacaaaatagcagagaaaaaaagtaagatagtagaagcaaattcaaatatatcaataattacaatagatgttccagttcaaagacaaattattgtcaaactgggaaaaaaaaccagtatactacttatatgtgacacatctttaatgtaaggacacagaaagtttgaaagaaaaaagatgaaaagagatacactatgtgaatactaaccaaaagaatgtttgcaaagctctgctaatggagaaagcagacaaatggacaaagcagactttaaggcatgaagcataattagagataaaaagagaaatttttgaaataatgaaggagggttcaatatacataataaagatacattattcatcctttgtaatttcctcagtatttgcaagaattcccagagtagagtatgctaatattcccttggctgttacttgtcacccctccctcctatttattgcacacagctcaattcctgattcattcttgtcatgttggcatcctgtccgcttgcttcactgctttatccaaagggcagacatagccatctttcttcattactcacaaatgcaacactatggcttgtagcagatgattgctcaggtttggggatgattaaaggggattactgcacagaaaatgaaacaactttaaacaagataacagagttccttagttgttttttccaaaggggactccatcatagtcacattttcccaagcctggtcagccatctgttgctgtctcattttctctttcccctggattccagaaccctaacattctatccttcaacatgccatgagaaaaactaaaaaattcctatttcattttacagtaaacttttttctgctgcccctttgtttcaaggtcacccttctaatcttgtagattgaatggatgtagaggcttgctagggtaacagtccatcacaatatccttctaagtacagcagcagtcttccttccaatgtgtgatcttaggatgtggaatcagtccaagtcttaaaagagcattacttcatccctttattttctgctacagatgccaaacgagatggagagagggtgagtaggagcaaaatttctcatgaggtaagaagaacaacttctcatgggatctatagtacaggatttgcttttgtgataaagtattatcttctgcgagatttttgagatgaatagaaagaaaagatgaacagtggggagcaggaaagcccgtcagatatgttggaatacagagtatttcagagcttttatttgcagacgagctgcttattactgataggccaaagggggtcgcaaatttctattataaaggaatttggaagaatacactgatctcttaatgaagtttgtaaattaagaagccaacggccaaaagtgaatatataaatggcaacagaatttcaaaatggacagtgctgaagttgaagtttaggagttcaactccaaagagagccaaaacataaagtttaggggcagaagaagaatcataattgctggtttaaaatattcagatggagggaggacgcagaaagtagtgagccttagatgttgacagaattgtaactctgttggctctttacatgagatttcaagcctgctaaaatctcacccgcccagatctcccttctaaggcaatttgggtctctgccaaactttggctaataaaaagagtctacagactcctccgaacacagagctgcagctcttcagggaagaaatcaaaacaagatcacaaggtaagactgaatattctgggagatttttagtcagattttgcaaagttaaaccttgggaaccatggagaactgtgtttttttttttttcctgaaaaataaatgataaggccaatttgttattattgctaatagcagtaaaagtcaatgacaatagct

SEQ ID NO: 41506 - DNA, 2300 bp, Homo sapien
agaatagcaaccctttttcagggcccctctctgcagcagagagctttctctccttctttcatttattaaacttctgctctaacctcacccttggtgtgtccaccttccttgatttcctcagttgtgggaccaagaactccgggtggcatcccagacaatgaggcctatttcaatgctatcattccttctgtaatgactagacccctccctattcaactagcctcactagttttttagtgactctgctttctggcacaacaggatgttccatgttcaccactactttaccagctccagatctggagcagctgttcctttcggtggagaaagtactaagaaactaagatatgggcacactgatattgctgactcatatttaacattccataggttttctcatgacttcttttatgtttgtgtctcctttcccctacagtcaaaaccatgtaacataatgtatctacttatttgctctatactaaagtataacaaaacagtctcagaacttcagtaccagtatttccactatctacaaaaagagtccaactttgtaaaatagttgaagagatttattctgagccaaatatgagtgaccacggcctgtgacaaagccctcaggagatcctgagaacatgtgctcaaagtggttggtgtgcattttggttttatgcattttagggagacatgagacttcaatcaaatacatttaagaaatacattcatttggtccagaaaggtgggataacttgaagcgtggggtggaggggttcagctgggagatgggtaagggataaaagactacagtcaactgggatcaataaaaaggaatgtctgggttaaaataaaggattgtggaaaccaaagttcttatttgcagaggaagccttcaggttgtaggcttcagagagaatagattataaaatgtcaattctaatacagtggtatttgtgtatctaaacatatctaaacacagaaaaagtaaagtaaaaatatggtatgaagatttaaaaatggtgcacttgtattgggcaattaaccatgaatggagcttgcaggactggaaaatgagtctaggtgagttaataagtagtgagtgaatgtgaaggcgtaggtcgttactgaccacgactatagacttcatgatcactgtacacttagactacactaaatttatttaaaattgtttcctttttccataataaattaaccttgcttactataacttttttactttataaacttttagtttttttaatgttttgactcttgtaataacacttagcttaaaatacaaacatcatacagctgtacaaaaatttcttcctttatatccttattctataagcttttttctattttaaacatttttaattttaattttttactttttacgctttttccttaaaatctaagacacaaacacacacaccctagtctaggcctacacagggtcaggatcattaatatcactgtctttcacttccatatcttgccctactggaagttcttcaggggcaataacatgcatggagctgtcatttcctataacaatgtcttcctctggaatacctttttgacagaactgcctgaggctgctttacaattaacttgttttttaataagtagaaggaacacaatctacaataatgataaaaagtatagtatagcaaatacataaaccagtaacatagtcatttgttaccaagtattatatactatgcatgattgtatgtgctatacttttatacaactggcagtgcagtgggttgtttacaccaccatcaccacaaacacgcaagtaatgaattgttctaggatgttatgatggctacaacagcactaggtgataagaatttatcagctccactataatcttgtgagaccaccattgtatatgtgcaatccattgaccaaagcctcattatgcagtgcagagtaccatatcctagcatgaatgcatagttagaatactacgttcaaactttactgaaataattatttcctctatatggttatgttaccaatttggtagtgagctagccacagttgtttccgtttgtttttaagttgagacaaatgaactaatattatattttaatccaacagaatactgaaaaatgaagcctaaaatgaagtattcaaccaacaaaatttccacagcaaagtggaagaacacagcaagcaaagccttgtgtttcaagctgggaagtaaggacttaagttatctctgaatgttttacgcactatttttatctgttatcaaatatttatactccaatgtttatacatgctatcttatc

SEQ ID NO: 41507 - DNA, 2300 bp, Homo sapien
catttccttttctccatagccttcttaacatctgttgttttttgactttttaagaatagccattctgacaggtgtgagatgttatctcattacagttttgatttgaatttctctgatgattagtgatgtggaacattttctcatatgttttttcatatgtttgttggccacttgtatgtcttcttctgaaaagtgtctgttcatgtcttttgtctatttttttttttttttttttttttttttttttttttttttgagacggagtctcgctctgtcgcccaggctggagtgcagtggcgggatctcggctcactgcaagctccgtctcccgggttcacgccattctcctgcctcagcctcccaagtagctgggactacaggcgcccgccactacgcccggctaattttttgtatttttagtagagacggggtttcaccgttttagccgggatggtctcgatctcctgacctcgtgatccgcccgcctcagcctcccaaagtgctgggattacaggtgtgagccaccgcgcccggccacattattgatatatagaaatgatactgaatttatatcctgaaactttactgaagtcatttatcagttccaggagccttttggtggagcctttcgggttttctggatatggaatcatatcatctgaaaaagaaataatttgacttcttattttcctatttgaatgacagggtatgtcttgatgtgggatctggcaactaagtgtctgaaaagctcagttttgctatgagaaaaaaaaccattctctgtcaaaaggaatcaaggcttaataaaagatttcatagtatacactgaaggatgaggaagcttataaagaaaataggcatcaaggttggtggttgaaataatacagagaagtaaaatcaagtgcaagttcagatttggtgatttggagtctcaactttgaagagacaatgtgtgttctatattatgtagcataattcagggatttctttaccctttagtctcaggtttgaaagaggagttctgattcagagtctgggagtgttcctgaaaccactagtgtttctacaggcaatagaggaaaagtctaccctctggaacaaattggtttttagggagtccttgctgcccttttcaggcctttaaacacatagccaaatcctccatcagccttcatgtttacaagaacaattctcactttttaacttagggaaacacaccactcaggacaaggcaataataaacactactaaattatgtgaaagggttatagaacataaactcaaaggagggctgaagttggtttgaatgcacagctggatgcttcattgtagccacataggcatgagtagggcaaactgctgaaatttgctgaggatcaaattatgttccacaagatcatgctcgcaagaattacaagaatatccaacaaaatcactagagtctaagacttgctcaagaatattctctgagaataggcagccatagaatgagctaagtgaagctcgaccacaagacctcactggattaacgtcctgatttttccattgcataagtttactctcggcagaattacggttggggggaggttggggtggcaggttggcaggggagagtggatccacactctgatagatcctatttaactagttttactttactgtgcagactacctcccacaacaggtaaccttgaatgtaggcagacatgcttccagaaatgtgagtggaggtagggcggaataaagaaaatgcaactgcaaaactgaaaattcatactagcacaatgatgtttaaatgattttcaagtgttggagctggtgtggtggaaaacagttgcctgacgctttggtttgaaggccagggcttgtcatttaccatgtcaggagaaattcctctcttttcgacaataatctctgcactgcctacctcaggaggtcctcgcaatgccaaaatgccgccagtgtgggttgcgcctcagctgagcactgattctacagcctcgcggtttgggcgggaagtcccacctccgcaaccctgaccagcccggctccccacccccaccacccggaagtgaacaccacgagctagcgtgtctacttcacaggccaggtcgtcaactcaactgtcaaggtgtccattgtaccagctgggccatggatccctcccgcctgaaatctgactccacctgccaagagtctgagcctgcaggcctagatttcgactctgctggccaagattatttctctgcagcccaataattcgactctttctaccaagaattggacctggactctcttaac

SEQ ID NO: 41508 - DNA, 2300 bp, Homo sapien
aatagtaaatagcataaccttataataaatagtttcgccttattgaggtaggtagtaagtgtgctttaggtagatttggttggtgcaaatgtaattgtggtttttgccaccgaaagaaatggcaaaaccccaatgacttttgcaccaacctaaatatcatctcatttacatatgtaataaatactcaatatttgctttaattaaaataggggtagacaagtgaattatatttagaggttctaggtgactgaaattttcacaggggcagaaacccaaaatatgtatgtgcagttaattttttctgtctcttctgtgttgggccatcttttttttctctttttttttgagatggagtctcactctatcgcccaggctgtagtgcagtggcgtgatctcagctcactgcagcctccgcctcccgggttcaagcaattctcctgcctcagcctcccgagtagctgggactacaggcaactgccaccatgctcagctagttttttaatatttttagtagagatggggtttcaccatgttggccaggctggtctggaactcctgacctcaagtgatccgcccacctcggcctcccaaagcgctgagattacaggcctgagccactgcgcccggcctttctcttctttttcatgatatactactggatttgtctgtgcttgtaattattttagctgtttattagtttattacaaaaaaatggtactgtacctttatgggaataattagcacctatgtgaatatttaagttaccgattttggcaaatgtgaagtccaagttgtcttgttttgtttacgtttatatcctctctcccttcttgagaagacatattttcatttaaaataaacccacttggccgggcgcggtggctcacgcctgtaatcccagcactttggaaggccgaggcgggtggatcacgaggtcaggagatcgagactattagccgggcgcggtggcgggcgcctgtagtcccagctaccccagggaggctgaggcaggagaatggcgtgaacccgggaggcggagcttgcagtgagccgagatcgcgccactgcactccagcctgggcgacagagagagattccgtctctaaatacatacatacatacatacatacatacataataaataaaataaaataaacccactcacccccaccccgactccccagctgtagcagggaaggattaagaaggcggggtggggggtgggggaagccctgttaggtagtgctgcgttgggcccacttctgagggtttaatcctagtagggtctttggagttctttcttcggaggcgcgtagctctgcattatttaaaactgtttcccgcaaacccgcaatcccttaggccaaaggcacccctaacgcggaaagtctacgaacggaaatgtccggagttagagagcggcctttcgggcagctgccccgacttctccaaggccggagggccggctgggagcgctgcaagccagagagggcgatcccagcgggacccgcggcctgaggataggcctggagctgccgcctccgccaggcgacgggaaaccctcggaagtgggtttccgcgcgaaagtagcattgcggccaggcgggaaacgtgttcgcgaagcaggagggcccccggggcctttcccgggcgacccgacccgccaggccgcgtggcgggagctttcctgttgagcgcggtggagcgcacacatttccttcagttctttctcggaagtttaggccgcacccacccgcgccccctttccaggattatacaagtgcacgccagggtttcttatttttggtgtgtttttgagaccaaagaaccatatccgctaagcctgaggaggcacccgccccctcagctctgaaacgaggcctcaaaacggcaaccgatgtggtagccgcgcaatcttccgaaacccaaaggctagagggcgtgcccagtggccaggtgcaggcggtggggcaagtaacggcttttggtagccccgcccctccgacccgccctctccgcgcctgcccattttcgttccctcgggtctgtaaccctctcccgggccgcttcctctttaaggcggagcccggcgtggatctcgcgagatccggcttggcgccgtgacctccatgtgggagctccagctctataagtaaacactctgcgcggcgcagacatggcctcttcctatctttgaggcggtgtctgcggcagcgcctcagagtggttccggtcgtctctcctcaagtcggctagtcgggcgcgcgcgctgagagtcgtcgccgcctgtcgggcccggc

SEQ ID NO: 41509 - DNA, 2300 bp, Homo sapien
tatgatggaccttaacattgattattttcatttttactgtgttgtctacaagagactaaatgtctttaaatttgtcagtgattagtatgggagaaatgagcctatgtttatttaatacatgaattaatttatgtaatgtataacatgctccatctctgattgtttgtcctacccagcatggttggctcttaggtttttattttttcctaaactgttcattcttgtgtaatattaaactttatgtctttcaagctatttcattgctaccatgttcattacatacagtgcctttggtcaaatgtacctcttctggtagtgacagttgatagtttttgtttagtctgtattctttctaccctctgtcattttgtggtttgaaacctttttatattttcagtaacttatttctaagttcctcacttacctttgaagttcctgtatacctgtcttgtcatttatatcaaggttcatggtatgatggcaagaacataagcttcaaagtcaagatgtcttcaaatcctaaccttacatttcattagctttaacctagaggaagttaatttctcagagcctttgtttccgtattttgtaaaataggaattaaacttcttagggttagacatatctaagtaaagaaccttgcataatatctggcatactgatatttaacttacttctcccacgaggtatgccatctattagacaccttaagagtggtgtcttctcccttcaaggaaaagataacttgatgaaatagtgatcttgtgttgatttcattttttcctttttaagggcttaaaaagaaagttgaaggaatttctcttggttgttgtcctaaaagggctctggccatttttttttttttctttttgagacagagtcttgctgtattgcccaaactggagtgcactggcacgatctccgttcactgcaacctccacctcccgggttcaagtgattctcctgccttagcctcctgaatagctgggattacaagcatgctccaccacgcctggctaatttttgtatttttagtagagacggggtttcactatgttggccaggctggtcttgacctcaagtgatctgcccctgccttggccttccaaagagctgggattacagtgtgagccaccatgcctggcctgatcttttaaacagcgtttaaaaggagaggatttgttttttaaacctttcatttcataactcttaattctctgatacacctgttttttaatactccttccttttgtcagattgcatgggttagttgtggatcagccactggaattgactacctccattttgtgtcttacgccctgttcatttttatattttatctttgttctttgaggtggtagataaatgtatttgcctagtgagttactaactagtgatcgaacttcaccattttgtatagatgggttcattagactcttttttttattgtgcataattctctcattttcaagttttgttttctttttaatactttactgttttctggttggactgtgtaagttatctttaggattatgaagaaattaatggaacagattagtcatattagcttaaagtcctggcttttcattagtgtcattcttactggatgacttgcaagaatgactcttaggtacaaaagaataatattttcaaaagtctagtgtatacgtcagtaaggcgtaaagaaaacacctatttcattgaaggaaatgaggaagaaagttagttttcatcttagtcaatagatttaagatagcacaaatcagaaagaatagttttgatctaatcttattaaccactttaaacatgagtagctgcaaatattgtttaccatgataacccacaaataacttgagttacattaaggtttttgaagcagtagacaaaattaagcttcattaactgattttaaactttttttaggtaaatgaattggtggatgccagagatgtcggccttggtgcttggtttgaagcacacatacatagtgttactagagcttctgatggacagtcacgtggcaaaactccactgaagaatggcagttcttgtaaaaggactaatggaaatataaagcataaatccaaagagaacacaaataaattggacagtgtaccctctacgtctaattcagactgtgttgctgctgatgaagacgttatttaccatatccagtatgatgagtaagtgctcaagctattgaggactttattcatattttcatttgtagaaaccaaagccttctatttcaagattattttaaatagtctttctgaagaaatcctttagaggttatg

SEQ ID NO: 41510 - DNA, 2300 bp, Homo sapien
cggccccaattctcatatacatatatgtgtgtatatatacatgtttttttttggcagaaggcaaataacatccatcaccacggagccaaagggatctgggaattattgttccctggcttccagtccctctgatacatagaaacaacatagacaggaataggaataaatgcagattacctcctccctccaatccttccccacaacccccaccatctggcactgaggagatctcccaacttttatgaaggttgtaatttcaattccaaatggccgaaaaacttttcggagacattcagcccagccgtcctagctcaccacccgcctccgtctgccatacagacattttacctactgttctttgtggtgtattttcctgccctcttttccatctctactttcctgcctctctggatagtctgtgcctcctgggtacggagcccagaatctgttaagggtgattggaggaggaaacttagcagataagcaagaaagagaacaggttttattttcccctagtctaagtacaagtaatgttctgattacttctgtcctctcttccccatattagaacaactggaattttaaaagttcattctcttgctaaaactgtcatgagacagctggagatggtacatttacaaaaaatccagttctagatggctaactttcaaagtaagacgacagtgaacaatgtctatcttaatatcctttgtacttttgctgggcgcagtggctcacgcctgtaatgacggatcacgaggtcaggagatcgagaccatcctgcctaaaacggtgaaaccccgtctctactaaaaataaaaataaaaaatggccggccgtggtggcacgtgcctgtagtcccagctactcaggagcctgaggcaggacaatcgcttgaacccgggaggtggaggttgcagtgagccaagatcgcgccactgcactccagccagggcgacagagcgagattccgtctcaaaaacaacaacaaaatatcctttgtagttttacacacacacgtatatgtatatacagtacatatatttaaaaaaacatatacacacacacacacagttcttttttttttttttttcctgagtctcgttctgtggcccacgctggagtgcagtggtgcgatcacatctcactgcagcctgaaactccctgactcaagcaatcctcccacctcagcctccagagtagctgggacttcagaagcacgcaaccacgccccactaatttttgtattttttgtagagacagggtttcacaatgctgcccaagctggtctcgaactcctgggctcaagctatcctaccgcgtcggtttccgaaagtgttgcgattacaggcgtgagccatagcgttacatgtggtgggggggaagagagagaaagagagagagtgagaagaaggaggaggaggaggaggaggagaaagaaggaagaaagaaaagaaaagaaatatagagagggtgttcaaatctactgttcaagtgctttccatgtacatataatctctttttaaaatcccatccagctctgttgagatgagaaaactgaagctctgagaggttgagtaactttatcacgctcccgcaaagataaaagaaccgccatctgcccatattaatttccctgagatgaaatgtgacagagaaagatacctcaaaattaaggaaatggagagcttcgagaatcatcttccatctccgccgagtcccccaggaacttggcccggagtctttgggctgtcccacctgatcttgccccagtgcggctccacaccctggcgggcggcgtacggagcgtcccggcccccggcaccagccagcgtcggagtgggtaggactggagatggcagcctccggtccaggggaagcgggactccacggaagggctgggaagagggtaggaagagggggcgggggcgggaactgttccgccccctccccctctgtctactttcattggccaagggcttcctggccccaacccacctcccgcctccagggcgccgcttaaagtgtgcggagcaggtgccttgggtggagccacaactttgcgcgagtgtcttggttgagcgcagcgcccattcattgcccgcgagcgtccatccatctgtccggccgactgtccagcgaaaggggctccaggccgggcgcagccgccacccgggggaccgaggccaggagaggggccaagagcgcggctgacccttgcgggccggggcaggggacggtggccgcggccatgcagtcctgtgccagggcgtgggggctgcgcctgggccgcggggtcg

SEQ ID NO: 41511 - DNA, 2300 bp, Homo sapien
gagaagctgatactggctctgtgtgactttgagcaaattactcaatctcatagtgattgagcaaatcactcaatctcatagtgaggcagttagtttatctgtaatatgggactattcactgggtaataacttcactgagggtaataggtgctaaaacctgtggagcacttagaacagtgctggacaaatactaaattctgtataaatgttggcaattctacaccactttaacttctgagatggaagccttatattgtataccttattagtaatatactcaaggacacatgtagggcatgtttcagttttgtggatattgaaatacagggaaaaccatatttttgactcgcaatattcccatgttttcggcttcattatattcccacaatgtccttccaaccaagtaaacatgtcaaaactgtgccaagaatacttccctgggatcacacaccactgagatatttaattattaaagaagctgaaatcaagagtattgcagtattaaaacaggacacacacgaatcaaagtgtaacataattttaaataaaaactatgcaattagtctcagaccaaatccattaatgagcatatggagttacctaacattttagtataaaaaatgttaggtcaaagccccggatgaccaggctgcaacactgcaaattgtttataaagaagtgttttgaaggccgggcgcgctggctcacggctgtaatcccagcacgttgggaggccgaggtaggtagatcacctgaggtcaggagttcgagaccagcctgaccaacaaggtgacgcaccgtctctactaaaaatacaaaaattagccgagcgtggtggcaggcgcctgtagtcccagctactcgggaggctgagacaggggaaatgcttgaacctgggaggcagaggttgcaatgagccaagatcgccccgctggagcgccgctgcactccagcctgggcgattgagcaagactccttctcaaaaaaaaaagtgtttccaggaagtgtttccaggttgggtgcggtggctcacgtctgtaatcccaacactttgagaggccgaggcgggcggatcacttgaggccaggagttcgggaccaacctggacatagggaaaccccgtctctaccaaaaaatgcaaaaattagctgggcgtggtggcacatgcctataatcccagctactcaggaggctgaggcacgagaatcacttgaacccaggaggctgcggttgcagtaagccgagatggcgccactgcactccagcctgggcgacagcgaaattctatctcaaaaaataaaataaaataaaaagccgaaggtcttcagagcacctaggaccagcggaggttaaagcttatctacaacagcttgcagcaagcttgctttggtaaacagtctggggccaggaggtacccacagtcctagttacgccaaattcaggccgaagggcgacctgtctccgtgctcctgacaaacttccagcccccgtttcccatcagagcctcgtccaggtgttcccatttaaaggctccacctgcgcagggcgggtgccacacaatgaggagagttttgcaaacaaacgcggccgttgctccaaggtctcgggtaaccgattggcaaaacctaggtcttcccacttagggaagatggcccaagagcaagaaggcgaaacaagaggccgccggacccgcgaagccccgagctcagaggtcgcccagtgctcggccccgcctctgacgtcacggctcggtgggactcccggagcccggatgcgcgctgggactcggtgcagtccagctccacggtcgcgcgtcccacagctcccttcacgtccgttcctccgtttccccaccttgggagggccaggacttccgaggctttagggggcaggaagctgcgagaaggtggcgcttgcttaggtgaggcgcggaggatggtattagagagaggaacgtgactggaagctccctggccatggacgatcgctgggttctaggcgcctgctcgccccagcggttgacggtcacgtgataccccccagtgtacctttcctgcagcgtgttacgtggcgcacagagaacgtcgcttccagaggaccgttttttcgtaactggcagtagtaatctggcggttgacactctcgttgcctgtataggctgatggcccactcacctttttagctgggctcctgacctgtccggccagaaagttgccactggggtaaggtggatggcgtgggggaatagggaagggcctcagcacagtttctgaacacttcttccacaccggattccggag

SEQ ID NO: 41512 - DNA, 2300 bp, Homo sapien
ctgtctcaaaaaacaaacaaataaataaaataaaataaaaacaagtattgtctctgaggtgatctgatgatctgttcgttagttcacattacatataaacttcaaggggaatctatgtattgttcatacagccttccattaatatattgcaattgggatttaaacaattgaatctaaataaaaaatttactatatggctaaaatgttttcacgataattcataatatggaggtattttgatacattagggacacaagactgccctcagtgccatgagtccagttgattttctagtaggctctcttcactttccaagactgtgaagcacttaatggattcacatagtgctttacagcttttgaagtgttttgacattttacattatcttccttaaaattaaaaagtgctcagtgaagttagcaaggttcgtatatccacttcagttcttcaggttaaaaaaaagtcatactctaattcacaatggtaaagaaatgttatttgtgcatctgcaaattctgaagaaaatggatttcaggtttccagattttttattctggtgcacaagatttctaatatagcatatggcttccaaaagaccctagctgcttgattgtggacatatttcttaaccgctatgcttcagtttccacatctgtaacaatgaggtattaatagtacctattcattgaattattataagtatttattaatacatgtgaagctctgaagacagtgtgtagctcacattactgttctaagtaagtgttaggttgcatatttattattttagcatatccaatttacttgtaaggatggttgggatcctgacgttacatgcacacatttggaaaattcccagttgagtatacgttagccaagttcagaattgtgtgtggccgggtgaagtggctcacgcctgtaatcccagcactttgggaggccgaggcgggcggatcacctgaggtcaggagtttgtgaccagcctggccaacatggcgaaaccctgtctctactgaaaatacaaaaattagctgggcgtggtggcgggcgactgtaatcccagctactcgggaggctgaggcaggagaatctctcgaacccgtgaggcggaggttgcagtaagccgagatagcgccattgcactccaaactgggcgacacagcaagactccgtctcaaaaaagagtgtgtctgtgtgtgtagcggaactttgtttttaacaactaaagaaatatggtgacccaataatcccgttagccttagctcaattaatcacattccatctgtcctcacaatgttcaccccagtgagaaacgagttcaagcgcgtggtaagcggtgtcgatatatttttaaaattctgttatcagtataatgtaacagaaaattcagcatattagcccaactttgctcactggtgtgaagatatgcccaatctttcttagctaagacgttagagaaaacgccacaagggacccagctgggagctctgtaggaagtttaaaaaaaaaatcattcagctttgcaaaacatctgatgctcaaccatctgtctttggcagtacaggggcttaaggtctggttggttccttctgacacctcggaaggcggagttacagaggaaaagcaacaagttgtaggaagttaacttatctagtctcagacgctggaggcacctgcatttctagtcacttcagttctggccaaactgttatcaactctagtttctgagggaccgccagcccaggattcctattggggtcacctttgtgcctccctatcttaagagcacacttgggcgggtcggggcgggacgtgctgggtgtaggtgactcaacaccggacagttttgcttccagaggctgacacgctcctgcgcggtagttgttaaagggttgggacacgaagatactcttcgcctattcgggatctcccattgtgggaaggaggctcagtggtcccggccaccgggtgaagggagaacgggaacacagcgctgtcatcgccggagagctgcgagccccgactttctcgccaggctctccagtacattccgaggctccaccccggtaacgccacgctgacgtccgcgcgtcggaggccgccataggtgcgcgtcggcgcccaggaggacgtgtggcgcgtggactacatcaggtccagccctgcgggaccccagccagcgcttccgggcaaggttctgtgcacctgttttctccttctacgcgagtatctttcccctccggaaagaatgggatatgcctgtgtccaaaggacaagaagatgcgcgccagcaagcctaa

SEQ ID NO: 41513 - DNA, 2300 bp, Homo sapien
tttagtgagtctcagtttaatgaagttaatggtgatggaggttgggagataccaatgctttaattagctaagtcacaacactgtcctactcttaaaagatcttaagaaaataagacataatttcacctttcatatacctgtcaatatcttaacttattcaaacactgacctctatgttgtataattagattcttgaaagattgaaaatgcccggggctcctgataggagtttttgcttttgtatctgccatcacatttcaaataattggaactgacaaaaagataccaaaatactaaaaattacaaaaaatgtaatgaaactgatagcatggattgtcaaagagataccaagacagaatattaaataatgctcttaggcagattatgatgtctttttagttttatggttctgtgtatttgtgtgtgtatatatgtgtgtgattttttaatcagttaagccacatcctcaacctccacttaaaaatgcttaattgtacattgaatctagatgtataaggaaatcacataagtacctaatgtatagggtccttatggggactagtgagaagtaacacttagaccatgaagggccttttacaaacttggctcttgcacctcatggttttcccttttttttttttttttttttttttggagtgacttggagataaagagaaacctttaattatatgaaggatattaagtacgatggtggtgacatgagattcgtgttgtaaagaatcactcgggcagctttggggaagacaaatggagatagaatgaaataaaggatggagatacacattgggaatccattatgatgctgggcaagacaccgtgggcggaggcagtggcagttggtatagatggtaggcagagatcagagtaagactgagggacagaatctaaaagattaagtcaccgatcagatgtgaggacacgaagagttagaagttaaatgcacattgattcttgcacgtctctgataaaatattagtcttcaaaagggcttgagtttaagtacctttattgtcccagaaaagaaaatctacctataaaagaagagcaccaacatttgatcagatttcagatcctttttactcttcagaatgaaaatttgagcttttgatcattgtttcttctgctttccagacctaaccctatgtttttccacaaccattttttcctaaccctcaagtattagttcacaacttacatttagtgaagttgtttttctctatctctcataacaaatgtactgataatgtttagggctaattgtatgcaatttacttttcgaattgtggtaatcattattgctgtttttattttcatcttctcttccccaggcatcatcagctatagatattcaaccaaattatgccctttggggtgattttcaattttctcactttgggaggcatattttttttgtcagtcatgaagggttcagatttggattattaaacgctagtttccacattggaccatttaacactttacatttccttgtctttggaaaacttaacttgcccctatgctgtttgggtgtttttgaagaccacatctaatttaggaaagaatgacctgtcctccaaacccatattctacttcttgatgcacagaaagacctgtcatgcaggagggcaaaacagaagtagcttcaacattcatggattatttataggagcacctctggggtcttttcccgagctctgtgcctgcaggagtatgtgcgaaagtgtttggctttccttgctacaagaaatagttaaacatatgtctggcagtctgtgaccgtagcagtgtgtttcctttaaagaaagtagattacattgccacagatgctgtcaccactagggcccctggaggggtcaggacttgttgatgtaatcagttgtttttttttttttttcttctctagtagctattgttctgtaaattgtgggaactgactgggttacagaatgtgaattgatgttcttctctgttttaaccttccagaaatgcatcttctgcagacaccgggttaagagggtctctggagcctgcatccagtgttcctacggtcgctgcccggcctccttccatgtcacttgtgcccatgctgctggggtactgatggagcctgatgactggccttatgtggtgaacattacatgctttcgacataaggtcaaccccaacgtggtaagatgtgccctcccttcctcagtgctaagaccgtgtctggattttctcctgttttagactacctcccagacataatgtgctttattctgtaatatgactcattgttg

SEQ ID NO: 41514 - DNA, 2300 bp, Homo sapien
ttgataacagataatcagtatagatgaagcagcattctattaataaaagatgccatctaagactttcataactagagaggacaagtcaatgcttggtttcacgcttcaaatctgactttcttgttagaatctaatatagctgatgactttaaattgaagccagtcctcatttacctttctggaaatcctagcatccttaagaattatgctaaggatactctgcctgtgctttataatttgaacaacaaagcctgatgacagcacatctgtttacagcatggtttactgaatattttaagttcattgttgagacttcttgctcagaaaaaagattcctttcaaaatattactgctcattgacaatgtacctagttactcaagagctttaatggaaatgtacaaagagattagcattttcataactgctaacacaacatccattctgcagcctatagataaagaagtaattctgactttcaagttttattatataagagatacattttgtaaggctcttgcagccttacaatcagagataatgatttctctgatgaatctggttaaagtaaattgaaaaccttctgggaaagattcaccattctgatgccattaagaatatctgtgactcatgggaggagatcaaaatatccctaactggatattggaagaaattgattccaatctttatgaacaactaagaagggttcaagatttcagatgagggaagtaacagcagatgtggtggaaatagcaagagaactagaattagaagtggagcctgatgatgtgactgaattgccacaatctcatgataaaacttgaacagatgaggggttacttcctatggatgaagaaagtggttttttgagacggaatctactcctggtgaagatgctatgaacattgtcaaaatgttggataaagggctccaattttgaaagacgttatatagtggttattaaaatgctataaaacggcattgcatgttgcaaaaaaatctttcgtaaaaggaagagtcaattcttgcagaaaatttcattattgtcttattttaagaaattggcacagttaccccaaccttcagcaaccactaccttgatcagtcagcagccatcaccatcaaggccagaccctccaccagcaaaaagattagaagtggccaggtgcggtggctcatgcctgtaatcccagcactttgagaggccaaggcaggtggattacctgaggtcaggagtttgagaatagcctagccaacatggtgaaaccccgtctctactaaaaatacaaaaaaattagccaggcgtggtggcaggcatctgtaatccaagctactcgagaggctgaggcaggagaatcacttgaacccgggaggcggaagttgcagtgagccgagattgtgccattgcactgggcagtctgggcaacaagagcaaaactccacctcaaaaaaaaaaaaaaaaaaaagattaggatttactgaaggctaaggtaatcgttaccattttttgggcaagatgttttttaaattaagatatatatactgttttttagacacaatgctactgcacatttaatagactacagtataaacaacttttatatgcacggagaaaccaaaaaaaaattgcatggcttgctttatcgagatatttgctgtattgtgttggtctagaaccaaacctgcaatcgctatggtatgtctgtatctagcacatgattatgcacatataaaacccaactccttgattcacaggcctctggataggagatatgacatgcccaaggtctcgcagttcatgtgaggcaggaaacttaagagagccagacttctttaaggagactgaaaggtgattcatttagtgagtagcgattacagaatttctaaaacagtgggggcggggggggcggcggggaggagggctggaattgtcctccagcgcatacaaggttgttgctgccagagaaatccagcaggaaagagcagcattctttcaccttttccgcctctgaagcggaggagaacttcatttcccagcagcccttaagattcctccgcgcactgcgctagcgtcccggcattctgctttccggcgctctgccttccggtgcgtcgtttacgccagtttgaaccaaagacgcccaaggttgaggccgagttccagagcatggggtctcggttgtcccagccttttgagtcctatatcactgcgcctcccggtaccgccgccgcgcccgccaaacctgcgcccccagctacacccggagcgccgacctccccagcagaacaccgcctgttgaag

SEQ ID NO: 41515 - DNA, 2300 bp, Homo sapien
ataattgtaaaggatgattttcatcattatctgcttataaggcatgtaagaagtttatgtgttcaattggtggtaatggtttgatactacttggaaaacacttgtctgggaaggtaatgttcactcgacctgccactgcttggaattgggagatcgttttagtcaaattgattggcaaagttaatcaacaccccatgtggctttttctttgttcactataaacaattggtcattggattagaccagttgacgaaagtagtgattttgcccctatatagatgttattttgttatgcaatattgatttttatttttctattaaaatatgctcatggtcccttcttttgcttctccccattcattgtctcctgcaggatcaatatcagttttcctatcgtgccgcactagagtacctgggcagctttgaccactatgcaacgtagaaacccctgacccattctggatttttactacaggcccttcaatatccatggagtctcttctgagccatacagggcacttgagaagtccttcttaacttctagctaacaactacttagtgggactattacacacaaaacaaattaaaaacaaattattccaggtggaccaagaattcacagtttaataatctaacctgaaaaataatgaagagaatcctgactgatgaggcatctgaaggattttatttacagatacctcaaggattcaaaatcaagggaagaagaaatcacagcaaagaaccaccatcttattcaggattgcttgaaaggtgcaaggagaaattgccagaatgctgcagttcagcacaagatatgtgctggtgtggcttctcacaatgaaacggactctgctttgacatcgccccttcccaccatactgctcataataacattttagggggaaaggggagggaatgtttaaaaagaaagtccttgatttagttttttagtattgtaaagatactgctgacctgtgcttcatttctaactgtgtaaacttttttttaacaaaatgtatcattcgataaagtgaattttaaaaaagttacataactcttcatttttttatttccaaatcgtaggtttttttaagctgtagaactgttatctgtaatatcttgctgtagaaatatcaaatcatttgaaaatttgcacatttttgtgcaaaactcaatctacagtatcagtctcgtcagatatattaattttacacttcagttttgattggtgagaaagtacccattctcttcaaataatcaaagataattattattttgttttgtttttggaatcaacagggaggcgcaaagtataaagttgctgctaacatatatacatatatatccatattttataagggtgtctatgtatatatagacagtgtgtccacacaaaaaatagatacagttatcagtcagtcagttcttccatgatttagtttttttaaacgtagaaaagctattgtaaacatctctttccatttattcttaattttttgacatattggtatttctttaaagggaaatgaggaatgcacatcagtgattgattgtcaaacctcaccccctgatttcctacctaatctacccccacctaaccaatcaatcacatccacaaattgttttgtttgtttgttagtcaggcttccaacaaagttcaatatttctaacactctagtgcaataaaaattattattaaatagctaagaggtgtgcatgtgggaaaggtcagtgcatatccctttaggaggggagaatgttgtaatatatcagctatcgagttgtttaaaaaaagtgtattcaatcgtatattgtctatagtatgtgctatgaaatttgcatttatgatatgtaacaggggcaaagccaaattcatgttactctgttcagtcagaaacattttgtggcatacagcattcctgggaagtgctgtactttgtttcgttttggttttagttttgcatttagagtgccttataattgatgcctattttaatagcatttctttttagcttttggttcgtatttccattcactgttcgtatctgttactttctattaaagcattatctgtttaccacatgtacaaaaactctttgaataatatgcattcctagttttcagccaagtcggggatgttagtgattgtaccagcccaaagcacttggataatcagggcccttcttccttttataatcaatcatcaacatcagaaaaagctacttgttttatttatattcccttccaaatccgctctggaacatgcagtaactgcaccaaacttattttagtaacaaata

SEQ ID NO: 41516 - DNA, 2300 bp, Homo sapien
ttttattgtccatttaggatgtctgtttccataagtcagacacggaacattgaaaatgtgttctctttttgctatagtgtctgtagcataaagcagaatatatgttcaaagtaagtaagatactaagccttttactgggtattattatattacatatacaacttaatcttaagttattatctctacagatccctttacatcagaatgtttcaagttttggtatatcatccttgttttactcaagttgagtggttggtgtgtgcactttgaaacagagaaaaaaatactgaaaatggtcagaagtatctatggttgaactaagtccccagagatgcgctacaggatggttagaaaagaatacaccaaaggataaagtccacatttgtagctcagtaaatttaacagcaaacctatttcaagtcataagcagttactagcctctgagaggttcaaactgtgtgagctacactctgttaagtcactggcactgtgtctttgcacatgtaaatatatatatataactttaagaggaaatacaaggagaacgagccctcaggaatcttcctagatacttaaggtgcaaactgtagatgaggctgggggattactctgagaattttagaaaacggaggagacatttggcaagtagcgtactgggaggcgaactggaaacaataaaagtggattgtgatagtcctggttttggagaatggaactactatctggaatcctggaacaccaaattaatgaaagccaagctcacacttggtgttcaagatttttttaagcataagacttaaaaactgacttcacttgctagtgcttttaaatgaaaatcaacgtccagagaagcaatgcaagttttctacacacccacataaaagctacaataaatctatgggaaagcaaataatctttggtttgttcgtggctttctttttaaattgtttcttacaactttgactcttcattataaaagatgcgttcccttccctacggaatgaatgtgtgtgttaagtacaccagattcccgcagctgaactacgagctttgattctgccacgggaaggtctcccaaacaatccccctcctctatggcagctgcgtagactttgattcctgctatttctccttctccccactagttcagaggaaagaaagaaaaagaaatcgccccctcaccgtagtcagccctccttaaaacagtaatccctgcctttaaaaaaggcggtggcaggatccctgggtaagggtggattgccccaccgctccaccatttgcccccaatactacgcccaccctaggaggagagagcgggggtcgcacaaatacacatacccggacacccccattctctagagtcgcctctctcccgggtctgaggtttcaggcgagaagtgaacccagcaggagaggacctctgcccgaggaggtccagaggagcaaactgtgcgctccggtgcccgggcgccgggctcgcggaaacgcgagcgtgtcgctctggctcgggaggcgccggcagccggagccgggcgcagggcgattccggagcagcaagaggggaagacaccgcggggcggacggggtcagttccagggactcacctggtcatgttggccccgggcagccgccgccaccgcctcccgcgccgccgccaacactttcctccagcgccttcgcgccccgccacggccgcgccgccgcctccgggcggccaatttaatcccgcggagcagcggccgccgccgccgaagcccccctggtcgccgccgccgcccagccctcgtgcggccagcccagtccagagcgaggaagtggaagagagtcagcgagtgagtccaaaaacccgaaatccagcatccaaggcagcgcgtccccccgccctccctccacccctacccccttttcctcctcctccgcctcctcctcctcttcccgggccgtcctcttggcccttctgagcccgcggcttccgcggcggtttctcctcctcccgctcctcctgctcgccctgcgcccgcttctctcgctgccgccgccgccgctgtttgtctcctccccctcctcctcctcctcctcttcctcctcctcccgctcctcgatgctccgccgctcgcggctggggggtccggggccgcgtctcctctcctccctccgcctctcctctttcctccttcctgctgcctcttcttttaaagcggattctttggccacaaatagcaactcggctgcccccctcggtgcctccctccccttctcttcttccccccaaaagtgaagcgcacgcgaggtaaccagaa

SEQ ID NO: 41517 - DNA, 2300 bp, Homo sapien
tgcttttatctattctcattcaatgacctttgcttccacttcatgacagccactcactctcttagatatatgctggcaattctcaaaatcagttgtgtaactcagacttatcctctggcttctagaaacacttacccaacttaacatttccatttgattgtctcacaggcatttcaaatataatatgtacaaaatggaattcttgtattccacttaaatcttattatattctcagtctttaccacctcagaaaatggcagcacgtgcactcagttgttcaagccacaaacctggccatcattcttggttccttattttgtcttaccttcacattcaatgcctcaaccagccttttctttgtaccttctaactatatcatgaatcaatccagcatcttttatgtcaactgtcattatggtggtccaagctttcttacaaaatttcacctccgcttccaatcactgtctcctccatctagtcatcacacagcaaacagataatcttttaaaacaaaaatcgcaagagtaccaactctcattaatttattgaatggtttatacatgcatttcatgctctacattaaatatatatttcacatccttccacttttttagagctttattaaggtataattatcatataatatactgcatgcattaaagcataccatttgatgagtttagacacatgtatatgcctttaaaatcttgagcacaatcaagataacaataatatccgtcagctccagaagtttatttatggcccttttaatacctccctcttctcttctcctcccatgtctgcagagcaccactgatcagctttatgtaactcaagatcagttgttattttctaggaatttacacaaatgaattaatgtctccacttgcctcagctattcacatagagtccaggttaatttcttcatttccactcttccaaaaagaaaaaaaaagtgaacaagttcaatgaaaatcactgagaaaatgccaacatcggtgcccagtttttagagttacttataaattataaaactcccgaaacactacaacactttcatggacttgtatctttctcaacgttgataaaaaattatattaataataaacttccatgttgttgttgttgttttgaaacggagtgtcactctgtcacctgggatggagtgcagtggcacagccttggctcaccgcaacctccgcctcctgggttcaagtgattctcctgcctcagcctcctgagtagctgggattacagatgcacacgaccacgcctggctaattatttgtattttgagtagagatggggtttcaccatgttggccaggctggtgttgaattcctgaccttaagtgatctgcctgccttggcctccccaagtcctgggataacaggcatgagccactgcacccagccaaacttcgaggtatataattaaaagtttaataagccctcagcctaattttaaaattcagattctttctttctttctttctttcgttctttctttctttctttctttctttctttctttctttctttctttctttctttcttctttctttttctttctttcttgataacattattatcatagtctggtagattctgtctttctataataaaaatcctgtgatgttgttcaaagaaactcaatgggctttctgtatgtttaccaaggaattaaaatcttaacaaaggttttcaacacaagaaatactcccttttgtaagaattcttcataggtttttctagcacaagtttgtttttattgaatgatacttgatggttctgtatgttatttcttttctactacatataattttgattaggggatacattaaatattttaaaactatcatttctttttccagaacaatcataacatgttttgcttcttgttgctttaaaaggaacattttaagttgcttttttacaacaataagtgtgaaaggaaatgccaaaatacaaacaatttcacttcttgttggaatttgacatttccactagctaagtaatataaacatgcatcacctaaatgagcagtattttaatagcatcgttttcacattttaattgttgtcacatttcttctttgtttagggagacgtctggtgaacacccgtgggatctaaagaacaagtaagatttaaagcatactgggttgtgtgcctggctttcacattttatttattttattgcttaatagtgtttctttactactgtgggttgtagcttaaaattgttagaaattttattatggagtataaggaataaaagtgaacgttcaacactttcaaa

SEQ ID NO: 41518 - DNA, 2300 bp, Homo sapien
gatctcccatagaaggtagattaagttatcacaaacacatacagacattatgtcacactgtctatgctgaggtatattcaaggataataagagatagaacaaaacaattccaatccatggaggtggataagggatagatttcattaaaaaatacatggagaaagaacaactatcatgtattgaaattttttaaatgagcatttaaatcaccaactacagagtttgctcaatatttcttaaattctattggcaaattatacacctattaaacttaggtaggagcctgcagatgaaacctttttttttttttttttttttttgcctatggaatataggttaacagcaaatataaacacccctccatcggctgccttttgtgggagcttctctgtagtatggtggtatttctatgtgacctctaaagtcggatcgcctggttccaaactcttgctcttttacttattaactttaggcatatttaactatagcttataattttaaagtgaggatcataactcttatggatgctggaaagattaaataaattaacatattaagtattaatatttataagaatccctaaaacacaaatggtacatgcctattgttattattgtattaatattattgatattattattataaccttcatttccaaatcctgtgtacttccctccactgcagatgtgactgagatgcatggggagaataggggctgtttcataggattcaacatagattaaatgaaactatgtacctgaagccctataacacagtgacccactaagtggataacaaaaatgatgagtaaggtttcctacgaagctcttgctatgttgtagttgtagttgccatgttcaacctttggaaattcttccaggtatctcagccatcgacccccccttttctaattatgatgtcctagagaaaagcacaataactctaagaccctgcaggtctacagagattctgccttaggaagttgaatgcttccctccacttcccaaccctgaatgtaccaaaaagagcactgggtggagtcgtagctaagtaaagagtgtggattcttttctttacagttaaaatagcaggaagtcagaaatataaaagttcagaccccaaaatggtactgacacttaagcaaagccacatcaatttcactttcattgaatggatttgaaaagctacactgataatcccctgaacattttcagtgtgtagctctctcattcagtatgtttaatccactctcctagatcattatacaagtgttttgttttgtgccatgggaaattctgatcttagttgatgaagtactcagtcacctctaatcttgtgagagccacaaatgacgataatttcaatttatggagtaacctggaatgaagaagacaatatgctgagtctgagagctgaggtagttgtgtttttacttcagatcagcagaaaattttttaaagggaacatcctttgtgcattagttccaactgcattttctcaatttttatcaactatagtcactaaggaatcactgaagaaaaggtaagagctctgaaagttgacttagagaatctgcatagaaaagagagaatcaacaaaatcaacaatgcataatcattgaaaagctatggaagaggtatgaaaggcttagtgaaaacaatgctgagttggcactgaagagctttggagttgaataaggccacctctcaagagctggatgaccttgaacttctcacttctctcagggccactttttcctcatcagttaaaatttgagaattcaaagaagttattattaggatgtctttcatccctaaaattctgtctgtgaaagatgcagaaaattgctacaatgttgcataaataaataggatatgtattatctgaggctgttggcaggaagaattctcttcttttaatgtcctaaacggatttgtttctctgaagtcttcattttactttctgtgttgtgcacagcatccgttctcttttgtggcaattatcttttcctatctcacacttatcacactggaatccagccaccagtttgtttgtctcactcgtggctattatcaattcttgcagttcaggaatcacgtcgaactcccctgtttcccgagtgcataggaaagtgcttagcattgaatgtggagcgatagaatgaacaaagaaatgacaaaatgactaggtggatgaatgcatagcttaatatcagcgaggcaggaagtaaacaaagagacactgagcaccaagtaattcaatacaattcatcatgagaacttatctttaagctcctgttt

SEQ ID NO: 41519 - DNA, 2300 bp, Homo sapien
gtttttaacttataaggggtttttattaaaaagtatgtattatactgagaaagaaattaacagttaaagataaaagggataaactttttctaatcactattagactctagtcagtataagtactaccatgtcaaaaaacttaggatttgttaaaaatcaggtctgttttgtctaagttgcaactcctactgtatctactgtatatgtaacaatgcaagaagaattagattcagaatccatttggcagtgataaagaaaaaaatgctgaaatgttattgattctctccctcttgtgcaaaacaaactgagtcaactatatttttcctgacataacacaaaggttttatttagatattacaaaatattggcaaatgttagactacatgttttttatatatatgtataatgaacttattaacccttttgtagaaagaagagtgtcctacttctgtaaaaagaaatgctacagctactgacatggtgatgttagccccaagaggaatactgcctgcaaaagtttttgatgcagagatattcagccttaggagacaccttaaacctgtcactggctgctgagccctgtcagagtttataacccgctgtgtcaaagtcacagtctcagccctgccctctccaaagtatttttcacattctctctccaaattaagttcattctaattctccaactattctagttccaggattttcctccaattattatctccttacaggcatgaagaaatcgcaacagaattttcatctggtctttcaaaccatccttattaactttcccttttccgccccccccccctttttttttctagagcttttcagaactaaagataaaacaaccaaccaactgaagtcagagtagggtgggagttagcatggattagggctgaggttgaaggtggcaggagaagtgagccagtagggttagatttttcaagctttttctagataaccacccttaaatcttagaaccaaccaatgtttaacaaagcaggcttccaatagcccttgaacaataaacgtttaaaaatcagttttccagtaaggctgcccatactgatcccatatcgaagtcttctaagggctcttccaaaaaaaaaaaaaaaagaaaaaaatgcttagcgaaccacttctcaaataggagctactgaagttatataagtcaagttattcccaggtaaaatgaataaactgtccacagcattggacattgggcattgaaaagcatcagcatatgcttcactttagagaaaagaaagacagaagcacagtttacttactaaagcagccgctccagtcctccttggaaaccctgaggagtcttctcttttctttcctaccagtcaaataaagaattgtctttctattccacacaggcccagaataaactgcaaaaagggatggcacatgcacagcagcccgtcagggtttggctttggtggggtgcttcgatttctgattgtttcaaaagtgggatcttcttttccggagggagggggcaaaggaagaaaaagaaagcgcgctcggaaagccggcttgggtcctgctaattattctgaaggcaaagtacctgcactctccccgccgaggctggctggcggcgccgcgccggaggggaggaggctcgggaggaggaggagaaagagcagcgggaggactcgggctgggaggggagcgcagggttggggaggccgatgagcggctcccggctcctcggagaagcagccgagacggcaaggaggaggcgaggctctgtcggggcgaggcgctgcccccacgcgctccggccgccggctgcgggcgcggctgggcggggagccgaggcggccgctcccgcactcgctcgctcgctcgctggcgctccctcctcgtctcgctcgcactcacaggcacacaccccacgtctccagcagctgccgctcggcctcacgcactcacctgcatttccttaacgagccacttgatggctgccagcggcgtgggccccgctccggcgggcgggggccggggcggggagaacgcggcgcgggatgctccgagcgcccgctggggagagaagcggcggcggcggcggcgctgcgggcgcgccagatggggcgggaggaggggagacccggcacccaccggcccagagctgcctgacgcggcctgggcggaccccgccgcccgggtgcctaggcacgattccagggatccagggtaaagcggttcgcgcgggaacaggaggatatgtcaggcacaggctattccccatcactatagccacagaggactggtccagatgcgga

SEQ ID NO: 41520 - DNA, 2300 bp, Homo sapien
gcaggaaacagagcggcatcattgagaccagcctccctcctaccaatccactccaactcgcccttggtagtcagaggctgcctaacagaaagttcatgtaaaaccattattgaacactgacaggaaggaactgagacaggagtgagtggtgtgtatttgtgcagaaagggagaaggagggagggagagagagagaatatgagtcagtcatcatcatcttggggagacagcaccgtaagaggggcaagtgctttgtataattacaaaaatatgtacacatgcacacacacttgcacatatggtgtaattttttttcgttcatatcttgtcatttccaagaacctttttaagtgatgatgactgtttgtgcatgggaaccttcttggatgggtaggctccgtggctttagggaggctgagcagggaacccggcagcgcgtgggttcaggagaagggtcccttttaaagagcaaagggacacagcaagcagtggagaaggtatgaaaagaaaaaggtgaagggaccctggggaaaattccacctatagtgactaagctttatttctcttcgggagaaagtgacatttctgcgattagatcattgacatataaggaaagtagatggataactggtttttcgttgttctttttttatttgttttcttctacagtgcttacagaacctttgaccagatggtacctggaatgctctgtgttgcatattacaaacaggataattattttggctttttagaaaacgcaccgacatggtgacattgctctctgtttatcaagagacagagcatttgttgcctatagctgtatgctctgatgagacatgaaagatagtaaaatgacaaaaagcttcctgctgtttttctctcatcctgccccttcttctccccccagctccaaaccttatttctagtttcgctgggggtctaagttcctcctcccctgtctcccgagtctgtggtacaccacatctgatgcactccgataccccactctaccttggggtaaggaggaggtggggaagaatccgctccctgcatccatgtcctctcctctgcagcgaggcatattctcagcaactcttgtacaggttttcccttctcagctaccaccttggcagagctctatccctccctcaagcccagccagactgccaagcgccccgactgaaaactccatccagctcagccgaagtacaccccctccgccaagcaacccctgtgcccctgcccttcacctccctaagtctgctcttcataagcatcgattccattgcaaatcaaatgtacgtcccccagctattaacacccactaccccttaggtgttaccgacagcctccctcggaaaataataataataataataaccgaaagcacgcgaacacctgaagaagcacagatcgggatccgcatctggaccagtcctctgtggctatagtgatggggaatagcctgtgcctgacatatcctcctgttcccgcgcgaaccgctttaccctggatccctggaatcgtgcctaggcacccgggcggcggggtccgcccaggccgcgtcaggcagctctgggccggtgggtgccgggtctcccctcctcccgccccatctggcgcgcccgcagcgccgccgccgccgccgcttctctccccagcgggcgctcggagcatcccgcgccgcgttctccccgccccggcccccgcccgccggagcggggcccacgccgctggcagccatcaagtggctcgttaaggaaatgcaggtgagtgcgtgaggccgagcggcagctgctggagacgtggggtgtgtgcctgtgagtgcgagcgagacgaggagggagcgccagcgagcgagcgagcgagtgcgggagcggccgcctcggctccccgcccagccgcgcccgcagccggcggccggagcgcgtgggggcagcgcctcgccccgacagagcctcgcctcctccttgccgtctcggctgcttctccgaggagccgggagccgctcatcggcctccccaaccctgcgctcccctcccagcccgagtcctcccgctgctctttctcctcctcctcccgagcctcctcccctccggcgcggcgccgccagccagcctcggcggggagagtgcaggtactttgccttcagaataattagcaggacccaagccggctttccgagcgcgctttctttttcttcctttgccccctccctccggaaaagaagatcccacttttgaaacaatcagaaatcgaagcaccccaccaaagccaaaccctgacgggctgctgtgcatg

SEQ ID NO: 41521 - DNA, 2300 bp, Homo sapien
ataagtgatgtttgtctttctgtgcctggcttatttcacttaacagaatgtctagttccatccatgttggtgcaaatgactggatctcattgttttactgcattttgcatatgtaccatattttcttaatccattcatctattgatgaacacttaggttgcttccaaattttagctttgtaaacagtgctgcaataaacataggagtgcagatatctcttcaatatattgatttcctttcttttgggtatatatctagcagtgggattgctggatcatatagtagctcaatttttagttttttgaggaaactccaaactttgctccatagtggttgtactaatttacattactaccaacgctgtatgagggtttccttttctccacatccttgtcaacatttcttattgcctgaattttggacataagccattttaattggggtaagagggtatctcacaatagttttgatttgtacttctctaatgatcaataatgttgagtatcttttcataagtctgtttgccatttgtatgtcttcttttgataaatgtctgctcaaatattttgcccatttttttattggattattaatttttttctatagaattttttgagcttctcatatattctggatattaatcccttgtcaaatgggtagtttacaaatatcttatcccattctgtgggttgtctcttcacttcattgattgtactctttgctgtgcagaagatttttaactagatgtgatcccatttgttcatttttgctttggctacctgtgcttgtgtggtattgctcaagaaatctttgtcaagaccaatgtcctcaagattttcctcaatgtttcttcattgtagtttcatagtttgaggtctcagatttaaatatttaatcaaatcattttttatttgatttttgtatatggaacgagatagggacctagtttcattcttttgcatatgggtatgtagtttgccagcaccatttattaaaaagactgtcttttccccagtgtatgttcttggtatcttggtgaaaaatgtctttactgtaggtgtgtgattttgtttttgggttctcctgttccattgctctatgtgtctgtttttaggccagtaccatgctgtttttgctactatcactccgtagtataatttgaagtaaagtaatatgattcctccagttttgttatttttgcttaggataactttgcctcttcaaggtttggtgttccatataaattttaggattttctttctgtttctgtgaagaatgtctttggtattttgataggaattgcattgaatctgtagattgctttaggtaatacggactttttaacaatcttgattctcccaatccatgaacatataatatttttccattatttggtgtcttcttcaatttctttcatcaatgttttgtagttatcattatagagacctttcattcattggttaattcctaggtatttaattttatgtgtggctattgtaaatgggattacttttttatttctttttcacatttttcactgttggtatatggaaactttgctgattttggtatgctgattttgtatcctgcaactttactgaatttgtttgtcagctctaatagttttttagaggagtctttaggttttattcaaatataagatcttatcatcagcaaacaaggataatttgacttcttcatttccaatttggatgctctttataccttctcttgcctggttgctctagcaaggtaatatgttgaataacagttgaataacagaataaaaaaaaatctctgcaaagtaaacaaatctcactagtttatctgacttgtattccaaattagtgcttctggccttttcttaaaactttaagcatcacaaggaaatcagttggaagggaatcatgtgctgatcaagtccttaaagggcagaaatattcactgaagtgaaaaggattagtaaagggtggaaaaaaagaccagccccccgcctagtttgggtgagcagatttgggattaattatcaggcagcaatccacatgcacttaacagttctgacgtgagaggacaagaaacacaagcaaatataaaacattcaattctaagagaagttcatcagagacatccttcaggattgtgaggtactggaaagaagtcctatggggagtgggtggacacgtgccaaaactccattagtgtaagggactttaaatcacagaaattaacttgctggaaatctgttcccaattcttccttcagctccaaggttaaattaaatgtaattaatgatggtgacc

SEQ ID NO: 41522 - DNA, 2300 bp, Homo sapien
gcagtggcttgataatagcttactgcaaccccgaacccctggactcaagcaatcttctggcctcactccctcacccctaaccccttagctaagactacaagtgcatgccaccatgcttggctaatttttaaattttttgaagaggtggggtctcgctatattgcccaggctgactcagtttcttgagaatcttgaaaacaaacaaacaaaacacatgctcaagaaccaaagtaaaaaaaaaaagttttcaaatagtttgagtaagaaatgtcctcagattaaaccacataaagcagttatggtagcattaacaacaatctattatagatccataaacattcaatgattttaatatattctgaaaactagctaaagcatcattcaaaatgtcttcattttaaactaaaatgtcaataggcatttaaccgaaaaaaaatttaaagcttgacatactaagctttccttcaaaagtttacatttttttatatttcactggaacaaagttactttgcatatacatcacacttttactctcagaggagtttctcctgcagacttctttaaaaaactatatacatatatacatacatatacgtatatattaaattatcctcagcctcaaatactgattttgcagtctgtgattcatagcagaagaggtgtcccatttttctatattgacacacgataatttgacatttgttttttactgaccaatttctagctagatatttcatctataaactgcacttagccagccttatgctgaactttgtaagggttttgtaataataaactgttcttgactgaaacacaagcctttcataattacatgccacagtgcaattcttatgcaacgagcttgtgtttttccaaatttaggaccaagcatgtagttttatcagttagctgggatttggtcttgttttcccttgattctgtaagtggtagttctaactttgaaatgggtcatctaacttataactattttcttcatttctttttaaaagggagaaatagcatgcaaatttctggcatgttgatagaaagttcagcattttttccctgacatgaaatatttcatttagaatgcgtatgtttcctctacgtataaggtttcctagagtcagatatgataaaaacaaactctgagatgtatatacctatgttcctacaagtgtaaaacctgaatgatgtctctggaaatggagcctcggagtgaccaggaacacaaatacttatatgtcacagaaatagaggggcacatactttgaaatatttcaatggaaatcaaaaattgtagtttactggattgaaattagtatcctctacttaaacatttttgacacaaactcaatgctgattcagatctgtaatccatgtagctcataataacttacttggtagaagtatttcagattaatgaattgtacaattgtacaaattaataaattgtacaattgttcaactatacaattaattgtacaatttgtatagttgaaaaaatctataaattaatttatagataaattatcaaagaagacaacattttaaatagttattcccaatattttttcttccataattaaaataaaagtaagtatctcagcaattgcttgttcttaaaatttcactgctatctcagcagtcatgtaagttattctggctatttaatttttcacttttgtttgcatactgtaacagttggtaggataattaattttgattgtacatttccattgaacttttgatgaaattgtttcactctttttattagaataaaattattaggaaagtcttctaaagagaggttttctgtttgtttttcctttgaggaaggtagagagatgggaaacgaagacaccaaatataaagtcattcctctatctctcattttaaaacctgttttaaaggttgtagctagtcaggaaaactgaaaaatcaactggtattcctaactaaagcagggctttgaaactctgctactagcgacagggttgggaaaattccggttgctcttcttgtctgtgatatacggtagaagggttggtcctggtttggtccacctgccagcggagtttaaagtttccgaggctcagaggaacacaatgacttggatcaaacagcctaaatgggaagaaggacatttttgctgcatcaaggaagccgttaaactcctgctaagctaactagctcttttttatgggtccatgcacacgaccgaactcctctttcactgaccagagattatttctgacaacccaggatatcccgaaagcttggaggcatatggctggaaa

SEQ ID NO: 41523 - DNA, 2300 bp, Homo sapien
acatatatacatacatatacgtatatattaaattatcctcagcctcaaatactgattttgcagtctgtgattcatagcagaagaggtgtcccatttttctatattgacacacgataatttgacatttgttttttactgaccaatttctagctagatatttcatctataaactgcacttagccagccttatgctgaactttgtaagggttttgtaataataaactgttcttgactgaaacacaagcctttcataattacatgccacagtgcaattcttatgcaacgagcttgtgtttttccaaatttaggaccaagcatgtagttttatcagttagctgggatttggtcttgttttcccttgattctgtaagtggtagttctaactttgaaatgggtcatctaacttataactattttcttcatttctttttaaaagggagaaatagcatgcaaatttctggcatgttgatagaaagttcagcattttttccctgacatgaaatatttcatttagaatgcgtatgtttcctctacgtataaggtttcctagagtcagatatgataaaaacaaactctgagatgtatatacctatgttcctacaagtgtaaaacctgaatgatgtctctggaaatggagcctcggagtgaccaggaacacaaatacttatatgtcacagaaatagaggggcacatactttgaaatatttcaatggaaatcaaaaattgtagtttactggattgaaattagtatcctctacttaaacatttttgacacaaactcaatgctgattcagatctgtaatccatgtagctcataataacttacttggtagaagtatttcagattaatgaattgtacaattgtacaaattaataaattgtacaattgttcaactatacaattaattgtacaatttgtatagttgaaaaaatctataaattaatttatagataaattatcaaagaagacaacattttaaatagttattcccaatattttttcttccataattaaaataaaagtaagtatctcagcaattgcttgttcttaaaatttcactgctatctcagcagtcatgtaagttattctggctatttaatttttcacttttgtttgcatactgtaacagttggtaggataattaattttgattgtacatttccattgaacttttgatgaaattgtttcactctttttattagaataaaattattaggaaagtcttctaaagagaggttttctgtttgtttttcctttgaggaaggtagagagatgggaaacgaagacaccaaatataaagtcattcctctatctctcattttaaaacctgttttaaaggttgtagctagtcaggaaaactgaaaaatcaactggtattcctaactaaagcagggctttgaaactctgctactagcgacagggttgggaaaattccggttgctcttcttgtctgtgatatacggtagaagggttggtcctggtttggtccacctgccagcggagtttaaagtttccgaggctcagaggaacacaatgacttggatcaaacagcctaaatgggaagaaggacatttttgctgcatcaaggaagccgttaaactcctgctaagctaactagctcttttttatgggtccatgcacacgaccgaactcctctttcactgaccagagattatttctgacaacccaggatatcccgaaagcttggaggcatatggctggaaaatgaaacgacccaggacatcgtttctggctgcatcattattttgtgtcgcgtagtaccagatgggcagtcagtgagcggcgcagggatgtgaacggacggttttataatgtgaaaattttcccttggtaaagctaaaacagatttaatttccctctcttttctttcactacttccccctctttattccccctctgtctgcaatatcagtgaactcaactttgcagtgaggtggccaaaaagagagagaatgaggagatcttgatcatcttagtgtcggaggagtcgcagcggactgggaactgcagctgcgaccccccgcgtcctgtgcggatttcagggctgataccgcataggcggttatggaaaggacggtacaccggagcggcggaggatagagaccctggcccccggagaggtctgctgatttcgcagcagccttcgaagccgtggctgcctttcatctgctgcgttttattactattatcgccgttccggaaaagtcatggaagacagcccgctgccagacctcagagacatcgagctgaagctggggcgcaaagtacccgagagtct

SEQ ID NO: 41524 - DNA, 2300 bp, Homo sapien
gaggccaggagtttgagatcagcctgttcaacatggcaaaaccctatctctactaaaaatacaaaaactagctaggcatggtagcgtctgtaatcccagctacttgggaggttgaggcaggagaatctcttgaacgtgggaggcagaggttgcagtgagctgagatcgcaccactgcactccagcctgggtgacagagtgagactacgtctcaaaaaaaaaaaaaaagagtttgaaaaattgatactttgtagacaaagtcttctagatgtcaaaaataccttaaaagtgatttcatttatggataagaaagttatctctcatctatgtatgcatgttttattttatagtttttttctttaatcttctctatcattaggaaaaaagtataagctcctttgagccttttagcaaaaattgttgttacactttcccttgaattatatggagcttgtactgtagagccagagtttataacccttattgctgtctatcaaagtataatgtgtttggactccatttctgctcaccattcctaggagaatgggataagtatgggtatgttttgtttgggcccttagggtgccattattatccatgaagtttatgaagaaggagcagcatgtaaagatggaagactctgggctggagatcagatcttagaggtatagaatgcctgtttttgaccttcaaaattaacagagaaaaggctcctggggggagtgtttctttctttgcttctttctctctcttcccttccccacctaactctcctttacttctcatgttccttacagtcagtgtcccatttctgtacaggtgaatggaattgacttgagaaaggccacacatgatgaagcaatcaatgtcctgagacagacgccacagagagtgcgcctgacactctacagagatgaggccccatacaaagaggaggaagtgtgtgacaccctcactattgagctgcagaagaagccgggaaaaggcctaggattaagtattgttggtaaaaggtgtgattgaggaggacaaacccaatgctcccttggaaatgatgggacttaaatcattttaaagagtaatagcagtaggtgaatcttttatcagtggctagtgttcagtaggtagctgttgttagccccctcactaaggaaccataaaaagacattggttttggacttttaaaatcagaatattggaaggttttgaaggcacttaacaaaaagtcatttggtgtatttttgagcacctgctatgtgctaggaaatacgttaagttttcagaaacaaagttaaataagacatggttcctgaactccaaaaactcatcgtctggtgaacgtcgaattaaatatattcttgcaacaaaggaatctattgatgagtgacaaagatgctttgtgggggacccatggtagcaaaggagaaagggaccaagtgaccctatttaattaaagtgaattagggaaaatttccaagaaaaaaggtgtctgagctgaggctaaaagtgataagtgagtattggtttattaaaggagagtggaagatattgtagggagaaggatcagagcgaataagagcgtgccatcaacagggcctaaagcagggggcccgggtggtaatggaatagtgaatgcgcaaaaattcacaacctaattcatttgtatatgagtacattttaaaagtatttacatgtaagtaatattaacaaactcatttataagtgatattaacaaataatccagcaagtttcataaatctttcttccttttagtattataagcccatctggatctgatctcagaatctaccagatagctaaacttgtgaagtcagcattcagtaaaaagtgcccctgcagtctgcagtgtctctaagtttattttgtcatttcttgggcctcagatagccaccatttcaaagcagcttattttttccagtgagtcagaaatctgtgaaatggtgatctttatttcagaatatccttctttggaaataggcattcttcagaattgccaaaccagcagcatagacacctggttctgcagcgacttttctgtatggaaataaaaggacatttacaccattttgtttctcagagacagctaaaggctaattatttttaaacacagaaagaatttagcatattatttgagtgtcagtgggaatatgtctaaaaaatagactttttttggaatacagtatcagtagtctagttctcatgaaatatgacatgggtaacatggctactataggatgtggggtcaccaggtcatcataaaaaccaccattaatgaaccct

SEQ ID NO: 41525 - DNA, 2300 bp, Homo sapien
aaaccccattcttggagctccttaacttttgctatgtaacaaattaccaccaaacttcacaacttaaacagcaggcatttatggtctcacagtttctatgggttaggaatttcagagcattttagctgggggttctgctgagaatctcttgtgcaattgccgacacattgccagctacagctacagtcatctcaagatttgactgggctggacattgcttccaagatgatttacccaaatggctgttggcaacaggccttatttcttctaaatggggctgcttgaattttcttaggacaatggcagctggcatcttgcagagcaagttatccaagagagacagcaaggaggaagtgcctttgccttttttgacctagctgtgaaattatacaccattacttctgctgtattctctttgttagaatcaagtcactaagtctagcccatgcttttaggttccttcctgaaggaagaagtatcaaagaatttctgctcatatttttaatctacagcctgaaacatagtgagggaagaagggggaagagagaatatggaggtggaggagagagaggagtgggtgggaaggctagatattctaataaaaatcaatttttatagaggggtaagatgggaagcagtattaggtaaacaatcagcaaatacccactgtaccaataaagtattttcatgactgttatgtgacaagtattattattccattttgtagataagaaaatctagatttcgtaggtaagaaaattgagaattagagatgttaagtggcatatccaaatttctatagttaggtagaaggtaaagtcagttctgctcactctaaaggtgcagcttactctggcagatagacatgactgattgcctggaaagagagaggtggtagagagatggtcagtgacagtttcaaactcatcaggcattaataatctacctcagaagagccacatgttgataatctttaaaatgatgttgaaacctaccttgatgtcacagccatgaccataaacatctctgatggcacatttaacttgtgtgtatatttcagagaaaccatgtcaagattctcttttcttttctttgctttttgtaacttttctctggagaaaaaattagaaggtggctagctctggcaatgaaaatgttaaaaactctgttttaattttattaaagtaaacattaaagaaagctaaaagccaatatttctgaacatttggttttgataaagggaaatgtggaaaatgtagcgaagtaggtgtagctccccagccttggcaggttctcagagcttgtcttgggactgagaggcattttcagtctgcagcagattgaaatgctgttgtctggagaaacaagtctgagtgttcaccccccaaaaggacagagtctgcatcagtaatggcagactgcctgctaaaggaagaagaggggcagaaaagaatgaaggggctagaccctgttgttatttccaagcgacaggccagagaagaagcgggattctttggttggttttgaatgacttattcagtcattagacaaaatttgtaaatgctgaatgttttggttgaattattgaatgtatttttgctgtctagatattttgctaaagttactaaagatgtcagacatatgggaagagtgaaaacacttgaatgtttgatggaggaaaatttattcccattaggaaaatttgaaagtttgtttaagaaaagacaagatttctaagatcttagatttaaagtctaaggtcttagatttctggacttcagaagagttttagttgtttttcttacccttggtatccatttggataaaattaatctgtttcaagtcttctgagcatttttgtttttacttttctaggatcaggggggtttgggtattgctatcagcgaagaagatacactcagtggagtcatcataaagagcttaacagagcatggggtagcagccacggtgaggtttacctttcttgctgtcattaagtagttggggagggaattacttttggaatatcactcaaattcttctacgtttccatttaggatggacgactcaaagtcggagatcagatactggctgtagatgatgaaattgttgttggttaccctattgaaaaggtaattttccaaaataaagtaaatggtaatgtaggcccatccttgggcatgattaaagtgtttgtgtctgcgatcatagagaattagggttatgtagctgtattagacatgttcttaaggaaaagaagagattgttcagaagttcttcaatttctatttcttattttc

SEQ ID NO: 41526 - DNA, 2300 bp, Homo sapien
taactgtcaaagcgtacattttggtataaaatctgtccttttgaggtaaaactaaatagctttccacagtaaagcatttgactgtaaattaactgtaaatatgtatttgttgttgttgttgtatgtagaaaatatcagagagcgttatggaaccctaacaggcgagctgcatatgattgaactggagaaaggtcatagtggtttgggcctaagtcttgctgggaacaaagaccgatccaggatgagtgtcttcatagtggggattgatccaaatggagctgcaggaaaagatggtcgattgcaaattgcagatgagcttctagaggtaagtttttgtggaaaattttgaatttattcttgttttataagggtaatggaactgtcagtttccagaaaatcacccataccttatagtgactgagaaagccattgcttgcttaataaaatagatgcattgcagcaaatctggctctaaaccaaatttctaccaagtagagtccatgttcccattaacttccattaaaaggtcatgactgtgtagcaccagaaacaatttttgccccaagatagtaataaagcttacacttcaaaagcatttgttttgtgtgctgcatttttattaggagtttttgaaaagccaagtgaccagtcattccccagaggctgacccactggacattctggaacttgaatcactaatgggagaagtgatgagggtgaggtggggtggggtcaaggttaaggctaaagaacaagcagtaactcagcctgccgaacaaaataaatttgtggaccatactttatagggtttagaattttatttgcttgtgttgtttgtccttgcccctcctgggctgggatccacatgattttatactgcctttatactcttctcatgctgagtatgtttccctatagacacaggaggctcagtcaggcagtggctaaatgaccaaatgactgagccagtcatttgcgttaggcactgtgctgtttaggcacagtttgctgcctaaatcctgaatctacctagcatttcttctcccagtgacctatttccagggcttgagttttgagactaagtgggaaatatgacagtaaggaacttcccaggatggtcttgcaggtcgcaagtttttccacagagccctcgttttgtgcagagcatgctgggagcccagtgcctgccaggaaatttgttgtctactctcctgcagttggtccaagtggtgcctctttatcagcagttcatggatgtcagacttcatttgcattattttaatgctggctttaaacatgagctattctttattcaccatgaaaagtcagtttcatgttttggggaggaaaatatataacatttaatataaaatatattttaaaggaagaaaaaatgtgcttttcattaatgaggaaggatgataaaactttatgatactaagatttcaggcccaactaatgatatttatttctcacagatcaatggtcagattttatatggaagaagtcatcagaatgcctcatcaatcattaaatgtgccccttctaaagtgaaaataatttttatcaggtgatcattttcttttgctagtttaccaaatactttttgttagcatttcttctctgagttcttttgaatgaaaagaaaacatttgtagccgggcatgctggctcatgcctgtaatcccagcactttgggaggctgaggcgggcggatcatgaggtcaggagatcgggaccatcctggcttacatggtgaaatcccgtctctactaaaaaaaaattagccgggcgtggtggcacgcacctgtagtcccagctactagggaggctgaagcaggagaatcacttgaacctgggaggcggaggttgcagtgagctgagactgtgccactacactccagctcgggcaacagaaagagactctgtctcaaaaaaaaaaaaaaaaaaaaaaaagaaaacgtttgtaaatttgtaagtgtcacagttccaggttttgggggttaaataattttctctaataaccttctgactcttgaagtaagagaatgaaaataataccatgatgttataataggttgttgtttttttgcttttagaaataaagatgcagtgaatcagatggccgtatgtcctggaaatgcagtagaacctttgccttctaactcagaaaatcttcaaaataaggaggtatatgtaacttatgtttgtttctctgggaagacttgattgatgtgagccttattaattcaatcaacaattacataacacttagagagggatattagaggtagataagt

SEQ ID NO: 41527 - DNA, 2300 bp, Homo sapien
aaatatgtaccagcattttaagtgtgcatatcatttgaccaaccattgaaattctagtggttcatagtgaatatatcttcacacatgtggacaaagatgtagaatataaataacagcagtagctaacaattattgggcattttctattaagtcaggcctgtttttagtactttgtggatatgaatactctctgtcctcccaaaagtcctgtattagtttctattaatttccccaattaggcatagtgtttaagtaacttgtccaagctctaacatttaattagtgttgagccaggatttgaactcaggcatcctggttcacagtctacacaccactgtctttcatacttaggaataacttacagccataagaaaattgaagttgacttgtttttaaactgacatggaaatttctcacatcaagatgaaaagatactgcaaaaaaagtaaaagtgctatttattgtatggctgtgtttagtttttaaaaatatatatgtatatctgcttgtatgtgtgagtgtgtgcatgtgtacttatatgtatatattatgcaaatgcattaaaaatttgatggataaacacctaactgatgctagccatttttactggggaagcgaatggaagtagaagccatagcgaaaactcttcatattgtattctatatgcatacacagtatatgtctgtatcttgaatcctttatgcaatagtatgttcatatgctacttttatacattgaaactatcaatgaaagaattgaagggaaaactgatatgtttattcaacagcagtttatgaagcaactgctttcccaaagcactcaagtgatacaatatatctgttgtaagtagatatacatatttatatagaactctacaattttagagtttcagaggattgtagaaattatataaagagaggttctgtgatatacaaattgttaataacagagcctggatttagagcatacattttatgacaacccgtcttactattccttctgttatatcgtacagaatatttatgcaaatttttcctacgataatttgaattgtaaaactttctattcttctccataaatacttataaatgcctatcaaaataattttctcttggaggcccttatgagtccaaatcaattaatgtcatactttttatgtccttgagctcataataaatgggaacttcagactgatgggaaacaaactacactttaagtgagatttggaagtatgctacttgctcttctatgtaatttgaactctgaataattttatttgtaaatagaacatagtatttctaaatgatcttacgtacagtatcttgtacaagtataactcagtagaacgtgagatgtatgactttcaggaaatgtatttaaaagcatttatgaaaataaagatatgcagaaaatctgctaagtgaggaattgtgtttgttaatgctttttgagtaataaataattgttatgttttacatttcactaaatagttgttcattaagaagtgatgttatatattgatgtaattctggtcacatttttcatgttttgttgttgttgttttttaactaccaggatgttattgaaaattcttgtgatccagtacttgatctgcatatgtctctggaggaactatatacccagaatctcctgcaaagacaggatgagaatacaccttcggtggacataagtatggggcctgcttctggctttactataaatgactacacacctgcaaatgctattgaacaacaatatgaatgtgaaaacacaatagtgtggactgaatctcatttaccaagtgaagttatatcaagtgcagaacttccttctgtgctacccgattcagctggaaaggtaatattttaaagatatggtttgtgttttatgatgagatagggaatagtgaagtaaggttattctggctaatctcttcatttggaatgagtgcttcttgacactaagattttcagaaggcaacctatgaacttgttttggttgcaggttcttgcaaaataaagcacaatcaattagagaacatgcgtgatgttgaaatcacgctccaaagtctagtttccctttccatgtgacttgtgacttctttttctttcttaaagggctctgagtacctgcttgaacagagctccctggcctgtaatgctgagtgtgtcatgcttcaaaatgtatctaaagaatcttttgaaaggactattaatatagcaaaaggcaattctagcctaggtaagtttctcattttcctcatatacctactcctcaacccccttgacaaggggaaatat

SEQ ID NO: 41528 - DNA, 2300 bp, Homo sapien
gagtagctgggattataggctggttccaccacacccagctaatttttgtatttttagtagagacagggtttcaccatgttggccaggatggtctggatctcctgacctcgtgatccgcccacctcggcctcccaaagtgctgggattacaggcatgagccaccgcgcccggcctatttatgtgttttaattgccagaagttaattgtttttgaggggggttggctaatagtaggctgttttgtgaaggagtatcatattctccttgtaaataagagtaaataaatcaccaatttatttgttaatatttccctatattaggcctcatgaaataatgcaatgctcggcattggaatgcctatctatatggaatatactgactggacattaatcctgaataaatatatcatagttacaagttatgctatgagctggaaattggcatactttatctcatttttcaaaatatacccaatgagtaagtgtgttttaaaagaaactgaggttgagatgataggtcccttgctcaaggccacacttctgtttaagtttcaattccaggtcagagccagtgtcctcttttcttgacacaaaggcactttttaaaacaagtgccagtagttaaacaatttaacatttgaaatggagttgatgtttcaaatagtatattctacattgggataaggcaaatcaatacgtactgttctctcttatcacacagagctaattgcagacattgatgctctgtagatctgctcatctacatcacatacttccctttttgccaaatgaattttgtcttaaagaggtaacaggaggcgacttgttctttctaagagaaattccattttgcttccagatgaaaaatgagaacgtgtggtggtagatttcttttctctattgaaggaatgactgactgactgtcttcctcatgattcagggttttctgtgaggcaaaagagagatggaactatggggatagctgtgcagatttgttcggcagcaaaggctcaagatgggttagtgacgtggatgttagcaatgcagatctgtatccagtatttcaaagaatctagttaagtattgttagagaaagatgagatgtgtggattgaaggagttgagaagatttctttgaatgggaaagaggagaacattatagtcaggagagtattttgagaacttttgaaaaatttaacactgtatactcccttttgttcagtttttcatccgtgatttaaagtattatcttccagtggttcaggtactgcttgagtgtcacattcatttctttttttcttttcttttcctttttttttttttttttttttttgagatggagtcttgttctgtggcccaggctggagtgcggtggcatgatctcggctcaccgcaaccaccgcttcctgggttcaagtgattcccctccctccgcatcctgagtagctgggattacaggtgtgcacaaccacacccagctaatttttgtatttgtagcagagacggggtttcaccatgttggccaggctggtctcgaactcctgacctcaagtgacgcactcaccttggcttcccgaagtgctgggattaaagatgtgagccaccatgcccagcccacagttcatttctaataggtatgcatgtattgtctcctcagttaggagtgtgagcctttgagggcaggatcacattttctactttttatgattttgccacagaatttcttatgtggagttaagtaagctccttattctgtgcttaaagatctgtaagtgaatacaagattatagtggtctgtactgagaactctttatggaaatatgtttgaaacttctgccaccttatttaaaatagaatttatgtcttttaccttatgcaagtattatgggtaaatatatacatagaagataattttgaataagtcctaaaatgtttactttattgtctgtaaagcgaactatcttaagttgtatcaacaagattttaatggtcaaaggaattagagttgtatcaagtgttcttcagagtatatagctttagaatataaagttctgataaaacataaccattctatttcttttttgcacagagttccattttaattgctgttaatcatttcagagaagaacactgaactttgaaaaaaatgttggaagccattggtaagacttattcttttctgcctacttttataagaattgtaactcctcccattgggatttttgacatatgttgtgtttaacatagcaggattctgtctatggtatctagatttaaaaagtttttacctactagcattgtat

SEQ ID NO: 41529 - DNA, 2300 bp, Homo sapien
ctggtctcaaactcctgacccaagtgatccacccacctcagcctcccaaagtgctgagattgcaggcgtgagtcaccgtgcccagccctagttctcagatatataaacggaataatatacataattagaaacattaatttgcctgttattcccataaaggatttttttctatatactaaaaacaaaattttggaggaccaagtgataatattccagaaaatcatagcaatatgggctctttcaatgaccaactgaagctgaaaaagcatcctggctgaggggaggaaatattattagccacttccgctgtctcacactaaaacaaagtacacaaggaggaagtagaggtgatgcaagcagtgaatgagaaatcaggaaaatttccattaaactctgcctaagtcctttagggctctgtctctgttttgttcctcttaaggttgtcacttctatgcctaatgattatctcattggttccaggacattgttaccatttacctccactggatatctattttctttcaaaaaggtaagaagcaatttatgtcctattataattttatttgtaatcttaattaatcctacatgtccaaggtaaagacaggtaatcattacgtgtgtgtgtgtgtgtgtgtgtgtgtgtgtgtgtgtgcatatatatatatatatatatatatatatatatatatatatatatcttgagtctactatctggtacactattggggcttaaggaaacaaataacaacaaaaaatccaaaaaacacccatcatacagcatttgctacacttctttttactgaaagtcctactacctaccaattcacaccccacctgccaactccctcacctgaaagcaagaaggaattgtattttcactccagcatgtaattggcagatccatattttgtttttgcttgttttttttctttcagcacaatcaacgtgccttttccctgattttctctgccaaacatatcagattgtgggaggtttatggatacacagtacttcacaggcaacctgaaaggtagggagactgcgaggagatactgcaaaaaaaaaagtgtgatggagaaagcatgagtgactactggaagacagacctgagataattattgaagagatgacagtgaacattaccatgatatgtttcaccaggttgtgtttcaaagataatgaagaactattaaatcattttattttctttgagatattaaagaataaatgaaaggaatatgcagatgataattataaataacaattatgataagtttgagtagctagctactttatacaacactccagaaatatttgttatgcaaatgcataaactctacccagtggctttatagatcactggcattagggctggagctattgtgcaggaataggatggtggcttaactcagttgggggtcattttattgccagtttaactggtgttaaattagtgggtatttaactgtcactaacacaatttagggctcaattcgccaaagtatcatttttactaatattttagtgaaagtgaagaatcattcctcccgatgctgtagtgtcatgctgaaggcaccactgttctctagtccacagtaatgaaacttgcattaacaaaagtgggctggatgcctactaaggagaaaaataaactccttgagaacctggtatcttgctgtagtttattgcagtgaaaccattttaacatcccttttcactgaatgagatttttaaaatccgtaaatcatgagccaaaatagtataatccatgcaatatttcatggaagacctttgctgtaagattattgtgttgaactcccaaatttttattttagggaaaaaacacacacgcacacacacgcacgcacacacacacacacacacatttccccaccaacacaagaaacatgatcaactccaaattcaaaaagatttacaaatgccacaacacagttatctaccagcaaacatatcatttctttgtttcataggacaccaaggatgaataattcatgaaccccatttcacatgcttattgtgtctggtggcaaagaccccgcccgctcagccccaggaaagctcaggcactttgctgcaggcacagtgctctgtgccatccagggaccagccgtgtgctctcgagttactggagcagcgcaagcagctccagtggtctcagctgtggagacagctgtttgcccaccgtctgcgatggcagaaatgtgtggtaggcttccccctaacagcatggcccccgctacacaccacacacacacacaaacaactcccaggccgtgcat

SEQ ID NO: 41530 - DNA, 2300 bp, Homo sapien
ttgcaatgattttacaaggtagataatattattgcagttttcaagatccagacaccaagactcttaagagtaagtaattttgtacaagatcatgtcactagtgagggacagagccaggcttcactgtaacatattaaatacacacacacacacacacacacacacacacacacacacacacacacacacagagagagagagagagagagagagaggtggggggtgttgagcaaagtgatggaagtggttaaataaaacctttgggtatagagtaatttgacctaggtggtgaattggaaggggtttagatgtggtctgaataattccttctctgaagtcaaccacaataacagttcatttttggtttctctgccaaccacgactccctggttacttccttttccagcagttggaattaagtgaccgatataaggtgacataagagttaagagtagattatagtgttagaatttacagtctgaaaagtaaatgctctatcatttgctcactgagagggccctctcctatgtttctgagacacagtatacactgctttatttcatgagaaggtatgggctttggcatatgaaggagtctgtcattgtgtgccagtaaacaccagatcattttagaaagtggaattgttacaaaaagccaatgtgtgcctcaaatttagggtctacttcagctttccctcaaatgcttgtggtttttttagtaagtatattttttcaatcgaagaagttggtctgcagttgttggaaatgagaagaaaaagtaatttatagcagaaaagaatagagtttcccaagtgggatgttgtggtaacaggggatgccattgttctagctggatagtttcttacgaatggaagagacttttcattcttttctctgctggacccaaattttagcaacagatgatggaaaagagttttgcggcaccattttgaagttgctgtaactaaacatgctaaggctcatgcagagtctacaactcctgaaataaggcgactgctgcaacaattgacaactttaactatctcaggtgtcatcacaagcttggcattagccaccttgaggggtgcatgtctagaccttcataagagtgagatagctttggagggaaagtaaaacatagggaggctctggtcagtgggtgtattatacataagtaggaattcctaaaaaatgttagaatcgcttgagaaattaaactggaatgtaatatcaatgctgagagacatttgtcagaggaactcaaggtaaaaatagctgatgctatagcaaaaagttatgatttatcatttttatgtagctatcatactccaggcctggaaagtggcccatattgtaccagttttttaaaggaatgtagaacgaagaagattgatctcctaatttataagtcactgaatcttgccttgatttcagaaaaagtaataagaggacttcatgggagatgagagagattttcagagagttctcagctctctgactgtcttcaggagactcgagccagatgaagaatggtcatttctagtttctttactttcattttgaaaaatcaggaaacaattggaggaaaatgtgggaatcactaaatatgcctgccaagatctcatgaaatctgttctagaataaaaccaaaaagacaattaaggaaatgggatgaaggggtaaaattctgatttcagcattaaatctaagctaacaggcatgaggcaaagggcagaaataaataaccaggttttatatgagaagaaactaacaggatgttcttgcatttaatagtagaagcagcaatttcagtatgttaatcacttacctggaaggacagaataaccccgatgaaaaaaaccagcatatgattttcctgcttaaccaaatcactttcttggctcaagtataatggcaaggtttgggggaagagacttgtcagtatatggcagtacatgacagagccgtcatttgtgccccacctatcaaattttgttgaaattcattatcaagttcaaaattgccttttctaggcaagcaaagaggctgctggagctgagccatccattcctccggcgtttactgcaagcctagtgcattcacagccatgaacagcacactgaggaggacacaaaagaagtagacagaatctctgcctctgcttaggagtatgcaatttagttggggcgacaaaacttaaatgctagaaccaataaaagaagattacaaagcaactcgcaagtaagtgtataataatatggggcaaatgacacagataaatggagagggtacaaggaggga

SEQ ID NO: 41531 - DNA, 2300 bp, Homo sapien
cttgatgtggataactcccacttggtgaaggaaaaagtcactggttcctccaggtccgctgggggagggaagaggggacggtggacagaaaccagagggagtgagaggggctaaagttgaggggacagatcacgagctgggaagcggtggaaagaggaccggggaatcgggggcgagcctcgaaacgccccagcagtacccgtggaagcggggcggccccgccctggggatgggcccgcgaggacccggtagccccagcgccccccggatcccccagctaggtagactcggagccccaggcgctcacttttcctccctccattgtctgggaggcctttgcttccccctcgtccccatccaccccaagcagaaaactggatttggggggcggtgtgtgtatgtgggcggggggtgcagaaagggtgcaaggcgaaccgccttcttcaaaatccctggaatcaagttcattcactcggagcctgcacgggcgacggggtgggggcggggcagcgccgcggtggggagccggcgcgggcgccgagcggctcagggcccgcagcctctggagggctgcagcggcgcgcgcgcgcccgccggcccgccccgcagccccgggcgcgccgcggccccgccccgcctgcacccgggcgggtagggagacgctttccgccggcgccccgggccccggggggtggggattgggagccagccagcggggctgcaggaggaggaggaggagagcgaagccgggcgcggggaggaggtggagggagcaagaggcggcggcggcggctcggcccggtcctcccgctcagagcgaggccacgtgcacggggcacccccggggagggcggcaaaccgcggcgaagcgccgcgcgccgcgactgcctcgggtgcgggcccctggtgggcagacccgggacgaacccgcaccccctccctatccgcgaacccgggctccgggcggggccgtcgggggctgggcgccgcacccccctggtccacgccggcgcgccccaactacttgagcccaagttcgctcaggtccccgcctgctcggcctcccccttttcccggcagccgcaggctccgcggactgagcccgccccgggtgcgagtgtccgcgccccagccccggcctgggggcggcctgggtgtgagggaattttccactcgttcctttctcgggctcagacggtttcggtgcttctcccactcggatgttcccgcggcttaaaagagtccgcagcgagcaccgaaatacctcttccagggcgggttttcgggggtgtgtatgtgtgtgctggtgtggggagggcagcggaaagaagagctattttggaaaaaaaaaaaaagtcatggttctgtagcaccggtaggatacctttaacaaatgagggagaggtggggggagagaaggagaaggaggaggaggaggaaggtgggggggcggggggtgtggagaggctggtgcaaaaggaatgcgcgtttgcaggaggaggagtaaagcgatgattgtgtaattaaataataaaacaatccttaagtctgatttggagagagctcgagcggggtccagagggtggaaccggtgaatttttcaacttccaagttttgcaacgaaagaaagcaagagagggagggaaaaaaaagagcctagagcagaaaagagaggagtttggagccgagcgggagagcgggatttatcgtttggaatttttcaggagatcgttttgatacccctgggctctgggcagcggcggcaacagcagcctccacgctcggccgggtcagacgcggggcgaggcgggcgggcgggcggccgggcgccgaagacccggcgcgggcggcggcggctgctgctgccggggaccacgcgccgcgagcctcttccgccccagagatcagcgctcgcgccccctccctcaccccggcctctcccttctcccccatcccaccccgcccccaccccggccctctcccgcgcgcgccccgccacccgcgcgcactcgctcacgctgcccctcgcgcacacacatggtcggctcgcggcaaagtttcgcctgcgatcaccactccgggatcctgccgcagtgcttggggctgtaaccttgaactttcccagcgcggtgacacattctccccgctctccctcccgcccgcccgctcgccctcctgcgccctcccgcgcccccctccccgccttttttgaaaaagcattttaccaccaaccaccaccccaatccaacccacaccgaaccttcgcgcaccccctacaccccaacaacaacaacaactgc

SEQ ID NO: 41532 - DNA, 2300 bp, Homo sapien
ttcttggaacttgtgtcatcctaagtagaaatccacctacataatattctgtcccttcttgggatgattagaaaaacattcctggttatgagggtgaaatatcaaagagggtgaaaaactgaggctactctggcccgaggagtggtcgctgattggctacttcggaagtggctcaccagaaaggcctttgccaagccattgcctcctccctacgccagtgatgcaatatcaccccaccagaatgttttgttctccaagacccttgtttcaatgggtacatcccattagcaaggccagcagatgtcagtcctgatccactttttctcaataatgaacgaggaggaagagcctatcgctttcccaatcactgccttccatttgctggcttttcttcttcctgagatggaggcctcctgcttggtttgctttgttaatatttgcattattcaatagttattatgtgataagcatgttgtttgctttcgattttggttggtttattttcttgtgcttttattcttagctggtggcttaacttgagttacagctgtgacctgtatattactcagcatggatagaatgtatgtttttacagcttcttacctgatgcctcaacaatccaaagttgggtcaaaaaaacaaaacaaaacaaaatttaacgggaaaaacatgtagcttttattctgcaaagtcatctccttggtgtcagccttggatatatcccttttagaatgaagaggcttaggcttgcaagtacttcagcaaacatcgtttctgaatgcacatatttttagctttctgattaagaagtagtaggatccctgtgcatttactgagtgggaatcttatccttgagttaagacattttatgtttaaagattaagtaatttatcataagtgcatatggaacgattttaagtaaacagaacataaagctactgttgagaatgcattctgctgcttgcaatacactattcattatgaagacatgctttaaaattgctattgaagttttaaagtccaggacttactagtgaagaaaaatgtgtgtttttgcctttgatctagtattgtttgttacagctgattagctgttacgtactccaaggtaaaattgtcatgtaagatgatttcaacatgttataaaagaatctgaacattgagagatggccagggacaagagtgcatttgggcaatactctgtggcttaagttaaatgtcacatacttattttaccaagttgcttaactcaaaccacaagaactttcttgatttattaagaatagcaatacaacctagaagatatatgcaacttttaaacaactctcactgaatattgcagtattttatttctttcaaagtaaagactataataaccagatgcctaatgctgacttttttatttttcacttgaacatgacttctggctttcaagaattttaaaatcaaatctaagtaaacttaactcttctgggggcagggagacaaaatcaatcattatttataattctttgcaacgttaaaaattaaaaaccaaagggtaggtatttgtaattttttatttcaagctgttattttgattacttgcaaattttttgcctatttttaactaaaagagagactcactaataaaaatacatttataccaaaaaaagtattcatataaaacatcttttcatactttatttagaattcctgtgttaatgtcagctgcaaaattaagaacaaagcaaagataatttcagaagacttgtcttggcctataacatcgtgtcctattattccatccaactatctagaccagtgctttcaatggaaatatataatgtgagccttaaacaagagtcacacttgtaattttaaattttctggttgccacatttctaaaagtgaaaaggtaaaattaattccaacaacatatattcaaaatattattttaacatgtgatcaatataaaaaattgtacattatatattttgtgttcttttttatgtgttctacgtttttgaaattcccatatagtttgcatttatagcacatctcaattcatgcaagccacatttcaagtactcagtagtcatctgtagctaggggctactatattgggcagtacaggtctagatgatcaaatgcctacactgaatgacttcatagaatatcactgttgagctgacaccgatctaaaagattcacatgtcggagcaagactgttagtggagtaaactcctcgagtgtacaggacccctttgttcttgttctattttgtttttaacagcttgctctgctccataaagatccat

SEQ ID NO: 41533 - DNA, 2300 bp, Homo sapien
gtcctgatccctctgtactcagttcccctaaattattggactacaaactaatatactagaaaagcatacacttattttatttgaatgcagaaatgctatctatcagtatatatacataagaatgtatattacagtatatctatatatacttaacactgtaactttcagtattccccagttagcgtacctaactctcctgtgggttttgttaattcttattagactactagagaaaaaccaactggcagtttgctaagcatatctactggtgttgtttctgcgccctcttttggctaattgatgtaattatactggctctaaagatttactgccccataagtaaatagtatagccacattctgaacatatcaaaagtacaaacttaggaggagtgtatgtacaaaaatgtaaaattttatgaaaatgaacatgtttttatgatgttatttctagttcataagaatgtgatgactgctttgcttcatttatgtacgttcccattatattcttgctgtcaatcaatcacaaatttatatcagattaggataaactaagccattttatgtattttattttaaaccttattttggcagagtaattccttagaattggaaaagctgttactttgaaattaccaatttattacaaaacatagaaatgtattgtagctacaaagacaaccaagcattttctgtgttttaatgaatatctaaaaaactacatttagtttattttactcagttttgaaatgatttttttactggctctattgccttaaaataactaagagattaatgattctttgtataattttccttttctttgttcttttttttacatttcgcagagttatatctatagttttagtaacaatttcttatgtattctggataactgaaaacaactaaaggtgttgggcattagaaaataattgtgagcagtaagattactgatgtaatatgtatgttggactgaagtatttctttataaacattctatttgattttaagcaaaatgtatgttaaagcatgtttttacatcagtaaagtcatttgtcgaccttctggaaatgaaaggtttttacctagatactgtaagttacacctccttaacaatcatatttgtcattgttgttttctgcaaacaaaaatgtttatgggcttcatgtaggcttaagattgtaggcaaaaatggactgagttcaggacccttcaagcagtaggcattcagttacagagcagttggtactttgtaacccagacttacagtttaaaaatatcaagttagctgatgtttcattataataaaaatactattttgcttaagagttgtattacaaatatttgtgcttaacattagaaatagctgttttaaattgtagttaacatattaactttttcagaaaaaaagcatggtttatttttaataatgaaatagagaacataatacgtaatgttcagtataacagctgagttaaaacatctgccaggattaacatcagtgcgtttttgccaatgcatagaggcatttttctctaagtatgatggctaatgataactattctttgttacacattcaagtcactcccatacaagtaactagtgggtgatatgtttcactccaaagggtgtattaattctgaatgctaatcatgaagacttaagttaggacaacacttcaaaccaggaagtgtgaactgatttagattatagctacacaattttctgtgtgttagatcatggggtagtttgagtgttttcacatgtattgctataaaatcacaatgtaccaagctctggtttaatatgccattaatactaattaatagagctgctagtctctctctggacttttctctagtctctgcttctcttgcgcttcctgtatcaatagattacttagctcaagtttaccaagtttaataacctatagttactttattgaataagtttctgacatgacctctaatatacatagatatatctagaatttatttgataaaattcacacatacaaacattgagtagtttgctaatagatacaaatattagattttcacacaactctactactgctttaaaaatataagtattggtaagtgtagcaaataagccatgtacatttaatgtgttctacttgctagtattaactgtatgattaatgaatgtgttatttaatgcccaagtttgttaacttttattctagaaatcatcctctgaatttattataaatcacagatttcattgtgctctatatttagtcattctcagttgaattctagaatattccacagtacagta

SEQ ID NO: 41534 - DNA, 2300 bp, Homo sapien
tttagtctcatctccatccttgacatttataaattgtagttggccaaaaattattttaaaatcttttcactgggagtagagtggatggattttatttggtcatagatggtaattttagtacagtaagctctgctataatgcaatatgtgcattcctaaaaatcacctcactgtgtaaaaccgtgcattaaaaccacagggcttaccactccgaaactttgtctgtgacacttaaaaggataggaatataataaaaacaacagcactcttttatataaatattacgtgattaagaaatacataaatactatgataaacatggcactttaccttgagaaagacctgaagttttcttatggaagtgagcatcaggagggttgcagaatgtgaattattgtgaagtgatggaagggagggtctgtgaaattggagggaaagttgtaatactagttgtgggtgggtgtggctcatagcatggaagagaaactgaggtggctggtagatgtttgacgggtgagtgtgttttgtgtattcctacatattttggttcatctgggtacaattttttgtgttcatctaggattttttcacagataaaagtatgcataagaatgattgccatggtcaaacttgtttaatgtatcaattatgttagaacaaatttgtgtttttaaatagtgttaatgcagaatttacttaattttttatgtcatccacaggcccatcattttggttttatatgttttatagggattctatattgggttctttttactgaagttttgaaatgattgcctaatatttacctgctacataacgttttaagtgtcttgctgaattctaagtttttccaggctaatgaataagtaatgtggatgtggaatcagatttttgcttgagtctggtggtgactcaatataatacacacagaaaagtatcagttcttctgtttcaagcaagcatactatctctggtggccttcctatttttgaagttgctgttaggatactttaatccttaacatgaatcagtataaaagaaagcatgtgggtggttgtgtttgggtgtcctttccatccacttggtgcttttattttctgtggttgttttattccacagcttagcaacagcagatttccaggagaagtcttagttcttcatctctctctccttcctctggtctggttggttggtaacagtgagagtaaatgaaatgctttttgtttttctgtcttcccaccacagtgtctttggtttacttttaggaccctcattttcaatctctgagccagaagacctgcctttaaatcacagcatttcaattcctccctcctatctaggcattcctttatgtttctacagtactctgcatgcatccctgttataaaatgtatcacattgttttggaattttccaaagttgagctctctttctaaataaactgtacttcttgaggccatggaccatatttttatcatttatacatttctgttacgtaacacaatgcttggcaatggtggttgggtgactggatggaagaatgaatgaagtaggcttgaagagagctgtacttatgatcctattatatatgatttctcttcattttgtccacgttaatgatttctagatatcttggtcacttgaactttagtaatatgaatcatgctgtgtattcaaactttttagcagagaaataataaaattccttttgtaaaccaaagattgtacaaccatctgtgttttgttttgttttgggtttttcttttctttctttctttttttttttttttttccccaaaataggttcaaaaaacaaacaaggctaacttgcacctaagattgaggagttttgatgcagtagagtagtaaactcctgtattttccagcttgctattgtaaattaaaatacctatttttgaaattttaaaatatttatacattgatttcaatagaagtataaaagagggagaggtagttcttttaagataataaggaagatgtgttatggctcaattcttgattattattgcgactgtaagcaatgtaagcaactctgaatggtttttaagactttctttttctttttaggacctctttgtttttagacatgaattggccataatgagactagcagcctttatgggcattactatgttagttggaataactggactcttttacactcaactaattggcatcatcacagtaagtatatttttaatgtaaagtaacatttatgaatatattacctaattatgaatgtaattctcaaaagttataggaagtttagaaatcaaagga

SEQ ID NO: 41535 - DNA, 2300 bp, Homo sapien
gcaatggggaaggaatacacaggaggctctacttggtttcagatgttctaattcttgagaggatactgttacttttcttcttcttctttatatatatatatttttttgagacagagtctcactctgttgcccaggctggagtgcagtggcacgatctcggctcactgcaacctccacctgccaggttcacgtgatcctcctgcctcagccccgcctagtagctgtgattataggcatgcaccaccgtaccctgctattttatttttatttttattttttagtagagacggggtttcgcctgttggccaggctagtctcgaactcctgacctcaggtgatccacccaccttggcctcccaaagtgctgggattacaggcgtgagccaccgtacccagcccagtgttacttttctttaaactgaacacatgtgttttatgaatttatctgtatatgagcacattttttaacaaaaatggaagaaatgtaaacaataaagaaatacatttattgattatattagtttgctaggcctgtcttaagaaaatacaacaaagtgggtggcttaaacaacagaaattcattttctcacattctgtaggctacaactccaagatcagggtgtcagcaggttagttttctcctgatgcctctgtctttggcttgcagataaccaccttctctctgtccccacatggtctttcctccgggaacatccatggtgtctctcagtgtgtccaaatttcctcttcttataagggaaccagttggattggattagtgcccaccctaagggcctcattttattttagtcactgctttaaaggctttgtctccaactacagtcatattctaaggtacaggggttagggcttcaacataggaattttgggggacctaattgagcccataacactgattatgtagtaaagatctcggatagcaaatgggttcctgtgatttggataaaaatttttaagccaatttttggattcaaaaagtgttaaatctaaaaaaatctaagacagaagtaaagatgtactctagagaacagtgttaagtgactcaaaatatggatttagtgctgatgatgttaattatgcatgtgtgaacttggaatacagttgtttttttgaaaatgtaaaagtgataaaaagcaatttctagattaaagtttttttactactgtattttacataaatactttaaatataaatgtataaccaaatgaataaatgtaatattataagtagatcttttagtctcatctccatccttgacatttataaattgtagttggccaaaaattattttaaaatcttttcactgggagtagagtggatggattttatttggtcatagatggtaattttagtacagtaagctctgctataatgcaatatgtgcattcctaaaaatcacctcactgtgtaaaaccgtgcattaaaaccacagggcttaccactccgaaactttgtctgtgacacttaaaaggataggaatataataaaaacaacagcactcttttatataaatattacgtgattaagaaatacataaatactatgataaacatggcactttaccttgagaaagacctgaagttttcttatggaagtgagcatcaggagggttgcagaatgtgaattattgtgaagtgatggaagggagggtctgtgaaattggagggaaagttgtaatactagttgtgggtgggtgtggctcatagcatggaagagaaactgaggtggctggtagatgtttgacgggtgagtgtgttttgtgtattcctacatattttggttcatctgggtacaattttttgtgttcatctaggattttttcacagataaaagtatgcataagaatgattgccatggtcaaacttgtttaatgtatcaattatgttagaacaaatttgtgtttttaaatagtgttaatgcagaatttacttaattttttatgtcatccacaggcccatcattttggttttatatgttttatagggattctatattgggttctttttactgaagttttgaaatgattgcctaatatttacctgctacataacgttttaagtgtcttgctgaattctaagtttttccaggctaatgaataagtaatgtggatgtggaatcagatttttgcttgagtctggtggtgactcaatataatacacacagaaaagtatcagttcttctgtttcaagcaagcatactatctctggtggccttcctatttttgaagttgctgttaggatactttaatccttaacatgaatcagtataaaagaaagcat

SEQ ID NO: 41536 - DNA, 2300 bp, Homo sapien
tgattatactcatgaaatgcccatgctaaaaaggttcatgtttttaaggatgtttctcctgcctcttctctcctattcccttgcttaaaaattctctgtggaattgatttggctgataaaagacaggctaacttattttaaaaagggactgaaaaatccatgcacttccaattgtcatgtgcaatcatggacctgtcaactaattcttattttggcagttttgagatcacttgtcacaaattattccctctcacaggggtatctgaagagaaagcaaaataatatgcaattcatgtagctggattcaggtggaggggattctacttttaatatgcaattgggtagctggatttgggtgggggggggattttacatttaatatgcaattctggtagctggattcgggtagggaggagtccacatttaatatgcaatcaggtagctggatttgggtagaagggattcacattgaatacgcaatcaggtagctggattccggtgggaggattccacatttcctcttccttcaaagtgattgtttatatgaaatatctccttcttttcaaacagagaaagttacaaaaatcctactacatcaaatgatttatgaaaaataaaggtaattctatcaaaagcaatcgtgactagtctttcaacctcgctatgcatatatcggggagtgtatttgttaacctgaaaggcaataaaatctgcttatgggtaaatcaattcctaccactgggttcttttgggaatatctagtaatctaggtcagtaattctaaaacttgagtgtgtattaggatcacctaaaaggcttgttacatcacggattgctgggctacacctaaacagtttctactacagtagatctgggatggggcaaaagaatatggatttctcacaagttgacaggtgataccgatgctgctggtctagggatcccactttgataaccactgaccaaagtttttaaggtcacaaggtgtttataattagttcagaaaccaggacacaacatgtttaaaaatccttagcaatacaaggtaatatgaggccccaaacaggcaacaatgtgcactatataagggcagtggtgagagaactctggtttggcaagatttccactctcaaatctggatagggttaagatcatcagagagcagggcattctagaatggggaaatgaaccaaattagttggagctaagactggagaggtaggtagggatgtgtctgtggagggcttttaagcacatcttataaggaatacagattttatacaacaggtaatatttcttccaccaacacactgtctcctcctgtggcacgtgggcagaaagatctagctccacattactgcaaacggtttaaccttccccaaatactgttcagccggagtgaggtgggaaagttagtagatctctggtgtttggtgaagataccaagttagactgagaggtggattacttgcatcgctgagtccaaaagttgtcggcttttgcagggatgggaaagcaggaaacttttggaggtctcccaaaatataagaaaagattgtttgggtgtggatttaggttgaggacaggaacaggaaatatcctgggatgtctgaggcaacccaatagagggtctgaagtggacgagaccatgcactacagtgcaatgcttttccatctttacggtgcaccccaggagtcacctggtgatcttgctgaagtgcatgtactgattcagcaggcctgaaattgtgcatttcaaagattgtgagttcccagaggatgctgatgctgcagaccgcgctttgaagcaaggtaccatgggacatcccagaacacctgcggggagagaggcctgctggccacatcccccgaagaaaggatacatgcaatcttttaagctaaggcccccatcctgtctctcgggagaggtgagcagtgaggatatggggacaatgagaaggacggctcaagtagggctggggaggggcagaggcgcccaggcgcgccaggtgcaagcgctctggagagtgcggtctgcctgggtccgcggctctggggctgcggcgcgattgcaggagtttcggccctcagcggctcccatcgcggctcccgggagctaagcgagacggcgacggcggcagtcgtccctccccacgcgggcgcgcgggcatgcggacacccactcggccggtccaggccctcaggctcccggaagcggaaggggagagcggcccggcctgggcggcggcgccggaggaggcggaggtggcgcggcaggaggaggggaaagagctgctggc

SEQ ID NO: 41537 - DNA, 2300 bp, Homo sapien
agtagatactctgattgataacaatggaatttcagttactgaaaagtaacagttaaaaggattcaggaaaggtatcacagctggcttccacaccatattataccaggaggcctagtgactagctctggaaagcgtatagcattggatggctgaggggaattaagaaattcaagtagcagtcaattaaaaaaaaaaagatgttgacatagcatggtggctcacgcctgtaatcccagcactttgggaggcagaggcaagatggtggctcaaggctaagagtttcagagcagcttgggcaacagagtgaggctctgtttcaacaacaacacaaaattttaaatagccaggtgtggtagtgtgcctgtagtcccagctactcaggaggcttgcttgagcctaggagtttgaggttacagagtgctatgattgcaccactgcactccagactgggcaacagagcagaacccttttcctaaaataaaaaaaaacaatggcaaatacacatgcttatttattatatatcaacagcacctttcattaatactagcacacgttccatagatatttggtacaagtacaatatatctccactcatggcattctggtaaagtgatggtccatgttaaaaatagctcattatcatgggtaaagggacttacttaaggctttatttcatagaaatcaggcatggctatcaagaagaacagaaatgcctggaaaacagactccagtgggtcacttcttggaaagaaagtttaatcagtattgacaaaaaagggggaacatgttccaggactatttgtgttattgaaagcaaggaatatagtgattgaattaaaaggggagaaataaaagcagatattgcattgcttcccagtggaaatactgtttgaatcatgtggtaggctgatcggactctattctggggtttcagttttctggacgtgtttctttttcgtatcctaggctgattcatgatagttttgaatgatagttatttttcaatttttcctttgatccccgaagactcttatttgtgtcaatctttatttagcctggccatcaattagtgtaaaacaaggggagatgatgtggattcaataaggtaagaaactgactagccagcgtcacacacaaagttatcaaacctggttcttagaatccacgttctcatgtctggctctttgttcaaagggaaaaaaaaatcaataggatggctggagggagacatttccctatcctcattgaagactgatgagctgtcagtctattacgtggtatcctgttgaggaacatgtgaacaattggaagagtttatctgatgactgaccagttgtgaaatttagcacccattaattgattcttaatgtgagaggattaacttgggaattgtgagtttctacgtgtggaaaggaaaacatattccctttactcagttactgtgcaaaaatcaataaccccaatttgcatgtaagtaagaaacaatatgtcccttgctcaaaaaaattaacatccttctagctcttcctttcttctccttacaactttgatatacttcttcgtgtgtgtgtgtgtgtgtgtgtgtgtgtgtgtgtgtgtgtgtgtgtgaatagccttcctaaaggcctgggctttttctaaatgtatgcctttaatttttatccaaaaacttctcttacagcaacatgtcttgtctattctattccagcacaaggcagatgcacagcaaatgtgagctgactctagtccttcttctgaaaacagccatgggaaatttaggcaaagaatgtgttgtctttgctaatactgctctttaagccccagacatagctaaactcttagctaattaccccctgggtcccaggctttcactggggccttttaaaatacacaaaaccaaagtgacggcaggaggccattagcactacataattcaagcaaacaataaatgtgtttattctgcctggctactgaccacctgccttcccatcccgccaggcaggtatctatatatacgatttcctttttcccagtcctgcagagaatgagcctctcctttgggcctcatcatttacaaaagaagcttgggcccctgacagcatgcatctcctcttatttcagctgctggtactcctgcctctaggaaagaccacacggcaccaggatggccgccagaatcagagttctctttcccccgtactcctgccaaggaatcaaagagagcttcccacaggcaaccatgaggaagctgaggagaagccagatctgtttgtcgcagtgccacaccttgtagccaccag

SEQ ID NO: 41538 - DNA, 2300 bp, Homo sapien
tccagtagatggtgacacaagaatccatgctgaaggctgccttgcctctctttaccagattcatcatcagcaatggactgcggaccgagcacggggtgtttgagatcacactggagactgtggacagagccctgcctgtggtaaccaggaacaaggggttgagactggcccaaggggccgtgggcctgctttcccctgacctccttcagctgaccgaccctgatacacctgcggagaacctcaccttcctcttggttcagctcccccagcatggccagctctacctgtgggggacagggctacttcaacacaatttcacccagcaggatgtggacagcaagaatgtggcctatcggcactcaggaggggactcccagactgactgctttactttcatggccacagatgggacaaaccaaggctttattgtgaatgggagagtgtgggaagaacctgttttattcaccattcaggcaagtatgaaaaacacagttcatttgccagagatgtgaaaacagtgacatcgagaattttttttttttttttttttttttgagagggagtctctctctgtcacccaggctgcagtgcagtggcgtgatcttggctcacttcaatctccacctcctgggctcaagcgattctcctgcctcagcctcctgagtagctgggcctatagtcatgtgccaccatgcccagctaacttttttgcatttttagtagagacacggtttcaccatgtcagtcaggctggtggcgaactcctgacttcaaatgatccacctgcctcggcctcccaaagtgctgggattacagtcgtgagctatcacgcctggccaagaactattttttaatttcttttcctctttcattcaagtacagattatgcatctacagcaaaacagcaatattaatatgaatgaaagagatatggtcccctcataggtgctaatgactgaccgtgagtgttgatggtagcacagaaaggagcaaaagccacacgctttggagtcagacagacctagctttgaatttctgctttgcaatgtattagccgtctgaccttaaagagttctttaactcttctgaatctacttttccttctttgaaaaacatgcctacagcattgtggtgagaattcagtaggattaggtatccaaagcagtagtatatggcctgaaacatatttgatgttgaaacttacaaggcagcatctttacactattacacatataataatgatgagggtaataatagcagcaattgcagttcctttagtgttaactgcaagctagacccactccacataaatcttatttgattctcataaaactcatatgaagcaagttttgttatttacattttatagatgagggtacaagttcaggagttaaataatttgatcaaatacacacaaaggcctcaagtctttctgatcccaaattctgtgtcctttctatgacactacactgccacatttgttgactgttacaaggattcctggagggcataatgtgtttttcttttttaagtcaaaacacatcaagtatattctggctctcaaacccttgaatctactctccttggaagtagttcaccctcttctacacactcacaccaaacacaaaatagataaaatttatctctcacttcagaatactttctgactagtaaaatagttacatttttccttgctctgagagagagagagagagagagagagagagagagagagagagagagagagagatttattttaggaaattggctcattggctcatgcaattttagggcctggcatgtccgaaatacacagggcacgttggcaggctacaaatttcagcaggagttaacgttgcaatctttagcccaaaggcagtctggaggcaacattccttcctttttggggggcttcagtcttttctcttaaagcctacaactgattggttgaagcccacttgcattatggagggtgatctctttactcaaaatgtactgatgtaaacgtaatcccatctaatacacaccctgcaaagttgacacatgaaatgaagcctcacagactcttatctatgagggaagtcttgagatcatagagtggatgctggatgagtccttggcagtcaggaggtccaaaaaatgcaaagaaatgataatgcactgggagaagaaagaagatattgacatcgtgaacacagtaagaagcactttgtattaaaattattgtttttatttttatcatatgttttaattgatcttagtcactttcccttttcagtctgttagtgtcttttttttat

SEQ ID NO: 41539 - DNA, 2300 bp, Homo sapien
gtgtgtgtgttgtgtgtgagtgtgtgtgggtgttgatactaaaaacagtactataaataccataaaactaaatataagaaaacaaattttttatgcttgcaagtattcagtttttagtagttaaaaggtttccttttaaatacattgattcaagttaaaaattgaattgatagaaaactagtaaataataagagtacacatagtacaggcatatggcaaaaatatggtttcaattactcaagattaggaaacaaggttttagggagaaaataaacaataaaggctgaaaagcattgatttggtgcaatcccttatttacacataggaaagctagcattgcctgaacacctgcaatgcaccagagaatgtcctggactttttttatatgttatttttcttaagccttatgacaccaccttgcgagagatgcaatagtgttcccattgtacacatgagaaaaccaaggttccaagaggcaaaggaagtcacctaaactgacataactgagtatcactgctgaatttggggctcagagctcatttccagtagaaggttctttccattatacctcgttgtaccaaaaatttgtggagaatatgcatttgtgtgaaggaacctcctcaatgtgtcattctgatatttggccagcagttttacatatttataatggaagagcctagcgtctgcccaagacccaaattttaatcttgtcatttcactaacccaatcacggactgctatgttgtttgtcaagtggcgctaaaccaaagctgaaagcctgttttaatgaaagtgtgatcatggtgctttttaaaaattaaatatatgcaaccaatctaatcacctaaatttatgttgcttgctgttaaatttggcaaggaatttggctgggtagaagagataaattctgtggcagaggattttcccccttccatttttaatgtaagctatggcagcattaattaaatgggggagtttaatagtcagattttaccttctgcaaaaatattttgtgaatcataaatttctcctgcattgtttggtgctgctggcctggaagaaagatttggcagcatgttctaggacagatgacaccgagtgattagcaagctgacttcagctgctggcagccgggtactaaaagaacatgctaatgtcctccattttgacatgccggctggactttttttttttttttttctgaggagctggcgctatttatgattccatttttatctcttaaatgccatgacagatggcagcttcttcagccaactctattgccaggcaatgcagaaagcttgaaagcaccgtggtaatggtgaaatcagaccaggcaggcaccccagtcaaatctgagagttattccccaaatttcatgagagcggtggtcatcttggctgcatctcttctcagggggatgtaacaagggaaattaaacaaaatggatccacagaaggagctgctaccaccaacttcttcacctcagaatggataccaacatagcaatggctttatggttttaaacattgagaatgtatttggaggatttaggggagggggtatttggaagaccatctgattgatcagcttttccagacatgaacagcactgaccttttttcacgtgtactgctagctttattttgactgggaactcaaccgtaaccattcattctgtccctctctctgatgatgtctctctgcctgtgagtagtttgcactgttacttgtgaaagtggaatgatgttatttgatccagtcatgtttagaaattgcatcattttcacccctggcctattagctttaggtcagcactgacagctgccttggtgtcccagataggagcgctggcctcagaaaacatatttcttactcttctgtggtctgtggcccgcgtgccctcactcccatctgtctgatggcaggctgcctgtttccaacgtgggcagatcacgatcttccagcagggaggggtttgagatggacagcctggatcataagacaactgcggtgacctcacagaggccatgcacgcatcgagtagatgtggccgtcctgagatgagctttgaggaccccgtcaggcattcttgcaattcagtctgcagggaggaaagtcagaattagatattcaagatggccgcctctgatggagtccctggcactcactcaagcttgcatttgggtttgttgctcctggtcccatctctccccttctttcttcttccttctctgctgatatttgacatacttttaatagtgcacaatgtctatagctctacaattaatgctaatgcta

SEQ ID NO: 41540 - DNA, 2300 bp, Homo sapien
cgctgctcttgtgccctgctcaggggtggttttatttcctgataacccctaatcacgttgtcagctcccaagtctgaggtcagcaaggctcttcctataaaccctctcatcggctgtgttattgctcttttctggtacacagaggtgtttgtattgcttttctttatttatttgttttcatgtttattatttcaattgtggtatgtataacctttctattcctggactcatcctcttctcttgccatagtattgcttcccatggccatctagtgttagagactcagtggaaaactatctttacgttgcaatagataacacttctgtctgctgccatcgtcaaaatttaataggcacattcctaattttttatatgaattgttggtgaaggcattggctatgcctttcagagaatgctacattctacagcaattcaacaaaaatcattcatatttacaatccaaaatgatatgccaatctccaacacacatttgatatttttcattatcactccaactagggctagaagtaaaatgatttctttaaaaatgaattttgtgccagcactaagttcagcagcacatgcttttaggggaagaattctttgttgtttctttgactagttctttttaaattccctagcttggcatttcaatctgttcaaacagtattttattgattgaagttgataattgtattatttccaggcccttattcatttgtggcagatagaaggaatgacatttgtataaacaggtacttcagatttcaggacattttgactgatctaactcttaactgcctatttcagaatatgttcagcacagttaggccaagcttcatgtatataattaactttggaaagattatatctcctgcggactttttgaaatactttacaatctaagtttgttattttttgcttagcatgcttaagttatttttcccatagaagtgatataaagacatttatctctgtttctagactaatctgtaaaccttatttagctcttaatctatctataaactttataatctatctataaactaatctataaaccttattagtttctagactaatctataaaccttatttagatgttagaataagcatgttgatgcaaccgtttgtacatagtatacaattcctttgtcaaatggaatccgagtctcaactaacagcttctaaaaccatcttcatttctttgcaggtaagatattcacaacctgggcaattttgaaaatcagttggggaataaaattgtctattatgctgtgtttcttaactgtcattattaaggctttatttcttgccttttcaggattaatatatgactcacacattgtcactatatttatttaataataactgtgtttagtaaataatatctgttcacttataaagagcttagtgattcttaactttcacctacttattctcagagcaaataaaatgaatcaagaaattcttgaagatttgaaatctccgatgactttgagtaagtgtatatgcaccattcattgctaaagtaaccacaaagcatgtttttaaaatacataatttttttctcccttcttatgcattcttttcttctttacatttttctcttttctttcttccttcctcatgtaattttcttctcctttttcattttcctctctcttttccttatggcttccaaagaaaggcatatggtgttgtgaccttgttacgggaaaccacatctaggttgaattggattcacagtgttctatatttttggcaaaggtttaggatagccagacatgtcttaatataaacagttcccccaaagtgagttaatacttcaaattctctctttatggttaatttagaaggccagatggtaggccattatctttttttttcctggtgggaataaaatacaggaaagcattttattaaacagttgttaaggattaagactttcacagaccactgaatactgacaagttaactatgtgaatctctgttgagaggacagttcttggccagtgatatatctgcattattgggatcacgcactatatgcaaatggatcagattaatgggatttttatgggttttcgaaaagagccagacacacaaaaagccttacaaatggaagaactaaggtggtacttaaaaacagcaccttaggatctagttccatcctatcttttcccttaaatgccatgacaaaagttaaaacgggccctgtcccttctgaatgctgggcttctcatctaaatttaaataaaaacctttgaagatgggaatgtgttggaagaaaagaagggcag

SEQ ID NO: 41541 - DNA, 2300 bp, Homo sapien
cttattttgttgttgttttgttgttgttgttgttgtagagatggggtttcaccatgttgctcaggttggtctccaactcctgggtccaagtgatccacccacatcggcctcccatagtgttgggattataggcgtgagccactgcacctggccagactgtgaagtttcaatggataaaagtaataggtaaaacctcaaaggaaaatattagcagattttactacaaaaaaagaaaacttttgtatgctaaaacatcataaaatttaaaagtaataatctaggatggtatttttcataaatatggcaagaataatgttaatagtttttctgtttcaaaatctcagtagcgtaagaaaaattctaaaactctagcaggaaaaaatggacataggcaattcaagaaagaagaaatatgcatcatcactaacttttttatttttatttttttgagatggagtctcgctccttcaccctggctggagtgcagcatcatgatctcggctcactgcaacctccgcctcctgagttcaagtgattctcgtgtctcagcctcctgagtagctagaattacaggcgcccaccaccaggcccagctatttttgtatttttagtagagatggggtttcaccatgttggccaggctggtctcgaactcctgacctcaagtgatttgccagccttggactcccaaagtgctgggattgcaggcatgagccaccgcacccagcccatcatcactagcatttgaaaagtaaaagacaaagtttaaactatgagatactcttctgtcagactgtcagtgcttctatttatagtcaggctgacttttttttacatccccagcatcggagggaaaatatgagtcaaaatttacaacaaagttgtgaaacaggagatattcctatgtagatgtgtgtggctatttatattttttaaaaaatttcaaggtgcatgtttttgccttttagatttaattattaaaatttagcttgatagaaactggttttattttttataactccaatgtattcttagttttttacaaaatttaacgtatgttaacaagggttcattgtaaattaatttctccttataatacttacttttttttctaataaaaccggcaagaaacacctatacaaaatgctaaaactggcaatgctcttgatattgttagggtttctattttttgtccttcctatttgtgttgatagtagaatatcaataactagatatattttcatcagaaacaatcaagaggcactccaacaaaagtctccatttcctaccactttcagggtctgtagagggtgacggagcggtgtaggaattggtaatggatgccatgctaagaaagatgaacccttctgctgttccccccacctcctttctgttagactcactttattcatgcccattgcaacccagacaaacgcatctcagacccaggaaagtatgaagatagttctccactgacttaagagcgactctggaaaatccagttcccttcgttacatggaggacgttaaactgcataaattttcggttatttgattttgacattgttttattgtgaacggcctgggtgtttcgttctaacaacaactattctctgctacaaactaaagtccagaatccagcctgacctgccgaattctcagaaaggggttcctggaagatgctgggaacttggtgtgtgtgaacagcaacactgagtttgggaaaagcaagaggtagccttttgtctcctcctgtccgtgctgtttagttaaagctcaatcaggataataagtctcttctgtcagaaaaccgcgctaatgagttgcaatttctcaacatctttgggctgcttctgaaaactaattactgggaactggagagtgtaagaggatacgcaccctgcggatatgtagttaatacacgcttgtctcacaggcgctgaggggacaggctacttcattcccccaaagaggatccgctggcttttcccctccccatctttcaagtttttctttttgaacagctttgttaattgaggttaagtggtttggttgtcatagaaaccagtattcctcacaggctgattgtgtcaacggcatcattaatctgttttctcaactgcctcttcctcatccatctaattgcagtccccctccctgcctttttaatgacatcattttggacacttttaggacatcatacgtgagattcagcacaatttattttctattcaaattccatattactatgtgagttgccgtcttcccactccaacggagtaagatctccaaaggtgggag

SEQ ID NO: 41542 - DNA, 2300 bp, Homo sapien
catacgtgctgcacttcttaaaggcctcccaatagcctgctttgcggagttctggcttttacttgctgtctactatgatcacctgatttgtgcttcacatacatatctgtgaagtttgctttttctatttaaagtgcccttaaactttcatttgatcgtgtttatctgcagatggtcagtgtcattggcatatttgaacattattctgccctccctccgccaaactccttatgtactagattaagaaattttatttttgagatgatgattttaatttgattttacagacattcttttttacaaagtacagttgttagagttatagaagagtgattcacatctttgagaagatagatttcatgattaatatatatattttttgagacagagtttcgctcttgttgcccaggctggagtgcaattgcacgatctaggctcactgcaacctctgcctcccaggttcaagcaattctcctgcctcagcctcccaagtagctgggattacaggcatgtgccaccatgcccagctaattttgtatttttagtagagatggggtttctccatgttggtcagtctggtctcgaactcccaacttcaggtgatctggccgccttggcctcccaaagtgctgggattacaggcgtgagccaccatgcctggcccaatattttctaagataaaattattctgagaaatctagtggaatcttttccattgctttgttattaatgtttcaacactgactttctcaactaggccagtattactatttaaaggtttttagaggctggcaatggtggctcacgcctgtaatcctaaaactttgggaagccaaagttggggggcgtcacttgggaccaggggtttgaggccagcctgggcaatacagtgagaacctgtctttacaaaaaaaaaaaaaaaaaaaaaaatgagccgtgcatggtggagtgcacttgtagtcctagctactagggagacttaggtgggataattgcttgatcccaggagtttgaggctacagtgagctaagatcatgccactgcactccaccccaggtgacagagtgagaccctgtctcaaaaaaaaaaaaaaaaaaaaaaaaaatatatatatatatatatatatatatatatatatatatatatatataaaataaaggtttgtggacacatgttacccatttagagaataatttatttttgaatgtgtatgatacctaagtgatatgcatatatataattaagacattttaaatctcttcagatatttcttcataagatacatgtatctatagatagctatatacaaaactacttacaaataataaatagacattgttttatacagttctttccaaagaaatgcaggatttcttatcctagtccttcctccccgagtccagttatttacatatttttgtctttaagtgttagattgcttgtttctgctgcctattgttggtagttttgtcttttacacatttgctgttagatttagttattttgaaatgttgaacttgaaatgtaatgaaaaggacacatcagaatttatcatcagggaagatatcttttatgttgagcagctgctatctgatcttgacagactgtcctcttagaggactgttgaagtccattctagtcattttgtaacttcataactgcagaaagaaatgatgcaaggactgtttagtggactgagatggctgagcaggttcttggcctgaattatccagaggagataggtggatctagcttcagaggaagtctacaccccattcccttctgcttacaatgtacccatgatatgtgtttagcacagtaatactgtaacaggacatcacatggaaaaatcaaagcagctggctcactgtatttaactgaaaagaatgcctacagattggatatttaatagggaaaattaaggcactttaataacaaacttcattatgtgaaacttgttgaatattaacatacaatataccttgtatattaatgccatagtttttagaaacactaatttaaacaacaaatttaaggggtgctggcatatcccagtgacaccttcagttttattgctgcttagtattttctagtaaattagttttaattattggtagtctgttgggcaccatttgggaaagaaataaattggtctcagtgtagcagacttgtagccaaaaactttgaataaaaaataagtataataaagaatattatttcatttttaaaggaattgtattattttgaagtgctgtgtggttgatatggtttggttgtgtctctacccaaatctcttattg

SEQ ID NO: 41543 - DNA, 2300 bp, Homo sapien
aattttcatctgttctcagctaaaatttctatattaaggtgatctattttatcatatatgagatttttttctttgcagaaaatgaaattttgggctaaataagttaatattgctgttaaaaccagaaattccaattaggaatctgagacagccacctgcattcttaagaattagtgtgtcctagagctttcttaaactaaagttataggtgagactggtctttattttattccccagatataaaaatgatgaaataatagttttcatcttttccatgagtaggtctttactgtatgttaatgaaatttggagagctggttataaatatccccatgtcttatgaagactgagtcttttcctgttaaatttctaggtacaggagaagtgaatgttgcggaagcagagcgtctcctggcacccttcctccagcagtttccaaatgtacgctcagtatttcaaagtgtatgtttcaaccataattaatcagccagtgttgactgttgaacagtgtgttttcttccttgctctgcagggctcactcgtgttgttttatcatgcccgaatagagttgctgaaagggaatcttgaagaggtaatttattaggtgggaattatttgggggagttgtctgtatggcgactcctacatgagtcgctgtgacctacttattcaacaaaagtaaacttggctatatggactagacaaaaataaagaaaaaaatatataagtaaaaagccaaaacttttaacttgtatatacattctattatataaaatctatgcagtggattactgaatatagtctacatttatacatagagtacattaagcactttagggtaatatataccaaataacaagctcagggattttcaagaaactgtgactgttaccaatttctgcattacacactgactttggaatctagcccctgtgtgacatgcaggtctactacgtgtgggctccgtatcaaaggacccctcaaaaaacgaattccctcaaaaacgaagcgtcgaggtcagaagtagaaaagtaaggagccatttatgtatatacattcacaaaccattttttccacacaaatgggatcaaaatgtatttttctgtgatttttttttcactgtttacaatatgtcttggatctctttccagatcagtatgcctaaatgtctcctattctttttgatggctgggtttcatttcatgggatggatatactatacctattaaagtggtccatagacatttggccactacaaactgttgtgaacatcattgtatgtatatttctgtgcacaggtacatttatagaagacagattatgattagtagaattcctgggccaaaaggtggttgcatttttataaatccagccaaattgtcctcctcacttaagattgttccagtgtaaactccagtaaacatataaaaatatttttttccaatgctctttgctggctcaggacattacgtgatggctaaaaatgagaatctaatttttaagtttatattgcctagtttacaaatttatccacatgtatatctgtcatctatatatttttttctgatttgcctatttacatctttgcctgtttcctgttgagttttctttttcttacagaattttattaaattgatgaatgataaaagagttaaccttttgccagttacgtagatagtgacatcttcttcctgtctgttgcctgtaactctgcctacagtgttttgtcctatggaagttctaactttattgtcagtcttttcttaaatgatttctgcatttgatatcttccttggaatggaacctccccactcccacattacaaagtgtcaaggccctctcacaaaattaaagaaagaggcagaacttaactgtatcattgcctgtaaggaaaagaacatatcatcatattgagaggtttaatgagtgataattttgtcctttttgtactaagtgttttatgtatttttccattaggttattatctccttgtctaatatctggacgatcaactttgtgtacttgatttacaggcacaagaagtatttcaaaaatgcatttcagttcaagaagaatggaaacagtttcaccatctctgctactgggagctaatgtggattaatgttttccaacaaaactggatgcaggcatattactattcagatctgctttgcaaagagagtaaatggtccaaggtaaagtgcaatactttcattaatgtcatctgtttgctaatacatggccaggatgattttcatttaggactgtttgctcagtagtatgataccacagtgttttct

SEQ ID NO: 41544 - DNA, 2300 bp, Homo sapien
aatgagctgttgggtacacctcccagacggggtggtggccaggcagaggggctcctcacttcccagcaggggcggccgggcagaggcgcccctcacctcccagacggggcggctggccgggcggggggctgacccccccacctccctcctggatggggcagctggccgggcggggggctgacccccccacctccctgccagatggggcggctggctgggcggggggctgaccccccgacttccctcccggatggggcggctggcctggcgggggctgacccccacctccctcccggacggggtggctgccgggcagagacgctcctcacttcccagacggggtggctgccggatggaggggctcctcacttctcagatggggcggctgccgggcagagggactcctcacttctcagacggggcggccgggcagagacactcctcacctcccagatggggtcgcggccgggcagaggcgctcctcacatcccagacggggcggcgggtcagaggcgctcctcacatcccagacggggcagcggggcagaggcgctccccacatctcagacgatgggcggcggggcagagacgctcctcacttcctagatgggatggcggcggggaagaggcgctcctcacttcctagatgggatggcagccaggcagagacgctcctcactttccagactgggcagccaggcagaggggctcctcacatcccagaggatgggcggccaggcagagacgctcctcacttcccagacggggtggcggccgggcagaggctgcaatctcggctctttgggaggccaaggcaggcggctgggaggtggatgttgtagcgagccgagatcacgccactgcactccagcctgggcaccattgagcactgagcgaacgagactccgtctgcaatcccggcacctcgggaggccgaggctggcggatcactggcggttaggagctggagaccagcccggccaacacagcgaaaccccgtctccaccaaaaaaatacgaaaaccagtcaggcgtggcggcgtgcgcctgcaatcgcaggcactgggcaggctgaggcaggagaatcaggcagggaggttgcagtgagcccagatggcagcagtacagtccagcttcggctcggcatcagagggagaccgtggaaagagagggagagggagaccgtggggagagagagggagagggagagggagagggcgaggttttcttctcccttctccttgtcgccgtgtgttccggtgtcatggcaccggccaggtggaaaccacatctgcggatcattgggaatgttggccatgcttctcgaaccagttttctctcacggaggacctagccgtcgcgtggggctagaaaaggtcctgaagcaactgaagatttctcgccagggctacaccctggtgttatctgaaggcttctggactgaccccgcctccaactgcccggctgggtgtccgcaacaggatctacagctgtcctatcgcaaaatttcctctttccctatccacaaatgccatgtctcctatcctctctgtgtatgcagtgtttgagaatttttatagttcagggaaagagtccccagagtgttcgaaccgtgcctgagcggccgccgtcgtctcccggcaccactggccctgcagcagccagttgagaagggcggaggctgattccaatgaagtggcagaacgttaggcggcctctccaaaaagccagctacgtcgccgttagccaaggtttgagggtcttctccttctcttcgagggcccaacctcccctccagatttagtacaccagaggcgtcgcagcaacggctgctgcctgcgcgcctcagctaggcgggctctgtttttgttttttaaaggatattagtctcttccctcatttcttggattactttcttggtttcattgtgttgagttttcaaccttttcttggatctcattgagcttgcttgcagtccatactctgaattatttatctgccgtttctgagtttttatttggttaaggtctgttgctagacagctagtgtgaccctttggtgatgtcacaacatttagatttttcatggtgccagaatttttatgttggtttcttctcatctagagaggctactgctttttctttttgaatttattttcatttagatgggcgtcccccccacctcccgtttccacctcttctaggggtgtaactatagcgttagtatgttgggtagggtcttttgggttcgcttctaaggccctgcgcgattctgtctgcaggttttatattggtctgtgca

SEQ ID NO: 41545 - DNA, 2300 bp, Homo sapien
tagagactgggtttcaccatgttggtaaggctggtctcgaacttctgacctcgtgatccgctcgcctcggtctcccaaagtgttgggattacaggcatgagccactgcacctggagcttttttattgagtacctgcactgatgaataagatagtgcctccttctaagcaatttacagattagtgggaacccaggaggcggaggttgcagtgagccaagatcgagccattgcactccagcctgggagatgagagtgaaactgtctctcaaaaaaaaaaagtattattatttagaaattgggtcttgctatgttgctcaggctagtctcgaactcctaaactcaagttagcctccttcctcagtctcccagtgctgtaatcccatacaggcgtgagccaccacacctagcctgtgtcagctagtttttttaaaacagctttactaagatataatttacataatcataagttccacctattgtaagtacacaattcaaggatttttagacaattcagagagttgagcaaccatcacacgatctaacccattttttcaatgtttctgctgtagaaaccattttattattctagtacaaaagtacatgccaagccattaaaattgtacagcaagtattaaggatgcaaagtgactcactgaaaatgtatgtaatggacttgcacagacaactgctctactgacacagaaagaaagagagggagggtggctagagccagtacagtacaaagcaatggttatcagctaggccctagagttagactgctggggttcagatgctggcatccctacttacttaactgctgtctggcctcaggcatattacttgaactctctgagcctcagtttactcatctgaaagagaacagcaccctactttatggggttatgaagaataaatgaaatactatatgcaagaggttcagtagagtcctggcacatagtaaggactcaagaactattagctgtttttacagttatcactggatgactattaaatagcctttcatgagccagacatggaagaccacatgctctaattaaatttatatgaaattctagagaaggcaaatcgatgttgatagcagatcagtgattgacagaggctagggagcggaggtaggaaattgacagcaaagggtcacagaaaacttttcaggatgttctatattatgactgggatgctttgtaaacacttgtcactgaatcacacatttaacttggtgcatttttctgtatgtaaagtaaatctgacctctctcccccaaactcttaaagatctagcttttaattttccagttattttacatgtcagaagcaaggttcagtttctaaactcagccaacaaatatctgttgagcacctacgatgtgcaagacactgttctgggtgttggggatacagtcttgaagaggacagatagcatcctacccccatggagtttatagttcaagcacgaattatacacctatgtttggagttacaaaatacaggatgctatggggagaatacactgtccgggtagggggaagtagaggagttccaatatgtataaatctctgtcccgcgtttttttctattttttgaacacagaagcaagcagagtccttccacctacagtccaggtgggtggtgtgtcagaggcctctcggggaccagtgaccgtgacccaaggctgccctcaggccacaccatctgcgagatgcggtggccacctggcgagggaaaaggactggcaccggaccaaagaccaggtggatgcttccacggaccccaggtggggcgctgctttgaccttggcttcgtcatgcccgcgctctctagcttctttccaggtgtgcccagccaccgcagagaacaggcggcaggaaagcttaggaaaccctcccagagggcgtgccagaccgggaaactttatctgggaggtgactccacccacttgggcggggctgccgcccgctgggggccgggcaagtggcccggccagcggcgcggcgtccggggaggaaatggatgctgtgctggcctgccggctccgggggcggggaaatcgagtagctgcactcaggccccgcccgagacccggagggagcgccgggccgtccccttttgccctcctttgcgctgggctgagcccagagccgagagcaggagtcggctctgagttccctgcttggtttttgggtggcagcagccagaggaggaatatggcgctcttaggcagccgagcggagctggaagcggacgaggtacgatccgatggggattgcgggcccggcccctgaa

SEQ ID NO: 41546 - DNA, 2300 bp, Homo sapien
tgttgccacctgctgttcattctcccatagctccatccataggagcaactgcctagctgaaagactacatttctcaggactcctttgcaattaggaatggccagtgtaactaaattctggccaatgaaattcatttgacatccgggaaggctatttgaaggaaaatgactcaactagggcatgggcccttttgccattattccagtgaacatatgaataataagaaagcaaaacagccttattgctgatattaagaaagttgcagtagtctgatctaaccagccacaacattctcttaacccaaagcctaatccagagcaaagctttaactcttcaattccatgaaggctgagagaggtgagaaggctgtagaagaaaagttgcaagctagcagagattggttcatgatgtttaaggaaagaagccatctccaaaacataaaagtacaaggtgaggcagtgagtattgatgaagaagctgcagcaagttatccaaaagatctagctcagatcattgatgaagttggctacactaaacaaaagattttcaatgtagacaaaacagccttctattggaagaagatgccacatagaatttttgtggctacagaggagaagtcaaggcctgacttcaaagcttcaaagaataggctgactctctcattagagactaatgcaactgatgactttaaattgaagccaatgctcatttaccattcaaaaaataccaagtcccagccgggcgcagtggctcacgcctgtaatcccagcactttgggaggccaaggcaggcagatcatgaggtcaagagattgagactatcctggccaacatggtgaatccctgtctctactaaaaatataaaaattagctgagggtggtggtgcgtgcctgtagtcccagctactcaggaggctgaggcaggagaatcgcttgaacccgggagatggcagttgcagtgagccaagactgtgccactgcactccaccctggcaacagagcaacactccatctcaaaaaaaaaaaaaaaaaaaaccaaggcccttaaaagttatattaaatctactctgccagtgctctataaatgaaacaacgaaacttggatgatggcacatctgtttacagaattgtttactgaatattttaggatcactgttgagacctattgctcagaaaaaagattcatttcaaaatattgctcattgacaatgcagctagttacccaagaattctgatggaaatgtacaaggaaattaatgttgttttcatgcccactagcaaaaaatccattctgcagtccatgaatcaaggtgtaattttgactttcaagacttagtatttaagaaatacttatttcctaaggctataggttccatagatagtgattcctctgatggatctggtaaaggtatattgagaacccataaaggattcactatcctagatgccattaagaacatttgtaattcatgggaggaggtcaaaatatcaacattaacaggagtttagaagaagttgactccagtcctcatggatgactttgaggggttcaagatttcagtggaggaagtcactgcagatgtggaagaaatagcaagagaagtagaatcagaagtggaacctgaagatgtgactaaattgctacactctcatgatgaaaattgaatggataaggtggtggtttttttggttggttttgttttgttttgttttgttttgttttgttttgttttagagatagggtctcactctgtcacctaggctggagtacagcagcataatcatagctcactacaggctcagactcctgggctctaacaatcctcccacctcaacttcccaagtagctaggacaaccagcaagcaccaccaccacacccaactgatttttttcctgtagagatgagatctcactatgttgcccagaccagtcttaaactcctggctttaagcaattctcctctgttttagtccgttttcacactgctgtaatgacatgccggagactaggtaatttgtaaaggaaagaggtttgactcacagttccacatggttgggaaggcctcaggaaacttacaatcatggcagaaggggaagcaagcacatcttacatggcagcaggcaagagagtgagcgtgtgtaggaagaggaatagtcaaacacttagaaaaccatcagatcttgtgagaactcactcactgtcacaagaatagcatggggaaacctccctcatgatacagtcatgtcccaacaggtccctccctcaacatgtggggattgtggggattttggggattacaa

SEQ ID NO: 41547 - DNA, 2300 bp, Homo sapien
cacggttataataaaaagttcagataagtgttggcaaggatgtggagaatcctgctggggaggggagtaaaatgggacagccactttaaaaaaatctggcagttcctcaaatagttgaaaatagagttccataaatacagaaatcccttggtatctgcagggtggactgtttcgaagacccctgtggactccaaaattgacagatgctcttcttgcagtcagccctgtggaatccgcccataggaaaattcctcttatcctcaggttctgcaacctgggaatactgtaatttttgatatgtggttggttgaattggaggatgcagaacccacagatagggagggctgactgtatactactgggcacatgcccaagagaaatgaaaacgtatttgcacaaaaatgtgtacatgaatgttcatagcaacgccaaaaggtaaaaactttttgataaataaaatgtggcatatacatacaatgcaatattattcagccaaaaaaggaatgaagtactgacacatactacaaaatggatgaacgtgttacaggtggcaggtatccaagttaccagggcaaatctgtatgggtctgcagcaacttcagttcttgcctcctcagaagaaagaatttgaccgaggggcaataaggcacaaaaagagactgaggcaagtttcagagcaggagtggaagcttatttaaaaggcctttaggaaagaaaggaaagcacgctcggaagagtcccaagctgtcactgaggtcaactgtgatattgacctcgatcctaggactttacaggctggctcctttcccatgattcttcccttagggtgggctgcctccatgcgcagtgccctccttacccttgggaagtgagcacagcgcaatatgtatgaagttgtatgcgtgcccatctgaggctttcttcccttttccgatagagtccccctgaaaggtcatactccccgattttgtctcttaatgcatatgcccaggaagttgcttctccctgtcacctgcattcaacgagcactttagtgcaacaggtgtgggccatcaggaaatggcctctccctggcaccggctgccaatttatcacttttagaggcaatgtgataaatgcctaagcatcaccccacattcctagtgggtgagggaagagccctctcctgccctgctcatgcctaactacctgtaacaaaccttgtaaacattaagccagccaccaaaagaccatataattccgtttatattaaatgtccagattagttaaatctagagagacaaagtaggttcttggttggctagggctggaggagttgggaggatcaggggtgatagctaaaaagtacaagtttcttctttcgagtggtaaaaatgctctcaaatagtggtgatggttgcccaagcctgtgaatataccaaaaatcactgaacacttcaaatgggtgaattatatggcatgtgattacagtctaataaataaatagtatgtcctgctgtatccttcagggcctctgagaaatggagagagctccatctgaagccagactgagttccgatcctgcttctattttccccgcaggtaaatccttcctcaacagcaacacggggtgatacgccctatccggaaaggttgttgtaatttttaaaaacattaaaaacatacattagggttaatcatgtagcgtgtgatacacagacgctctgaaacactactgcacacgcacaccaacatggggcctctgcggagcttgtgaaagaaccagatctggagggctggtcgtgtccctggtctcggccctcgccctccttgtttcttaggctctaaagcaatcaggcagcagagcagtccttgaaccccagtcaagaaaaagccctgcaccccttagtccgaaagccgcaaggaacggggcctaagcgcctggcgaggccgccctaccgggcagagacagttgctacgtaactcggggaccagaaacccagccccacccgctgcggttaaccgacagccgcaacggttcccgcaccgcccgggtcggagaacaatgctgcgccctgcacgtagagcctcgcggtgccgcgccctggggcgggcctgcccatggcctgccgggaaatgtagtttctgatgccctgcccgcgccgcctcgccgctcgccggccgggcgccccaagcaactacaacttccatcacgctctgcgaggccttgatctgcaggcttttgcaggggaaggagtggggcgaacatggctgaaggaagccgaggtggccctacgtgtagcggggtgggtggcaggcag

SEQ ID NO: 41548 - DNA, 2300 bp, Homo sapien
gttacccccagcctctttctactaacatctaccttgaaacatcaagaactggttaaataatcatttttacccccttcttgctgagcaacctatagtagcttcctactacacacattaaattcatattcagaatgagaagcttcaagacatttcaccaacccttccttctcctctgccaatttctctttttgctccacttggaactctctgcatattgcccaggtatacttagtttctcgaaactccttacaggacattttactttgggactgtcttctttcattcctttttaaagacatgctgtatcgctttcaaaaaattctcaatttttaccaattcaaaaaaaatttcctaattcatttccagttgagtcccgtatttaaaacagtattatctaggtgctaatatatgtcttattattcttatttttatatgtcttaacattctttttaaaaatattttcagcctctctaaaggatcaaaaaattaacctttaaaatcccttgaagagcattttaagagagaaaatatttgaggtttagtaacacttacacattgtaccacctaccagctcctattctactagggaaataaaatttagatgcagctaaaatttagttagggcccaaactcacatcctatctaaaaggtttctgttttcctgtcattgttttctacccttcgcattttgcattcagtagggttgcatttttcttaatagttcttggtgatgcaaatgcaaaagaaatgaaatagggctctctcatactacaatttcaaggaaaaggagactacgaggcccattcagcgaggtgcaagaggcctagatgcagcacaccctgcaaccgccgcatgctccaatttcatcttagggttttcgtacagctcctcttttttggatgatgcaaaccgcgcaaaagcagcattcaaacctccccaccctggaaacgatacaagaacatgaatctttactgccactttctccctaacacgcagccaagggagagaggcccggatacccgcccccaaaaccgcgtccacaacaatcatttcctccctccccgccttttacatacagtacacatacaaatacacacacgcagagaagccagcaggggcgggccgggcccgaccactccgcaaaccgcagggggaacttgcggcaggccgagctattttcgcccagtcctttcttcttcgcttgcgtcttcctctccatctgcatgcacctgttacatgaaagcgaacttggggacgtagggtttccagaaaatccgcttcggagccacacagcttcgccgggtgctgcaacatcccccctctctcggtaaacagttggtcgcgccccagtgctagcgggcgccgagcgggagccgcgcgggagcagcgcagctacggcggcggcagcggcggcgcggttgcgattccgagccgttgagacgcctctgcggcagctggtggcgcaggtggcttgcgtggacgcgggtagaggcgaccggccagcaaccgcagcgtcggcgcccgcggccccggcaggtgagcgggcgacggggactcgccccgcccccccctcggtggcgtcgctcctggctgtagcggggaagtggacgcggcccgcccgggagccgagggggccgaggctgcagccgctgggcagcaggttgcgggggaggccttgcgtgggcggaagggggccgctcgcttctcggaatccctgcctttttctctcccatgcaccccctcccttttggggcttaagctcggtggaaaaagcccggagaaagatggggcgggcagacgggcgatttctggccgggcagcatccctgcttcaggtggtggcgtctcttcggtggcggggtggaggacctgctccagcgcggaggcagcgcactggcgggggaggagcgggaggcggccgtcccctcgctctcccacccccacccgccggttcccctccccctccccttgcggcccctcccttcggggttcttcgctttaaccgccctcggtgctctccctagcaggcgcgtcgggacgccccgaggcatcctcccccgcccgcgggcccggtagctgggcccgcgtccgccgcccgcatccccgcgccgccgcatctcctcgccgcctcccgggcttcggacccccggtctcgcccccgaaacatgactcgcgatttcaaacctggagacctcatcttcgccaagatgaaaggttatccccattggccagctcgagtaagtgatttgtagccctcgcgcttagcagtgctaccctcctctccagaggcctgctgcccac

SEQ ID NO: 41549 - DNA, 2300 bp, Homo sapien
cctgttttgcctttattgtttaaagggtatctcctgttgttcacaaactaccacaggttgaagcggacaaaacttaaaggcagcaggagctaagtatggtacttcctttttttaaaacaacaaaaacaacagaaaatactaatagtaaaacatcaatgcttttccattttcccttttttatttcttttctgaggtcccctctaacactaactaccccctctttacctgttaatcctaccattagtactaataaaaagttatctttaacgttaattataacttgttatatatctgtttttcttagtttgaagtttttacagtctgaggtatcctctaaagcagtttctcaaacttgaatatgcgtaagaatcacctagggatcctgttaaaacgcagattatgatttagaaggcctggggaaggtctgagctttacctgagctcccaggtaaagcccttgctgctgggccttggaccacacttgaagtagcaaggccttacagggtttagaacaaataaagtgcatacacacaaaaaaatgattgctggatgctgctttggtctctcttactctgtatcttgagcttttcttcaatacatctttttccaccttttcctatgcataatttatagccaacacctgacaatcattcctttgtgtaattacttagttgtgctcttccttcccttttcttagtcaccattctcactgagaaatgcgtcatttcatgagtactccagttacccccagcctctttctactaacatctaccttgaaacatcaagaactggttaaataatcatttttacccccttcttgctgagcaacctatagtagcttcctactacacacattaaattcatattcagaatgagaagcttcaagacatttcaccaacccttccttctcctctgccaatttctctttttgctccacttggaactctctgcatattgcccaggtatacttagtttctcgaaactccttacaggacattttactttgggactgtcttctttcattcctttttaaagacatgctgtatcgctttcaaaaaattctcaatttttaccaattcaaaaaaaatttcctaattcatttccagttgagtcccgtatttaaaacagtattatctaggtgctaatatatgtcttattattcttatttttatatgtcttaacattctttttaaaaatattttcagcctctctaaaggatcaaaaaattaacctttaaaatcccttgaagagcattttaagagagaaaatatttgaggtttagtaacacttacacattgtaccacctaccagctcctattctactagggaaataaaatttagatgcagctaaaatttagttagggcccaaactcacatcctatctaaaaggtttctgttttcctgtcattgttttctacccttcgcattttgcattcagtagggttgcatttttcttaatagttcttggtgatgcaaatgcaaaagaaatgaaatagggctctctcatactacaatttcaaggaaaaggagactacgaggcccattcagcgaggtgcaagaggcctagatgcagcacaccctgcaaccgccgcatgctccaatttcatcttagggttttcgtacagctcctcttttttggatgatgcaaaccgcgcaaaagcagcattcaaacctccccaccctggaaacgatacaagaacatgaatctttactgccactttctccctaacacgcagccaagggagagaggcccggatacccgcccccaaaaccgcgtccacaacaatcatttcctccctccccgccttttacatacagtacacatacaaatacacacacgcagagaagccagcaggggcgggccgggcccgaccactccgcaaaccgcagggggaacttgcggcaggccgagctattttcgcccagtcctttcttcttcgcttgcgtcttcctctccatctgcatgcacctgttacatgaaagcgaacttggggacgtagggtttccagaaaatccgcttcggagccacacagcttcgccgggtgctgcaacatcccccctctctcggtaaacagttggtcgcgccccagtgctagcgggcgccgagcgggagccgcgcgggagcagcgcagctacggcggcggcagcggcggcgcggttgcgattccgagccgttgagacgcctctgcggcagctggtggcgcaggtggcttgcgtggacgcgggtagaggcgaccggccagcaaccgcagcgtcggcgcccgcggccccggcaggtgagcgggcgacggggactcgccc

SEQ ID NO: 41550 - DNA, 2300 bp, Homo sapien
tctgcatatttctctagcctcatcgctcacacctcctttgcacagacagctttttccagcttttcaaatgtctggtgctggttcttatgctggtgtttgcagcttccgtgtcttccttctagttccttgttagcttcataaatctttaacggtcttcttaaactaagctcaaagttcttttctatgaatcatttctgggagctcagggttgatatcaatattcccctgtatttctatcatctagctccatgttgggtacatagtctgtattctgtaaatgctgaatgaacaaataaatgaaaacgggtcttcacatcacatccatttttcatttcaaaaacatacaatatagtacatagcatttattcttgcgatacaatattcacttttgtgactttgttaaaacacaaataatttttttttttttttttttgagacggagtcgcgctctgtcgcccaggctggagtgcagtgacgcaatctcggctcactgcaagctccaccacccgggttcacgccattctcctgcctcagcctcccgagtagctgggactacaggcgcccgccaccacgcccagctaattttttttgtatttttagtagagacagggtttcaccgtgtcagccaggatggtctcggtcccctgacctcatgatccgcccacctcggcctcccaaagtgctgggattacagacgtgagccaccgcgcccggccaacacaaatgaaattttaagtagttccagctactcaggaggctgaggcaggaggatggcttgagtcctgaaggtctaggctgcagcgaggcgtgattgtgccgctgtactctagcctgggcaacagagaacaaccctgtttcaaaaaaaaaaaaaaaaaaaagaaaaagaaaaaaataaaatttaaaaatattttttaaagcttgtaacataaaagttctaatctcattagtcagttgtaattttccatttcatttctaaactttagagtgggctattttttccctttatttcctctggagcaattgtcctctttatggctctagtaaaaagaatcagggacaggcctccgttttagatgtaaatgactaaaatcaaaccaattaaggtttcagtgctacaagaatcaaggaggttttaatctcaatttgtgtttgcatttatgaccgttggctctcccatgggagagagaaaagacggcccctacacctggtttcaggttgattacaatcaacaaggacccagtttagtatagaaggctcgttttgcattaaacacctttttgtgcagaggaggtggtggtggtgaagataaaaatctttgaccaaatcctgtcaatttgcattgttctctggaagaataggctttcaaaagttaaggaacaaaagaggagttggttttccagtctcccttaggcggcagcagattgtgaagcagccaccgggaggaaccaaagtataaattatcaataagaggacggtgtgtgtgtgtgtgtgtgtgtgtgtgtgtgtgtgtgtgtgtgtgtcagagaaaagtgagagaagcgaggaaagagatagggaacacacatgctaaggctccgaggcgttttccacgatgtgcctggttacgtaatgttgataatgaaacgcactgcaagcagcatcaatgcattcttccgaccctgctcaccactcccagctgggatacaatggggacgggaagaggggacaggatgccctgtgcaggcagagagctgtccagacagaggtaaaccaggcagttgggcagaacccgagcccagagaatttctccccaggccccgggaccagcccaccgttgctgtggctctaaagatgggcagaagaaccagtttcaaaaagcaggatctgggatccgacctcttaggtttttattcagcaggcagggaaaaggggttagaagctggaaatctgcatttccactcggctctggcgactgagacaggaacgcggacacctcacgctgaaaagccacagcagcgcgtgggcagggcgcacccccgcgcggggacgcggagctcctggagcgagagcgcgtgcggtcgcgagcccgccgctccccagcaacggcgcatgcgcccgttcgtccctcagcgaaggcgcgctgcttggcgggcgggctcttccaatccgagccagcgttctcggagtacgtatccaggagctgcaagctgagggctgcgggaggcgggaggaaaaagtggggccgggcctgagttgggctgacctgtgaaagtctgggaaggtctgcgagagaagcggagtgttttcagctccggaagtgg

SEQ ID NO: 41551 - DNA, 2300 bp, Homo sapien
tcttccttctagttccttgttagcttcataaatctttaacggtcttcttaaactaagctcaaagttcttttctatgaatcatttctgggagctcagggttgatatcaatattcccctgtatttctatcatctagctccatgttgggtacatagtctgtattctgtaaatgctgaatgaacaaataaatgaaaacgggtcttcacatcacatccatttttcatttcaaaaacatacaatatagtacatagcatttattcttgcgatacaatattcacttttgtgactttgttaaaacacaaataatttttttttttttttttttgagacggagtcgcgctctgtcgcccaggctggagtgcagtgacgcaatctcggctcactgcaagctccaccacccgggttcacgccattctcctgcctcagcctcccgagtagctgggactacaggcgcccgccaccacgcccagctaattttttttgtatttttagtagagacagggtttcaccgtgtcagccaggatggtctcggtcccctgacctcatgatccgcccacctcggcctcccaaagtgctgggattacagacgtgagccaccgcgcccggccaacacaaatgaaattttaagtagttccagctactcaggaggctgaggcaggaggatggcttgagtcctgaaggtctaggctgcagcgaggcgtgattgtgccgctgtactctagcctgggcaacagagaacaaccctgtttcaaaaaaaaaaaaaaaaaaaagaaaaagaaaaaaataaaatttaaaaatattttttaaagcttgtaacataaaagttctaatctcattagtcagttgtaattttccatttcatttctaaactttagagtgggctattttttccctttatttcctctggagcaattgtcctctttatggctctagtaaaaagaatcagggacaggcctccgttttagatgtaaatgactaaaatcaaaccaattaaggtttcagtgctacaagaatcaaggaggttttaatctcaatttgtgtttgcatttatgaccgttggctctcccatgggagagagaaaagacggcccctacacctggtttcaggttgattacaatcaacaaggacccagtttagtatagaaggctcgttttgcattaaacacctttttgtgcagaggaggtggtggtggtgaagataaaaatctttgaccaaatcctgtcaatttgcattgttctctggaagaataggctttcaaaagttaaggaacaaaagaggagttggttttccagtctcccttaggcggcagcagattgtgaagcagccaccgggaggaaccaaagtataaattatcaataagaggacggtgtgtgtgtgtgtgtgtgtgtgtgtgtgtgtgtgtgtgtgtgtgtcagagaaaagtgagagaagcgaggaaagagatagggaacacacatgctaaggctccgaggcgttttccacgatgtgcctggttacgtaatgttgataatgaaacgcactgcaagcagcatcaatgcattcttccgaccctgctcaccactcccagctgggatacaatggggacgggaagaggggacaggatgccctgtgcaggcagagagctgtccagacagaggtaaaccaggcagttgggcagaacccgagcccagagaatttctccccaggccccgggaccagcccaccgttgctgtggctctaaagatgggcagaagaaccagtttcaaaaagcaggatctgggatccgacctcttaggtttttattcagcaggcagggaaaaggggttagaagctggaaatctgcatttccactcggctctggcgactgagacaggaacgcggacacctcacgctgaaaagccacagcagcgcgtgggcagggcgcacccccgcgcggggacgcggagctcctggagcgagagcgcgtgcggtcgcgagcccgccgctccccagcaacggcgcatgcgcccgttcgtccctcagcgaaggcgcgctgcttggcgggcgggctcttccaatccgagccagcgttctcggagtacgtatccaggagctgcaagctgagggctgcgggaggcgggaggaaaaagtggggccgggcctgagttgggctgacctgtgaaagtctgggaaggtctgcgagagaagcggagtgttttcagctccggaagtggcagttgtaaacttcacctcccgggggctcttccccttctgtacccctttgctgtttgtccccctcctcccgggtcctggagtccgtcgtgttccaacagtttttgctctt

SEQ ID NO: 41552 - DNA, 2300 bp, Homo sapien
agcagtatacttggagaataaaattctattcaagaattttattctccaagtatactgctgtatggccaagtattaatagtttcataacgtcttttcagctctacctaattgtagtatctctgttactatttgcctaagttttgtccctttgtgactttaagggtatattttcatcctatatttttctctaggcatccacaaggacaaagataaacctcccagcttctctgttgtccttgagagattgaggcgtaccttgacagattaccagaacaagctggaagatgcatctaatgaggtaacacttgcactgtttggctccacacatatagccttcggcctgtaccagtacgtattccttgcttgttacaaaggtcaaaaagattgggaatgttgaactgacagcttcacagatacaaaaaataataaattatctttcgctgttctttctttaagtgtggcctaaagtcatgtctcacttacgtttttgtaactcttcagtcacactattattttcaaagttataaagactctatcacttcttgatcttcataatttatctgttttaacttaatgaaaaacactatgcaagtagtttaagttaatatgtactgtatttaaatgtcagtgtgtttttatgacatttggtatagctactggaaatttagattttgtcagtgttttaggttaagatttctacaaactgtggaagtcttaataaaaaagagagaaattagttttcattctctaaaggcagtaaagtgttgttagaagtttttaaaaaacaaatatctgtttgatgtagcctgggagcttttagtttgctgattgaaaaagctcatgcttctatttatcatcccatttgtattgtttaatgtgtgggttgataattttcttgggtattaaaatgttttatgaatttgtgctttaagaattgaagagtttgtctagttacatcttgtcaaattagcatatgaagtaattacattaaatacaattagttagcaaagcaacaaacagattgttagagtcaaagacaagtcacatagcatggaatttggagtttatccttgtgtgtatctctttctttcatataatataaatgccataaaacggttacatttcacatttcatatgcggcttattttattttagcttgctaagatgaacaaagaaggaaaagtgagtctttttaataccctcggtaattgttcaaaaggcataaaagaaaatgaccatcgaaataattaaatttctatgaggaacaaatattacgaagtctttcccagtgagacaagacaacctgtattgttagtagtttatgaaactcttctgaggcctaggtctggaagctgcagggtaactaggaacatattacccacagcgaattgttatttgggaggatgaatgtcacatgatcctcagcacagttgaaaagtcgactcagcaggctttggcttagtaatgcgctttgttgtgaaccagtgccagagacagcagtggggagaccaagggggtggctgcaaagaaagcaaaaagagcagtctgacagaaagaagaatgaactgtcaaagaaaataaatcacaagcggtgcaggaccaactgatgacctgccacaagccttcccagtaggactgcatgtgaccgaccctgaagttgtcatatggagtgagagaccagtgaatatcctcatgatgtatagaaagaacagtcttctgctctgttcttttttatttacttatagatgcccctgcttctggcattttggtccagtaggattttaagaataaagttgtatttgtttacaataagaatgaaatcctttatctggacgtgtggtaaaaatatagtaacataagtgatattttaagcttgaatgctttcttttctttttagccacatgaacttgtgacagaagctatatagcatttaaccaaaagaaataattttttaaagactcttaattactattgaaaaatttgtatttaagtaattgcataaaaagcacttaaagattaacttttgagttacccatccttgaaaaatgtaaaaaagttacttatattttctttcatcagctaaacagcatgaatgatgttaaggaaaaggcatgtaatgaacttgattctacgaaacagaagatagactctcacactaaaaatataaaggtattatttagaataacttttaccttttgtattaagaaacaaatatagttatctagggaatattttaaagtagagatattgaggtacctgaaaatatgtatttctattttttaaagtatgtatgggtagaa

SEQ ID NO: 41553 - DNA, 2300 bp, Homo sapien
ataaatgccataaaacggttacatttcacatttcatatgcggcttattttattttagcttgctaagatgaacaaagaaggaaaagtgagtctttttaataccctcggtaattgttcaaaaggcataaaagaaaatgaccatcgaaataattaaatttctatgaggaacaaatattacgaagtctttcccagtgagacaagacaacctgtattgttagtagtttatgaaactcttctgaggcctaggtctggaagctgcagggtaactaggaacatattacccacagcgaattgttatttgggaggatgaatgtcacatgatcctcagcacagttgaaaagtcgactcagcaggctttggcttagtaatgcgctttgttgtgaaccagtgccagagacagcagtggggagaccaagggggtggctgcaaagaaagcaaaaagagcagtctgacagaaagaagaatgaactgtcaaagaaaataaatcacaagcggtgcaggaccaactgatgacctgccacaagccttcccagtaggactgcatgtgaccgaccctgaagttgtcatatggagtgagagaccagtgaatatcctcatgatgtatagaaagaacagtcttctgctctgttcttttttatttacttatagatgcccctgcttctggcattttggtccagtaggattttaagaataaagttgtatttgtttacaataagaatgaaatcctttatctggacgtgtggtaaaaatatagtaacataagtgatattttaagcttgaatgctttcttttctttttagccacatgaacttgtgacagaagctatatagcatttaaccaaaagaaataattttttaaagactcttaattactattgaaaaatttgtatttaagtaattgcataaaaagcacttaaagattaacttttgagttacccatccttgaaaaatgtaaaaaagttacttatattttctttcatcagctaaacagcatgaatgatgttaaggaaaaggcatgtaatgaacttgattctacgaaacagaagatagactctcacactaaaaatataaaggtattatttagaataacttttaccttttgtattaagaaacaaatatagttatctagggaatattttaaagtagagatattgaggtacctgaaaatatgtatttctattttttaaagtatgtatgggtagaattttaattttttcttgttgattaagagtaacaagaatgtttttttcatttaaaaaattaaaacctgattggaaattattttggttaaaggaaaatttatttcccagatttaattataataccttatgagattcaaataattatttaagatgaaatgtccagccttaggtacgtactaaacatattttacataagcacatcatatttggagtcagttttcatcattttaaggtggagccattgttttcagtacatcatgtctgttaatgggctgagaccacacctggctaaggcccaggactatagtttattttagtttctgtgctggttttatgtactacatctttgcaaaattatgctgagtcaactctcagaagtttcccagtattgctggaatttcattatgttgtttcatgttgggtttgtcctggacacacttcaaaagaatttgttaggtttaaggaataaacagttcagcaaaattttgtgccacatatttgagatttctataagtggttgggatgtcattggaaagtaaatgttcttatgttaaatgtaagatatttattttaaaatattttaaaatttttgaactacaacgttgttttaaaaaaataggttgaaaggaaactcccttggaagaactttttggaataagccatcatattaacattttatgtaaatgtttaaacataacaaatgttctaatttttgagctgagatattatatttagaaaatacattcagtaaaatattttaatgtaaacaaatgcttgcctgcctttgtgattctttcattttaaagctttgaaaatgttcaatatgtgttttatactagtgtcccctcaccccttgttggctggcctttctacaatctctttatttggtatctatgacaggaacttcaggataaactggctgatgttaataaagagttaagtcatttacacactaaatgtgcagaccgagaggctttaataagcactttaaaagtggaactacaaaatgtgctgcactgttgggagaaagaaaaggctcaggcagcccagtctgaaagtgaactgcagaagctttcccaggctttccataaggatgcaga

SEQ ID NO: 41554 - DNA, 2300 bp, Homo sapien
cttcaggtattctgaattatttgcatccttagagcatacgatgctgttttctgcctcttccttttcctcatgctagtcttcctgctttaatatagctataagccaagtgtcaagttttatttttccttgaagtgtgcctgctttaagagggttgtcgcacatcctcttgcaagcagtctgcgtagctactgcttctcagagttccttgcttcttttagcactccctgtgggccaccacttgctttactaatggtctttatgtggagttctgggacatagtcccattgatagaatatggctgccaaagtttaagtgcccttttgtactcctctggcaacctggaatatctctatcatagcattataccatgctagttgatttacttgtctcttttccgagtacatgtgatttagtaactaatcaatacttttttttttcttttttaatagaaacagggtcttgcactgtcacctaggctggtctcaaattcctggactaaagagatcctcccaccttcaccctcttgagtagctagaactatacacataccaccctacttggctgatatttttaaattttttttttgtagagacagggtcttagtctgttgcccaggttggtcctaaactcctgccctcaagtgatcctctcaccttggcctccaaaagtgctgggattataggtgtgagcccttatgcctggccccaataaatgtttattgaataataagtgaatagtaaaggaaactgggatctgttaccttctttttttttttttttttttttttttttttttttttttttttttttgagacagcgtcttgccctgttacccaggctggagtgcagtggcataatcatggctcactgcagcctcaacctcctggattcaattgattctctgacctcagcctcccgagtagctgtaactataggtgtacaccactattcctgtcttaattttttttattttttatttgtggagatggggtcttgctatgttgcccaggatggtctcaaactcttgagctcaagcaatcctcttgcctcagcctcccaaacactgggattacaggcgtgagccattttgcctgtcccttcttaattttactctttctttcaagattccttactgattaggttaagatttcatagagagagccaatttattttctagtgattaattgtggttcttacagttaaatttctttttatttcaaattaagttttggattgtaagcaacttgattaggcaaaaaggagcagagggctgctgaggcccagctcacaattagtatttcctgtcaccactggagatgcactgtgtatagctttctgtcatggggaggtaagacagaaactgaaattaagtgagtatccttgagagacagtgccttctcatgcagtaaatggtagaccatgctatttgttatatcattgattgaaccggttgcttattttggtaaaaagtaaagtcttttttacatctaggaaaccctctattggcagtgtcatttctgtttaaaagtagaaatgaagaattagtgaggagtggaagaagagaaattatacagagaaagcatatttttcttttctaaatttgtgtgtttatgtataagtctacaggaaatatatgaaatagtcttaaatttatgtgttctactttacataaagcttctatgtgagaggatttaaaaatcaatgtgcacattcagatctaagctgtttggctcactgttgccatgtctatcttatttatattttggatattttagcacatgtatcttttaaagaggaagaagtggttgtcagcaaaagtttgttttctttgagtaaagggaaattaatataatgcctgtttgtttcatgatcaaatatattttttgacttcttccatagaaatttcaagaaattgctgaaaaaaacatggaaaaattgaaccatattgagaagtcacatgaacagttggttcttgaaaattcgcacttcaaaaaactgttatcacagactcaaagggaacagatgtccttgctggcagcctgtgcattaatggctggtgccttatatcccctctatagccgatcatgcgccttgtctacacagagagattttctccaggagcaggtcaacacctttgagttgttcaaactggaaattagaactctagcccaggctttgtcaactgtagaggaaaagaagcaagaggaagccaagatgaaaaagaaaacattcaaaggattgatacgtatatttcggaaaggtgttattgctgttttggcagcaaacagactcaagattttg

SEQ ID NO: 41555 - DNA, 2300 bp, Homo sapien
tctgtgaaaaatttttttgtatcctgaaatttcctaaaataatgaacttttgtattgtttatttaaaaacaagaacctttgacatagcttaagagttaacattaatttctcttagtattcttgtgttcagcattgttgcagtagctatggaaataaaaagaaatataatttaacaaacatgtaaaaaatacccatgtatgctgggctggcccagtgaagataaaaagagtttgttaagatgaaaaaagacacagataaataattgcaaggtagttggagaaacagggaatacatatatatattaggtattgaaatgataaattgaatattatagacaaaataaattttactgttctttcattcaacagtggcctatttaattcacatagtactttagtaaattcctttaactcagtgttctgtgttatatattgattgccatataaagctacttagttctttttcatccattgttttctttttatttatttatttattttgtattattattataaaaacatggaacgcttcacaaacttgcgtgtcatccttgcgcagggccatgctaatcttctctgtatcgttccaattttagtatatgtgctgccgaagcgagcacttcatccgttatttatttaaggaatatgattgttaacaaaaggactgtgtattttcattatactttgtcttttttccatgggactgtcacagagtatgtttataatgagtggcatatagaattaaacttatattaccgtatatttatattcctagaagttgatgcatcaataactgattgaaataaattttacctggaggatattatgcttttattcactttatttccaatttatgtataactcctaagcaagatcattttcaaattctggctgctacatagattttaaaatttgtctgtcctttaaacattgaggaataaaataagtagaatgaagctcaaattttataacagtgtctccatgagacagttctttatgccatagaaaaccattggttgattaccgtctcagtcaatgttgctcttcagttgttgaattatatgtattcttataaggataaaacatttttaatttggtaagactagctgaatttgctttttgtgcttatgatgtaaagacaagatttaaattaacaccaacagcagaggctcttaaaaatgtagaatgttatactatgaatttaaataatctttctgtgcttgtcattttacattgatagtatcataagacaagtaatgacagattaagacctacctagcagagggaaaactaaattacatggctttattaaggcgtaaataaacctattaaccattatctggaataccaattagtagaaagagcactgacaattttatttatcaacattaaacacaattattaattacagacctgatgaatctagcagtaagcaggccatgttggatatgctgggaccttaagtccattatatgagaaggatgattaccaaaatcctgtggggaaataagtaattgtagttgtaaaattttaattgccttggaataaggcaaattatattttcttgtctgagaatataaatagtatggcatgaaggtaacaagctttggcagttgtaaatagaaaatggatttatgttaggttttaaaacaaagaaaagagtgatgaatttttagtgtcatgctattccatgtgaatggcatactgtaaatacatgcagattttttttgatgtattctttagtaggtgagctattctctgaattcctttttttcatagtgaaaataatgtgggaaggacctttttgaatgaattactacaggtgaatgggaattatataattaaaaaatattttcattatgtgattagcagtgttgtgaaatgcacaagagacaattcacatttttgtgcctttttttctttttctttgaagatccaaattccagaatttgtggacatttactcataggtgcagccaagaattcttttgcaaaactcatggataaaattagtctggtaatggaatgtatacctctgcacagtagcaggagtattacatatgtagaaaaagattccctggttcagaggctggcccatggacttcataaagtaaacacactggccctgaaatatggtttgcgtggccatgtgcccattacggtatgtatacactttcatttagtagtaacctaagaacttgtaggtttaattttgaattagcctaatttgtagtttaaattattagttgtacatgaatgtatctggattttctttatagttcatgtaaaattttaatacact

SEQ ID NO: 41556 - DNA, 2300 bp, Homo sapien
tgttctgataactgaacctgaagtgacctttctcagacacaattacagagctgtatgtttttcctttaatttcatcaggggtttaattagtatacaaataaaacttcccttatcttcctttctacctaattggcttgtcttcacttatatatgaagtatgtgaaagtgggctgtaattagggtgaccgtgttaaccttttttcctcaaatgtactgttgcttaaaggcctcaaggcctaaaaacagtgctttggattattgctttgcaatcactatggctgtcccataggttttctcatgagcagaagggctttgggtgctgcaggttcccactgcttaacaggatcttcattcttctccccactaaatgtttattgattatctcgctgttccaggctcagcctccaacaacttaatatcaggtgacagtcaggagagttctccaagtaattagagttgagcattgggggaacaattaggagcagagttattaaacttgatttatcctattctctcctgaacagtttcttggatatcagaacatcacactttcacaatctaccctggttgagaaattagtggctaacctgctgcttatcattgttgccttgttgcctagaggcgcgccctcttggtttgtcattcagttggaaatattagagtccataaagtttatcatgggttttaattagatcaatctgaacaggagaaaagaaaagctgaatttaaaattatatgtgatatatggatatatatttataaatatatatgtgatgtgtatatgtatgtaaatatatatacacaaatatatttttctttaaagctcagtgttaggatttttaaatattctgtttttgttatttaaaaaaggttaagtattagggaaaagacgtattcttgaatcacggtttatgtcttggtgttttacacacatccccatcaatcttaggacccactgatgtattttatgatgtcattctcctcttttcaaatgagaattctatgtctataagttataaaactgtgatcttttttccaaaaaaactatatttttgttttcatactcaaggaagtatgaattatatcactttgtttataccactttttgtttcttttctatgcccctgaaatagtataagctttagaagagtttgatgactcctgtcgttgcccctgagacatgaaaatgaaagaatggaaacgagaagatttagctatgtagtagaaattctaatgttatgaggtatatcttctttgaaagtatatgataggattgttgaaaagtcaagtgtgggtttatgataatttcaaagtcatggattccctgagattggatcaggaagcttcagtctggataaggttagagataatatactgaatgctggatagtcccctcaccaatatgcacctctagtcataagagttattgagcagaagaatttgaatggactggcacaaatgtattgtttttgttggaagaactcaagctttatccataactggtgttggatcattagtttgatcttcatatttgaaaaattgatttttttgttgcttgaaagatgtcagaaatgctgactttaaaaggaactcaaaaggattttacttttttaaataaagaaatcttataatgctttagtgtctttatcttagcattggcacaaaattagtaggtttagcgtggttttaaaaatttattctttgccatctttttaaagttggtttgaatcagtgactatttctgtggtggaacgtttgtgaagatctgttaatagtgaagatttaaaacaaaatacaatgtctcataagtagtcatagtttgtttaattttttgatttatatttgtttgacggtaactcgactatttgaaaagtgaatgactgaattttaaaactttcaacatttaaaaatacctggtttgactgatgatggcttgcagttcaccagcatttagagggaattaattggtttaacatgtatgcagcttaagttttttatactattcttttttttatactacccattgtgaatgcactaaaagaatactgttagaagagttttacacatgaaattataacatttttgtttattctttactagatatttgaagcacagtgtggatgttaatgtgtggctaaactgagcaagaagaaaacattatgtgtatgcactcaattatttagctcaccatccaacaaatttaataaaaaactgtttgataagcttattctagaaattttttcggcaaaggagtaagaagatttttagtgctaagcgatcctctgatccctgtactattt

SEQ ID NO: 41557 - DNA, 2300 bp, Homo sapien
tcattatatacatgtatttgaattgaagaagagaactaaaagttattccaacagagatcctaattcttttccctcttatttaaacttggaattatcaaaatcacagttttaaaaatattttatttaggatatccacatgcaaaagaatgaaattggaccttggtcttacaacatgcacaataatcaactcaaaatggagtacacaatgttagaaagacctaatgccataaaacaaaggaaacaacaaaatggaaaggcaacttgtggaataggaaaaactatttataaactgtatatccagtaaggagtttaatatccaaaatatataaggaactcatacaacacaataacttttttaaaaaatgggcaaaggacctaaaaagacatttttccaaagaacacatgcaagtggccaataagtaaaaaggtgttcaacaccgctaaccattagggaaatgaaaatcaaaaccacaatgagatatcacatcacaactgttaggatggctattaccagaaagtcaaaagacaacaagtgttggcaaggatgtagagaaaagcgaacctttgtgcactattggtggaaatgtaaattggtatagctattatggaaaacagtatggaatttcctcaaaaaataaaaatagaactaccatatgatccagcaatcctacttctgggtatacatcaaaaggaaatgaaaccgttgtcttgaagacatgtctacacttccatgttcattgtagcattattcacaatagccaagatatagaaacaacctaagtgtcctctgatgaatgaatggacagaggaaatgtttatacacacacacacacacacacacacacacacccagaggaaaattcagctttaaaaaataaaggaaatcctgcaatgtgcaacaacatatatgaacatggaggacattatgctaagcgaaataagccagacgcagaaagaaaaatactgcatgattccatttatacgtagaatttttaaaaatcttactcacagaaacagagtagaaggtggttgggggtggttgggggaatgaggagataattggtcaaagggtaaaaacttttggtcataagatgaataatctctggagatcatggtacagtgctatataatgcattgtgtacttgaaatttgctaagagagtagatcttcagtattctcaccacatacacaaaagagggtaactctgtgaggtgatagatatgttaattagcttgattgtggtaataatttcacaaagtatatatatattaaataatcacattatatcccttaaatatatacaaactttatttgtcaaaaaaatatttcatttgagtttgcatagtactgtatattaagtaaccagtgaaatgtagagtaattttagaaatggtttagaaagtacttttcagttttggagccttctagtaacagtagtaggtttttttcccccttttcccaccaaaagtctcatagtgctgactaaaaggaggcataagtttttgagggaagactaacttaagaagtaactcactgaagaaaacattaaaaggtaaactgtggcatataaaattttaaggtatttgtttgagtgaacagcaattcatgagttgtacagctccaggccagaagtagtttggaggtcctgttgagagaacgcactcaaatttctacacgtttgtagacactaagccaaaacccaaatcaactctttatctgaaataaaagattgttgcttaattcatttattttcaaaggaaaaataaaaatgaaaaattaaataaattctcataataatttcatttagaaatagtattattatttttcttaacaaagtaccctttaaaaaaaaactcaaaagacttgccaatactagccaatcaaatccttccttcaattttagaaaacaggaattgcatgtaaacaagtctgggccaactcttacaacctgctttctatatcctcctcctctgttctccatctttcctagttctttgagccccagtggtcaggctgagctgagtatgagagagggccctcaagaggccctggaagcatattccctcagctcctaaatgaagtctccataaggtgaccctaggagactgtgcagcgtgactggccgcttgttttatcccagactcttttccaggtagaaacacttacctctatggagatatttgctctgaacaacatgtttcttttcttgctgattattagtatggacttaaaaaaataagagaaggtaacacatttttaaaggagtactacttaacttttaaaacttgatgtgattttca

SEQ ID NO: 41558 - DNA, 2300 bp, Homo sapien
aagagcgttaacatttttacaactatgggtctcccaatccaatttacatgttatatctcctcatttatttaagtctttaaaaactattctctgcaatgttctgcattgctgtgcattggtcaggtgcatattttgctaaatttattcctaacaaggtgcttaattttttaaatactattataaatggcatcaaatttaaagtattattttctaatatttgttgccagtatacaaaaacatagctgatttttgtatgttgactttatattcattagtttagctaaattgctgactcattctaataattcacctgtagattctatgcatacaatcatgtccacagatactatcaggtttgtatcttttctaatccttaaattttgaaatttctttttcttgtctaaactactctggctagaacctccagtacactgttacatagaaatggtaagagtgaacatcctcgtcttgttgctggtctccagcagaagtgttcgtatttcattattaagtacagacttttatagatgaaagggttcccttctagtcctaatttgatgccagttatattttcagtgatgaacaagttctgagttttaacaaatgctttttattcatcttttgaggtgttcatatggtttttctttattttgtttctgtggtgaattatattgattgattttctagtgttaaaccaaccttgcatttttaaaagaaactttattttgtcatgatatctgatccttttaaaatatctctagatttggtttgccactagtttgctcaagagtttcatatctatattacaatgaaggattggcctataattttcttctcctggaatgtccttgacaagtttcagtatcaaagtaatgctggcctcataaaatgagtagcaaagtattcctttttccagtccctggaagaatttgtgtaacactcatttttttttttcctcatatgtttgaaataactcctcactcaaatgtctgggcctcaagattcctttgtaggaatctatttacattatagattcaatttctctagcaaatatgtgaatattcaaattatccattttttcttatgtcaatttttgcatttttctaggcgtgtgtccatttcacctgcatgttcaaagccactgacataaaattcttcataatatcatcttaatattttgtttaatgtctttagtgtgtgtgttagtagtttatgcttttgatttatctaggtcagtctctccagggatctatttattaggctttccctgaaaatatggacaaatacatagaaattcattattcaataaaaagttaagagaatgccaactgaaagatatgtagtgtgttggtagttaaaagcaggagaaattgtaattgattgggaagctcacaggggacttaaagtgggaaataattgagataaaccttaaaggaaaggtagaatgttgacagtattaatagaaaaggcattattggcataagagaaatttggataatgtgcagcaggaaattgagaaaagatgggaaggtctggacaatcaagagatttgagtcatagacaatgagaagacaccgaattcatattttcagtattttcatatgttgactatttggaaaatataaggaacgatgttgaggaaagacactaagttgtccagcctggtgactgggagaagaaaaagaaggcaagaggaagagcgtttcagggttagaaatgtttgactttgtaggtcccagtcaaaagctgcaggctggagccaagacagtggaggagctgtcaaaacaagcaacagcatgaggatgtgatcaggctgtgtccagaaccatgggctttagtccctttacagcataagaggaggaaggagtcagtgagcatagaccagagaggggagcctggagccacagaagccaagaaagcaggctttctagtagggcagagttcattgtatcagactctacaactcaaccgagggatgaggacccagaaagccactggactcagcatgcgggaagtcactgtgggcctttgtggcatatattgagatagtaaatgtctggtgtcaatgggaagagaaagaagagagggcttcattctaaggggcatgcttttccaagctgtgcaacccactctgtcttccattcacaattatttataggttgcctgcctattccagtcacaaagctaggtagtgatcaaagtagacatgacccctctcctattgagctcatatctaatgaggagctaaacatcaaataaatataaagaaatgattaaaaaccatgattaatgcttgggga

SEQ ID NO: 41559 - DNA, 2300 bp, Homo sapien
agtacttaattccttcctatagtatcactatttaataaggactaaggtaccatttttttcatttatattggatttcacagcaagagttcacatcttatactaatatatgctaaatagttgcatagtatatagatcattgttgttaaaaaagcagtactgaaggcattttagatcacagagccccagtggtctacattttgtttgctttgacattattaaactcaatctgtttctctaactgtgactctaattactacatttgcatggcagaaaagtttgctttgtgggttgacttttattaacagtgcttgcatgttgttttctgctcttgctcagtgttttatgagcacacagagcaccttcagttgcattgaataattatgcacaatcaataagtttttgtgtttgtctttgttgtttctttgatgtggcctctaggatgctgctggcaaggtgctggaccgctgggccatcatgtctcgagaagaggaaatcatcacccttcagcagtttctgcggtttggagaaaccaaatccattgtggagctgatggcaattcaggagaaagaagggcaggccgtggctgtaccatcttcaaagacagactcagatataaggactttcattgagagcaataatcgcaccaggagtcccagcctccttgctcacttagagaacagcaatccttccagcattcatcacttcgaaaacatcccaaacagccttgcatttctgcttccattccagtacataaaccctgtctcagcaccactgctagggttgcctccaaatgggctactgttagagcaaccagggttgaggctgcgggaacccagcctttcaactcagaatgaatataatgagagcagcgaatccgaagtttctcccacaccttataagaatgatcaaacacccaatagaaatgccctgaccagcattactaatgtggagcccaaaaccgagccagcctgtgtctctcccattcagaattctgccccagtcagtgatctaaccaaaactgaacacccaaaaagctcattccggattcatcggatgagaaggatggggtcagcctctaggaaaggaagagtgttctgtaatgcatgtgggaagacattctatgacaaaggtactctcaaaattcattacaatgctgttcacctgaagatcaaacatcgatgcaccattgaaggttgcaacatggtctttagctccctccgaagtcgtaatcgccacagtgcaaaccccaatcctcgccttcacatgcctatgctaaggaataaccgagataaagatttaattcgggccacctcaggagctgccacccctgtcatagcaagtacaaaatcaaatctggcactcacaagccctggccgacccccaatgggttttaccactccccctctagaccctgtcttgcaaaatcctctccctagccagctagtattttctgggctaaagactgtacaaccagttcctccattttatagaagtttactcactccaggggaaatggtgagtcctccaacctccctcccaaccagtcccatcattccaaccagtggtaccatagagcagcaccccccgccaccctctgagccagtagtgccagcagtgatgatggccacccatgagcccagtgctgacctggcacccaagaaaaagcccaggaagtcaagcatgcctgtgaagattgagaaggaaattattgataccgccgatgagtttgatgatgaagatgatgaccccaatgatggtggagctgtggtcaatgacatgagccatgacaatcattgtcactcccaagaggagatgagcccaggcatgtctgtgaaggacttttctaagcataacaggacccggtgcatttcaaggactgaaataaggagggccgacagcatgacttctgaagaccaagaacctgagcgggactatgagaacgagtctgagtcttcggagcccaaactgggcgaggaatccatggaaggggatgagcacattcacagcgaagtgagtgaaaaagtcctgatgaatagtgagaggcctgatgagaaccacagtgagccctctcaccaggacgtcatcaaggtgaaggaagaatttacagaccccacttacgacatgttttacatgagccagtatggactgtacaatggtgggggtgccagcatggccgccttgcatgagagctttacatcgtctctgaattatggcagccctcaaaagttctccccagaaggtgacctatgttctagcccagaccccaaaatctgttatgtgtgcaagaagagtttcaaaag

SEQ ID NO: 41560 - DNA, 2300 bp, Homo sapien
caaaaatgaaagtgtgaaatgctttttaatgtatatttaacaacacatagtctggtgattactgatgtgtattctctgtggactccctttgctatcagaggaggatgctgagagacaactttttacacatttattctgtctaaatccatcacatgtttactttttaaatatctatgactgtcatttataacaagatcataaaaagtcaaatacattaagtctaactcaaactttgaatcataggattacaaccaattttcaggaaaagtacaattaccttttatgagtgatgtttttcttactcttccttatgaaattgcctgctattaaatgatactaaaatatagccactcaaaaaaaaaagatacagtttagtaacaaggtatgaggggtagtgctactttattcatctttttgattcagaaattcacataactcctatttaaaggaattttcatcattgaatccagtgtcatgtctgcttatgttgaagaagtaaatttcacaagaagtacttaattccttcctatagtatcactatttaataaggactaaggtaccatttttttcatttatattggatttcacagcaagagttcacatcttatactaatatatgctaaatagttgcatagtatatagatcattgttgttaaaaaagcagtactgaaggcattttagatcacagagccccagtggtctacattttgtttgctttgacattattaaactcaatctgtttctctaactgtgactctaattactacatttgcatggcagaaaagtttgctttgtgggttgacttttattaacagtgcttgcatgttgttttctgctcttgctcagtgttttatgagcacacagagcaccttcagttgcattgaataattatgcacaatcaataagtttttgtgtttgtctttgttgtttctttgatgtggcctctaggatgctgctggcaaggtgctggaccgctgggccatcatgtctcgagaagaggaaatcatcacccttcagcagtttctgcggtttggagaaaccaaatccattgtggagctgatggcaattcaggagaaagaagggcaggccgtggctgtaccatcttcaaagacagactcagatataaggactttcattgagagcaataatcgcaccaggagtcccagcctccttgctcacttagagaacagcaatccttccagcattcatcacttcgaaaacatcccaaacagccttgcatttctgcttccattccagtacataaaccctgtctcagcaccactgctagggttgcctccaaatgggctactgttagagcaaccagggttgaggctgcgggaacccagcctttcaactcagaatgaatataatgagagcagcgaatccgaagtttctcccacaccttataagaatgatcaaacacccaatagaaatgccctgaccagcattactaatgtggagcccaaaaccgagccagcctgtgtctctcccattcagaattctgccccagtcagtgatctaaccaaaactgaacacccaaaaagctcattccggattcatcggatgagaaggatggggtcagcctctaggaaaggaagagtgttctgtaatgcatgtgggaagacattctatgacaaaggtactctcaaaattcattacaatgctgttcacctgaagatcaaacatcgatgcaccattgaaggttgcaacatggtctttagctccctccgaagtcgtaatcgccacagtgcaaaccccaatcctcgccttcacatgcctatgctaaggaataaccgagataaagatttaattcgggccacctcaggagctgccacccctgtcatagcaagtacaaaatcaaatctggcactcacaagccctggccgacccccaatgggttttaccactccccctctagaccctgtcttgcaaaatcctctccctagccagctagtattttctgggctaaagactgtacaaccagttcctccattttatagaagtttactcactccaggggaaatggtgagtcctccaacctccctcccaaccagtcccatcattccaaccagtggtaccatagagcagcaccccccgccaccctctgagccagtagtgccagcagtgatgatggccacccatgagcccagtgctgacctggcacccaagaaaaagcccaggaagtcaagcatgcctgtgaagattgagaaggaaattattgataccgccgatgagtttgatgatgaagatgatgaccccaatgatggtggagctgtggtcaatgacatgagccatgacaa

SEQ ID NO: 41561 - DNA, 2300 bp, Homo sapien
cacatggccggggaggccccacaatcatggcagaaggcaaaggaggagcaaagtcacatcttacatggaagcaggcaagagcatgcgcaggggaattcccctttataaaccatcagatctcatgagacttactcactgtcataggaacagtacgggaaagactcacccccatgattcaactaacttccaccggctccctcccatgacatttggggattatgggagctacaattcaagatgagatttgggtggggacacagccaaaccatatcattagaagaatgccacaaaagtgatgtcgtgcccttcttagtgtgtcctaacaagcggaacatgatggcgtgatttctactcacggtggtaacgtcgatcacccttttaaggtagggtctgttaggttttttgcgataatgttatgattttccctttgtaattaataagtatcttgtcattttgtttttaagaagattctttgctttcttaaattcatggtcagggttagggcaagtgtcactcacagagggatacaaagtgtgctgtcccaatgggaagaaatggtgccctagaaagtgatggagtcattatttaagtgtttgaatagatctctctcaatccatgctgaaatggatcgcctgacattacattgcaggattttaaagtcctacctccaggcaaatctcatagttactggcaaaaatgaaagtgtgaaatgctttttaatgtatatttaacaacacatagtctggtgattactgatgtgtattctctgtggactccctttgctatcagaggaggatgctgagagacaactttttacacatttattctgtctaaatccatcacatgtttactttttaaatatctatgactgtcatttataacaagatcataaaaagtcaaatacattaagtctaactcaaactttgaatcataggattacaaccaattttcaggaaaagtacaattaccttttatgagtgatgtttttcttactcttccttatgaaattgcctgctattaaatgatactaaaatatagccactcaaaaaaaaaagatacagtttagtaacaaggtatgaggggtagtgctactttattcatctttttgattcagaaattcacataactcctatttaaaggaattttcatcattgaatccagtgtcatgtctgcttatgttgaagaagtaaatttcacaagaagtacttaattccttcctatagtatcactatttaataaggactaaggtaccatttttttcatttatattggatttcacagcaagagttcacatcttatactaatatatgctaaatagttgcatagtatatagatcattgttgttaaaaaagcagtactgaaggcattttagatcacagagccccagtggtctacattttgtttgctttgacattattaaactcaatctgtttctctaactgtgactctaattactacatttgcatggcagaaaagtttgctttgtgggttgacttttattaacagtgcttgcatgttgttttctgctcttgctcagtgttttatgagcacacagagcaccttcagttgcattgaataattatgcacaatcaataagtttttgtgtttgtctttgttgtttctttgatgtggcctctaggatgctgctggcaaggtgctggaccgctgggccatcatgtctcgagaagaggaaatcatcacccttcagcagtttctgcggtttggagaaaccaaatccattgtggagctgatggcaattcaggagaaagaagggcaggccgtggctgtaccatcttcaaagacagactcagatataaggactttcattgagagcaataatcgcaccaggagtcccagcctccttgctcacttagagaacagcaatccttccagcattcatcacttcgaaaacatcccaaacagccttgcatttctgcttccattccagtacataaaccctgtctcagcaccactgctagggttgcctccaaatgggctactgttagagcaaccagggttgaggctgcgggaacccagcctttcaactcagaatgaatataatgagagcagcgaatccgaagtttctcccacaccttataagaatgatcaaacacccaatagaaatgccctgaccagcattactaatgtggagcccaaaaccgagccagcctgtgtctctcccattcagaattctgccccagtcagtgatctaaccaaaactgaacacccaaaaagctcattccggattcatcggatgagaaggatggggtcagcctctaggaaaggaagagtgttctgta

SEQ ID NO: 41562 - DNA, 2300 bp, Homo sapien
ttttgaaggagaggtcatagatttcggtttggggatttatttagtggaacagttgtcaggtattcatagaaggttggattaaggatgaaacttttcatccttagaaactacagcagtctatttaatgaatagcatactcaaaaattatgacttaatatttttattatttataaaattttattccactagaacaactagtaatcatcatctattatgcagttttgactaaaccctttttccacaacagggaccagaattaggtaagaaaatttgggaagatgtcaaaatatatcaaagcttccttttaaatatgtgttattggtttttgattatgaaagtaatacaaaattaatataaaattgaaacattgcagtaatgtataatgcaaaaatgaaaactgtccatagcccctttttgtagagataacacttctccatatgttatcattatcatgtatctgtggcactaattatgattattagtaaatggattcattctatgtatatttttcttatatcctactgtttaaaaaatatatcttgtggttgaccaaaaaatatctacccacttccactcaaaatatccatgtcaaatccctggagcctgtgaatggtaccttatttggaaaaaagggtttttgcagatgtgattaagtcaaggattttaagataaggagataatctcggactctgtgggtaggccctaactaccatcctgtgtatccgtgtaagatattaggagattacatacagagcagaagacatatgcaaaggaggaggtgaggtaaagatggcggcagagcctccggaagctaggagagaggcatgcaacagattatttcccagagcctctgagtggaacacagccctactcacacctcaattgcaaacttctggcctctggaacagagagagaatatgtttccattgttataagccactacggtggtagtaatttggtgtggcagccctaggaaactaatacaggcctctttccacgttagtatagagagatctcatccattttttgaacctccatataatttcccattatgtggatataccataatttatttagtcacttatttaaagacagttgggttgttttcagtgtttgggcttttcaaacactgttgtaggaaatatccttatatgtgtttattactgtgtatgtttgtttttgtagaataaatatttagaagtagaattgccaggtcattatgtaggtacttctaaaactattgtattttgggtaaatatgacatctgccactttgataggaatatttatgctactctatcatgactctggaccataaacaaagtagataactatagaaaccatctcatatattaacatttagaaaatcaacagtggaagttgttcctctcaactcagtgttctgaaaagcctgaaagctcaatatatactgagttgaaaatctatgagaataaatatcctcaacaagtttttgtattttcgtttctctaggaactgaaaatttctgtgacatacctattgttttcccaccatgaaacaagagctgttaaagagatgacaagaaaaaataagagaaaaagttatattcaagaactattgtcattttagaaaataagtcatatattattaatggagtttgttagtaacaattatcttaagtaataattattcaaaattgtaaagaccaaacctctatcgtttctttgtcatgatttttcttctcattttgtcattctaaccccacagctcttcaatctttcctcacttccaagtccattttactgttgataatacaagatgcatttggcatctgttctgttgttaaagccctcaggaaaaattataaagctgttcttgcaaattcatcattattgttaagaaccgtaatttacctcatggttatctcatcctttttccacctcttacctgagctccaggatgacattgccttcctgggtgaggcagcgttgcagcatctcatctctcccaccttaatttgtagcgatgcgttgcatttgggtgacaggcagttgttcgtgcttgaataactcaggatttgaattctacagtttgtggcatccgtgtaatgcttagcagtaggtacagctgttaactattcgcttataaataatcttttttgcctctcaacctgtctcccaggtagtgtacctgtcaccattaataactctttagccgctccctagtgatttgacctatcagttgtcgttcacagaaaagtggtgctctggcctgctattgaagcttatgcaggttctttcagctcctcagtcaccccagcag

SEQ ID NO: 41563 - DNA, 2300 bp, Homo sapien
gggtaggatacctgggaaagaagaggactgcaggactgagaaaaaacggggtgggggctagaaaaagaggaagagggagtgaaggagggggagaaagagacaaggagagggcgagtgagaggcgagagagaacacaggcaaaaacacacaggcaaagcgatacaacagagcctgagtggaaggaggaggaagcttgctattgacagtgtccttaagcctcccacaaataacagccattagtgggaaggtcaggagctgagcaggcagcttgactgaggcactgagtgccacttcagaaatcaagaggctagcaaattttagagggagtttaagtgggtaatagctagcactaaaggtacagtcactgttgacaattgactcgtaggggattttcctgccctcccccccagcaagaatatttttattgaccacaggtggacttaatatattttaaggcaacaattctttgggttcttgtttgtttcctctcagatattgaatttgcttcttttgagacttttttgtgcttaatggtggggaactggagggaagtttaacagaaaagctttcaggagatgtcggttctagaggggaaggcacatttgtgtcaacatagtgtacgttttctcatcttttctcattgtccactaatgacacagagctgccattgaagctcttttctgtttcttttgttgtttcagagagtaaggtttattgttattcttgagttaagaaggaacaaggagagtggtacatttgtcctcgatatttgtaggtggttgaagattaatgttccttacatgttaagtttaggaaggatggctttttcctgctgactacttttatgagatggcatgaatttagctttccattttgaacttactgtttatgtacagtgcattttgttcagtgctgcttttccataaataaggcagacaaatactatctaataaataggtgaatagttttaagacttgtttaattaaaaatacgacatgttatcaagggtgtatttcatcaggcaggaaaacgttatagaattttccacagagatcttgaataaaaaatggagtttttatattcattactttttgcctgaaatgggacaggctttttttgtttatctttttcttttcttaacgatttgaaaggatattgcagatgcttcatctaggaactttaacaaaggatttttttctacttctgagctttaagaaaaggtatacttttttcctttgccattcagtttctcattagctaacatccagtttagtaattaatagcctgaggtactagatattaaatagtatatatttatatttggcaaatgtttattgtgcatcttctatgttataaaaactgctaggcttatttgcttactctttagagtataaggtcacatctctatgtacgttatttaggagtttctatgtggttataaatagcccagcacatacgagatgactttcaggagctaacatttagaccataactgagccaactttacattctcttacagctgaatattttactttcttcagtgtaattaaaaaaaaatttaagtatcacagttttacaaatgttaaagccaaagactggtgtcagatattatgtgttatatcagaaagcattgttgagaaaaattcccggggaagggccctagcttccccttgccctgtgcaccgtgattgtggtgctgcctggagtgtgcataagtgtgtatctatctgtatatctggagaggggttagtgcagggtgtcatttggtgcctgacagtggaacagtgcagttgactcttagctctgctatccaatgacatgcagtggctgagagtttgaagctgatggttgggtctccagtgccgcctgcacacctgacaggcagctgttaaactgagcaaaggcaagcttggggagtcacaatctatgcataaatgatagggatatctgtgcagaaggtgcgaaagaagctctgaccccctccctcccccaaatctcccccttcccaaatgaaatgcacagttcagccagcttcttaactacactacactcctgctactggctgccaagaggctcaaaaaatccaccttcacttttcagtcagaagaggcagaagtggatgtgagagaaagagagacacagagagacagagagccaaagagggcaagagacttgactttaagagactcctgtactgacaactccatgcagttcggaaccagaacgactacggctgaaccagggttcatggggacatggcaaaacgctgatactaacctcttattcagaatgtcccaaca

SEQ ID NO: 41564 - DNA, 2300 bp, Homo sapien
tgttaaaaagctggatccacgtgaataataagcctaatcccattttctttctttttttttttttttgcagatggagtctccctctgtcgcccaggctggagtgcaatggcacgatctcggctcactgcaacctccatctcccgggttcaagcaattctcctgcctcagcctcctgagtagctgggattacaggcgcccgccaccacagttggctaatttttgtatttttagtagagatggggtttcaccatgttggtcaggccggtctcgaactcctgacctcaggcgatccgtccgcctcggcctcccaaagttggattataggcgtgagccaccgcgcccggccacctaatcacattttcaagacagctgtggctacttgggactctcatcagcggctcccgaaaaatttaaaaaaatcagttactgtgaaaatttatattaaactaagaccggactctgcaaagaaaataaaaccatgtaattccaaggctacatattttcaaaggaatttaattctgtcctctgaatgcaattaagtagtctctctctctctctctctccgtttgaggaagagagaagggaagaagggatgattctcacttttcactaggaaccggtaaccatacctgctgttctgccaagtcttcgccgattctctgatttcttagtgctcagggagtatgcttgaaacctatgccttcctcccatgttagataaccagaaagtttgctgtagttatgataaatctgcataactcggagatgtttttggcacaaagtgtacgttagttagatgatgatgattaagctccccccccacccccgccccattcttgcggccggggagtgtgttttgcctgtatttaagaaatatcgttcagctgcaggcgtgtgcgcgcttaggctgtagtcggcgtttctgagtctccagggcagggtgacttgggtcggctgagtgtcacccacagatgtgactgttctttcccccgcgggcgcgacagcctccttcctctccagcccgaggcccgcggcccagaccacgggaaagggaaggaagccctcgccgcaagccggcgtctgggccggcacaaaacgctccgccaccagaaaaacttttttcccccagctgcgcgcaacttttggccttttctcccagcacgttcgcgtcccaggtttctgtccgctgggttttcctccgcctcactcgccttctccccagcggcgcgcggaggagctgggctgagagggtcgcggggagccgggtcggccgcggctgggacgctggggaaggggcaggggaggagggggcgtgcggggctggggaggaggaactggtcaaaggggacagagacgcccgagtgcccgaaaaggaaagagctgccgcggtttgctgcagtcggaataaagttcgcgccctttcctcggcgtttcgcagcctcctctccttgctccgctccccacccccgccccgcaatttttttttgtgtgtgtgtgacagctgggcgctagcggccacctctacctccacgcccgcagctccccgggggggggggggggcgccagggttgtttttccatccccacaaagttgttttttccatccccagaaagagagagcaagaacaacccaaacaacaaacaagcccccaaagaagtcacggggcggtggggggagggagaaacatacatcctccttccccaagcccctggacctctgaggacaaacaacacaacgaccgacttttattttgcaaaagggaagcaacattgtagtcacgacaattctgcagagagaggaaaaacttgtggggcttgcacggccgccgaggtcacctcgcccgccggtcccccgcctcccgcgagcagggcagccccctcccgggacaagccgttccctttttttttttttttgtcccgaggaggagccggggaaccgtgccggctgggactcggggcgcgagcgcgaccccggcgcgagtgtaaatcagtcacctgagcgcagaggggccgcggcgagggcgcgcgcgggcgggcggggaggcggaggcggcgagagcggaggcccggaggaactcggagggggagggagagaaaggccgagacggagggagccagcggcggccgaggggctggtccaggcgcggccgctaagaggagaccaagaggcgggggctgcacttgacaaccagcatgccgagatggtaagaagtttccaccctccttcctcttttattctagacttcctcagaaatgacccccgcgcccgagcgccaccggggccgcccgggggccgtgtccg

SEQ ID NO: 41565 - DNA, 2300 bp, Homo sapien
tttatttgtagccattttatttatttatttattttttgagacagtcttgctttatcacccaggctggagtgcagtggtatgatcttggctgtttgcaacctctgcctcccgtgttccaatgattctcctgccgtggcctctctagtagctgggattacgggaatgcaccaccactcccagctaatttttgtatttttagcagagacggggtttcactatgttgtccaggctggtctcgaactcctggtctcaagtgatccaccagcctcggcctcccaaagtgctgggattgcagtcgtgagctaccacgcctggcctatttgtagccatttaaaatgcctacgatggtaaattttatgttgtgtattttgtgtattttgctccaataaagacaaaatttaaaaaaatgcctagtcaaagagtcaggatattatccttttgggaggtcacatatacatatttataccactgcttttcaaaaggatctttttatgatcaggtgaaatgatgtccttttgagtgaatgacatacagcaattaaaaatgtgcattaatactgatttggggccaaacacgtaacttatgtggttagacttcccagtcttaagtctagtgaaatctcacagactatcaagaccaaatgttgtatttcaagtcacaggtgtggagacagggtagcgatcaaagtacaggttttcagagttaagtggaattcagtgaattcaaagcctagcttttctgataccagacatggcacttcagagaagttacagtaaccttgcaagtctgtttcctcactagtaaaaatggagatatataataatctaattgaaggtgacatatgtattaagtgagttcatatatgaaaagtgcttagcactggactcagcatatggtaaatgttcagtaggttagctagttctaagacaggcttataaacatactttttctaatgtactctttaataagtttttgtgaggaattcaccttcagtttgaaagaagtccacttatcttggttgccttggcaggattctaattgggagggtgtcttttggcatcctgactagattctcatgcagagatggtgatattttggttaaatgaagttaacagtaaagtggtcatctctctacttctgctctcaacccccatctcagctttccccaagtattctggaaccctttctgaagaagagggcagttctaactttcagggatgttctggtgccagctcaatatgcatctcattaatcttatcaatagtaacaaagtatttgaagggcaaagaaagatacgattactacctatttgaagtttataaagaaagccagaagaaaaagaaaaaaaagagaacaaaagataaagtaggtcttgtttcttcatccacgctccaaattactgatttcaaactgctccaaggacccaaactgttcagcaatgtgggctacacttcctctgatatccagccaacgcataaagaagctgacataaaaactcaaaggaaatcatgactcctgcaaaacaaaagacaaagggtgtacaaaggatcatcattcaagttggaaacctgcttgatagtcccagatcagcacaaggctttccacatctccttgacattagtcagctggatgtcagctgtactaaagcagttttgccaaggggtgtgaagaaaacacttaagtgtaaaacgtattccttgatcctcaaggagcttacaacagggctggggagattagccgtgtaactgacactccagggcggtcaatgaaacgtgtcacacgagttggcaggggccttgaaggagagggatttcacagttaaggatcatttggggctgggggcttgtcaaggaaggctttaagaggtgggatgtaagtggcaggcagggctttaggtgggcgggaaatccaggcgatcctggccaaggactcaggcacaggacgctgggatggcctgcccggcggaccggccttaccctttcgggccacggcgcgtgcgtaccccaaggctcgcgctgggcgcattgcccgcgggaagccggccaggaccagagaacacgggacaccgcgggccaaggcgggaaaagcctcgcgcatgcgcggttcggcgttccgggctcgccgggttggggaaagggaggtggagtttccaacagggaacttgacccgttagcagccgcagccatggcggcgcgttcgcctccctcaccgcacccttcgcccccagcgcgacagctgggccccaggtccccacgtgttgggcggggagctgaagtacacgcaatgcgcagcgaggcctc

SEQ ID NO: 41566 - DNA, 2300 bp, Homo sapien
atagaatattggatatattttcactttattcctaaaatccacttttcatcataatcctggatcttcctctcattttcagtttattcccaagtcctttggagacaatttgataaggaagaaatgtgagagtataaaataaatcgatatttagggatcagcaccagtgatagatcagaaatggaataaaggtcaactgagcatattacttaaaaaaaaaaggtgtttctatcttgatgtgtctctttcttggttgacagacagaaggtgttattgagtctgacttggaggcttccaataattgtgtgaggctagatactatgtgtttaataaatattagttgaaagaatggatggattgataaaagttgaagaagtttaggaaagagatagtatcaggatatggatttcatttttagtaagttagtttgagatagtagacaatccaaagggagaggtcttgtatagctggaaatatgagattggtgattgggaaggtgagggctggattatagattagatagtctttcagacagaggaaagatcagcagccaagagaggtgctacattttctgagagaaaagatgtacagagaaacaaggaaagctaaaaattgagtctggggtacatccacctcgtaggtgtaatttaggtatctcacaggtgagaagaatgttcggttaaaaattttggcagccttaacattctaaatattctgtctacagagcaagatattattagtactaaaataaacttgccattttaaaaattttaaagtgatttatgcttttacaaaatcatagtttatcagaaaagttccttctaaatgacattcaaataaaagaataaggaattatgttagctataaatatattttctttaattagaatggttcgtaaaatcttgtttttctcctgttacacacctaaattttgaaaatttgctttctgagtatgatttaatatttaatatccagtttttatgtgttcttcaacataaataggccctgtacttgcacattttagttaaaaattcatgggcatgttacaggagatgagaattgtggtgacagacattattatgaaagctatttaatcatcacattagcaaatcaaaatgtaaaacctttaaaataaaatactgtttttcttagaaataaaagctcaccagtaatttaaatttttttccacagagagagtcagtactgaaacaggaaataaatgaccttgtaaaacggaaaattgcagtagatgaagaaaatgctttcttaaggaaagaattcagtgacttggagaagaaatttaaagataaaagtcaagaaattaaggtgtgttgacttgtacatagttttgtgggactgttgctttgaagttctgctttaagctttgttagcctttgtggcacagaaagtgacagatttggaggaaaaattgccttaggccctcctgtaccatacagttttctcacatgcaaaaactctgataaagatgctttaaagccagaactccaagctttataacttttagataaatagttaatgatggaaatggagctaagaaagtaggagtgtgaatatgtggcttcttgtaattagattctgatgggactggcattattaattgataaaacccaggtctgggaggatatgtctgtatgggtctcaaaaatagctggggacagcatcaaaggcagcttgatcaattaatgggctctttgcaaatgtgtactcatcaaagctgtcatccagtgaaaaaatatgacccatccacctgcatgaaaagaggccaataaaagtacacaggtgaccttggctatcaaatatagaagaagcttctgtgagggtaaaactgcacagtttgtatttgctgattagtgctcaccattttttgggttttttgtttcgttttgttttatttatttgcccttgtggtactgttctacaggacactaaggagtgtgtacagaacaaagaagagcaaaacagactagttataaaaaatctggaggaggaaaacaagaaattaagtacccgctgcactgacctgctaaatgacctggagaaattgaggaagcaggaagcacatttgagaaaagaaaaatatagcactgatgcaaaaataaaggtatacaataggaatggaatccatactcctcttttggatctaactttttctaggaagtttaatacatgttattttctttaacaacttatatattcatatccaccagtggggactagcattaatttatattctttcacttaagacccatagctttttaaaaattgatgttgcaaagcaggaa

SEQ ID NO: 41567 - DNA, 2300 bp, Homo sapien
acattttaaaaactctaatggtgaaagtaattttgattattctcttatctctattttattgttttacattatcccattttgggcagtgggatatttagactgtcattcatggctttgaacttatttatatacttattgtctccatgcttgactcgagaattattttctgtggtggcttttctcccatacattttcttagttgtggaagcctccctttagggatgattgtgtcttcctgaaccctccagtatactctggccatatgtccagtttttgtattatttttgattgttcatgtttctgtaaattgtatggctcagttttgaacctattgatttaggcttgggattctgatatcatgtggttgactctgtcctgtccccatcctagggctggagaactattttagtgaaactctaaccagataagttcagatattcaggttttcattcagcagattgttttctcccagtttcctgtcgttagctcatttttatctgtcaaccaggtagggccatgggtctaaatgtccatctgatatggtttggatttgtgtccctgcccaaatttcatgtcgcattgtaatccccagtggtgaaggaggggtctggtgagaggtgacttgatcatgtgggcggacttcccccttgctgttccattgatagtgagttctcataagatccggttgtttaaaagtgtgtagcacctccctctgtgctcttttcctcctgttccagccatgtaagacctgcctgcttcctgttccccttctgccatgaatgttaagtttcatgaggcctcctcagccatgcttcctgtacagtctgtggaactgtgagtcaattgaacctcttttctttataaattacgtagtctcaggaggttttttttatagcaaagtgagaatagactaatacaccatccctactcaggtctcacattctgaggtccccatgggcagtatttggttctggtcaaatactcacaatggtagctcaattctgttttactggaaagtctttttgcctttatttggcatctaggaatttaccattcttgttttcagtgttatgtattaacatttttcattactattttgcctagaatatctctgtgttaggatgtggttgagcatggcgggtgttgtggctcatgcctgtgatcccagcattttgggaggccaagatgagtaggttgcttgagtccaggagttcagcctatgcaacttggtaaaaccctgattgtacaaaaaattagctgggcatggtggcacacacctgtagtcccagctacttaggaggctgaggtgggaggatcacctgagcctgggaggtaggggctgcagtaagccacgattgtgccactgcacttcagcttgggtgacagagtgagactttgtctaaaaacaaccaagaagtggttgagcaatttaatacataatttttaaaattatatagtctgtattttaagtgtttagcatgtttattgagataaagttaacagaaataacttacttaaaacatttgattttccaggtcctcagtaaattcaattgtagttttttggatttgggcatattattactattttttattttatggagacaagggcctaatcttttgcccaggctgtagtgcagcagtgaaattatagcttactgtaaccttgaagtcttgggctgaattaatcctgctgcctcagcatcccaagtagctaggactacaggtgcgcgtaaccatgatgggctagttgttattgttgttgttattattattattattgtaaagacagggtctctctgtgttgcccaggctggtcttgaacttctagtctcaagtgatccccttgccttggctttctaaaatgctggaattgtaggtatgagccaccatgcccagcctgtgaatattattgatttatttttgctttcattttactcttctccattttatatacattaaaatatctttactgactttgatatattatttagaaatatatttaaatgtatatgtttgatttttttaaataaaacaatatggttttaagtaaatgtttattgctttttcataggatgaatcttgaagaagaattagatgaacttaaagtacatatatctattgataaggcagcaatacaagaattgaatagatgtgtggcagagagaagagaaggtaaattttcagaaaataaatacttaacagaggaattttaaaattgtgtaattcttgatgttttagtttcaatttcttttaagaatcttaccctttttgtttcttttccaacactttattcattga

SEQ ID NO: 41568 - DNA, 2300 bp, Homo sapien
aattgtgagagttacaattcaagatgagatttgggtggggacacagccaaaccatataagatgaggtgcagaggatgcctgggcgactaaatcaatggtttccaaaggatttaatgtaatgcccttaagtagtttttttctcccaaggtagtttctttgaagttaagcagcatgagacttccaggttggtggatgaagaaccagggaaagatagaaactgccttttttataatgtagggctcagttaagtattcaaagttccaaggaggcaattcaggcccccatttcacacctttcactgttagagagcagagctcctatccatcccaggcccttccactttgtagatcaattgctctatcttttggcagcttcaacaaagccctgtcttatgaaaatgctttattgttcagatcagggacctggtagtaaaaattaactataaaatacttttttttctattatgcaagtaatgggtagcctttttaaaaattggaaacatagagaaaaaagtttattcctaacaaccggagcctcagtggattaaaattactcaggtttctcactgatgctacatgcccattgaacgtcaggtggggactctgcactgctttagtctcactctggatactggctgacagaccacagctttctagaatattgcggccgaggaaaagaaagctttgcggcatctcatacatctcatattgctgctgcagaagtgacagtcacttttcctcttaaacctctagtcaaaacttgtaaccatgcctccacttaacaagaggtttggaaagtgcaattctgccatgtagggaaaggtatatgaacagtggtaagggctaccacactggagaatagctcctttcatctgcctccctttgcagcctgcgtccctagtccatgcgctctactgctccagtgcccaccactgcttgactctgcctttgtgtgtgtcagttcacattatcaagaaggaccatgactggtagctctacggatggaggacccttttgtagcaggtgttcaccctgtgcccaagccgcagtgcctagaagagtggggatgggtctgtggctcctatcaggctgcaggagttgcggagacagaaaaagtatttctaggactcccatttggccttgcagtctctacacatccttggcaatttctcccatcttggcttctccttcttatcactttggtccacatacggggacagcgtctaagttctttctgaccacctcctcagtcctagaaaaaccagacttggttaagtaccagagcacagaaggcatttagtgctgctctgctcccaagtcatctattagtttcactttagccagccatacctccttggttacatatgaagcatctgtatataacttagtatcatgctttttcacattatattttgatttttatcggaccggaaaccctaaatccacaagcataacaacaagatcacatttgggctttttcatttctgtaaccagaggattgaacgctagttttgtagtaagacttcaattctatttatccgtccaggcttaagggttcctgttcttctttttaagtcattaaattgtatcagacaagggggaaaacgcgtgtgtgactttccctaaggtaagatgggcttaagggatattgaaaccagggcagagaaatgttttctgtgacccaccagtcagggcaaggcatagaaggagcaatgacttattcattagcccagatagaaggccagtctttttcaggctgcggcgcagagacgccaggctcaaagggcaggagggccgtctgcaggcagcgccgccgcggctacctggaagcccagcaagtcacctgagtcctgcgggtgcctgggctgccaatctgcagcgacccgtccgcagcccccgggggcaggaacaccaaccccgggacaggaggacgtcctcggcccgctgactagggatccgccagcgggtgccgctgagccacatccccgcagttggcgccagcatccaggtaccgcgcgccacagcacctgcctgggcgttcccgcgcttggggcggggcttcccgcgtcccctttaagaggccgcatcacccgcccttgacgtcagagtgtttctccgcaagagcccgtgtcccgctaggctccgcgccctcgcgcccatagccccggcggcggcacgaccagaggcggccaggggagcgcgccgccccgctcggccctccagtccccctccgcctcctccctcccgcacagcagccgccagcgcggcctcctgcaccatgtcggtggccggcctcaagaa

SEQ ID NO: 41569 - DNA, 2300 bp, Homo sapien
tacttttctttctcccattacctattcttccctttggatctgcttaatgagcagggtttatgtgtgaagagggaggaggtggtattaggtaaaatgttccattaatagaactagctgaaactcttcagttaatgactgtgataggagggaaaaaaataaaccctttagcagaaagctctggtgtgtaacagagagacacatgtaacatagctttatgaatgaaagtttatttcaatcaatcacctttctttaatgtgatgaggatttcagacaaaaacaatagtggaaagacaaagttaagcatttttacatctacttgtgaatacgctttagcttatgagcattagctagtttttgagagatttgtaaaacaaatctttctaaaagggaaaagcatatttcaagaatgggctctctttgttatggatttgtactgtccatttttctaggtccacatacttaatattgagaacaaaggataatctttgtatgaccttgactttcctaacagcatgaaaataggatttttaaagtttctctctctttaattgatataccatatgaagtaggtaacctaaagttgaacaacctgcttttcttcacctttttgaaaagcaacgcagcaggtatgtacataggcagacctgcctgtattcacatgcccattatggcttgatcaggttttccatattcgtgtgtttcatacctcttgtcagtattttttaataatgaaaggaaagaacattaattctaaatgtcttgtacctccactgcatatatttctgggctatcaggagatctgaaaagggaaaacgtcctgatgacacacctatggcaatgtaaggccagggctgctcttttattctttcaaaactcaatgatttcctttgcagataaggggaaatacatccttgtttgacatttgacacttttctaaaactgtaataaaaccttcctctagtagagtcaaatctcccttgctggtggattaagcagcttcagaagcttcctgaccttctcgttgctgttgctggccttgtcgtcatttcactgctcattagcacttccttcagggctggactggcctccaaggtcatcccatccaaccctcttgcaatagtggatggaaaaatgaggtaaaactcagttcagccttttctgcattataacagctctgataaaggacgtgggtgaggtgcggaggaagctgaaacttggttaaaagaaggtttggggattaactgaggatttaattcatcctttctttctctcccgtggctaaaatagatagttgagagttggcagtgcatcaaaaccaggctgctcctcaaccccaaatttcagccccactcatcctggagtctttgttgagggtttctttttaaactgggggatctaagtttctaattgtgcctttacaattagcaaatcttaaatgccttcaattgtcactttacagagaagcaacttgctttgtttttttccccccaaattaagtccttaataacacaaaataacttatgccactgtttaggcttagtgaggaaccttcagaaaatgtatagagtatttattttgcaagtcaagagagaaagtaaagaggaactttatggaggcgaaataaaacagttgtacagaacacatttacagggcacattaagtcggtttttgtctatggttctttccctttatggcatatgttatatattgacagggattaagtttctctcctgaatggaacaatacacagtcacagggagctactgtactttacaaagcaacagacatcagcacaggcaaatggcaaatagaaatgcatctcacaaagaactaaccaggtccatgggaagcacagtgcttggcttcatcttttgcaattctgcatcttttgcatttcccttctcgctctgctgctcgctcgcctttctttttcgtccttttcccccttttttgctcgcaccgttacactttctctgtcctcctggctttgttattcagcatgtctgattagcaggagcctgattggctggctgcctgctccgagagagattccattcagcttaccccccacccatccacccacccacccctcggtcaggaaatgtgagaggggctgatggaagctgataggcaggactggagtgttagcaccagtactggatgtgacagcaggcagaggagcacttagcagcttattcagtgtccgattctgattccggcaaggatccaagcatggaatgctgccgtcgggcaactcctggcacactgctcctctttctggctttcctgctcctggtaaa

SEQ ID NO: 41570 - DNA, 2300 bp, Homo sapien
cccacctcagaataattgacagctgattagaagtggtgctgaaatgcaaatgtcatacagcctggagagacccggcaagggaaatagtgaggaaagaattgtatagtgggagagtgttgctggggcagacctgacttccaggcttaatcttaccacagagtcttaatgagttctccccacatttctgttgtttccccaccctctcactttcttgaaaaacaacccctattaactgcttacctcctagggaaggatgctagcataatattgggtgaacagttttttgaagcttttgaaactagggaggttaaaaaatcacaaagctagaaatgactagcttcaggatccccaaaactggctactgagccatttctgtgctatcaaataaactgtcaacctaaagtacctgtcaggtctaggcaccggatctctgagcttctgagcttctccattgtccctccaacccttctagattccctcctccacatacacattccagttatcagccagcctcactaagtcaccaagacatcaggttcaagtgatcgttagtcattaattaagctgccataatgtcacaggtactttctagaaatggcataaatctagaaaagaaaaaacagacttgggtggagtgggtttgaagctcactgtaggcactcacagtttgattcttttaagtcttttcagattaaaaaaaaaaaagtctgaagtagactgtgattattctggaattttctctccatgaccttgaagggcaagttttgactttattctactgggaacctactctacagagagtcccctgtagtagtggggaaaataaaagcaataaataagacctgaagaggatcacatgagcccaggagttcaagaccagcctgggcaacttggcaagaccctatctttacgcaaaatttaaaaattagctgggaatggtagtgcacccctgtggtctcagctacacaggaggcagaggtgggaggactgcttaagcccaggagttcaagactgcagtgagctgtgtttgtgcctccacactcgtgggtgacagagcaagaccctgtctcaaaaaaaaaaaacaaaaacaaaaacaaaaaaaaacaaacctgagttttgtgccccataagatttacagctaaataaagacaatagatgtatatatgactacacagcggctgtgacacagaatttccttcaaatatgtgtaagatcctctcaatatgcaattcttggctttttctcttctacctgcaaacctgaacagatgtctgtctggttgttttttgttgtttttttttgttgttgttgttttttgagacagagtcatgctctgtgtcccaagctggagtacagtggggcaatctcagcccactacaacctctgccccccacgttcaagtgattctctcacctcagcctcccaagtagctgggattataggcatacacccccatgcccagataattttattatttttgtagttttagtagagacggagctttgccatgttggccaggctgttcttgaactcctggtctcaggtgatttgcccgcctcagcctcccaaagtgctgggattataggcatgagccatggtgtctggccaagatgtctgtcttgatctctggaagccctacgttctttcaaccatccaaccaagctccacttctcttttgtaactttgctttttccttaataagccttccccaaatctatctgtaccgtttgttctagcatccccccttcccccggatatctgtgtgtgttatatgtatttggtgcacatatgttgtctggtccagctggtagcatttagatcaagtaatccacaggctgcaaaggcaatgggaaacctccttatttgagatcactaccacagtcacattaatcaaagaggcaagagagcacaggttcttgattgtccttgtagctggtttgtctctgttgttaaaacagggttctgcatacaccctgaggttccttcctgccttaccaatattgaatgccaaaaaggagtcaactgacttgaccaggtctatatttcttttctgtcgctccaggattcttctacagccagatgattccttacagatcttggcaccagtggaagcagatgtgggtttctacacttgcaatgccaccaatgccttgggatacgactctgtctccattgccgtcacattagcaggtaacccaaaaatccctgttctgttcatttcataaacctttattgaatgagtgcctatagtgtgtcaaacaggcccagagatgcatagataaaggagacccagatcccat

SEQ ID NO: 41571 - DNA, 2300 bp, Homo sapien
aaggaaggaaggaaggaaggaaggggaaggaaaagaggaaaagggtttgcaggaactcatttttccttgttctttcaggagaaaaatagctaagagtgcatttcttcaatttacttctgaggctgtctcctaaatgccgtggatttttttttttaaatgggaaaaaaactaagctcagggtccaaagtccaagctggcatggacaggcatcatgatgctcttgctctccctagtggtgctgcaatgaaaaatcagctgttccacccctcacctgtgtcttttctccaggtatctttagagatgatgccaacctggcccctcttacacacttgagcataaagtatcctactgttagagccagattagcgtgtgcctctctctgatgtgacaaggctgtggtatccaagtctccacccactttcggtagccctgcctctctttctctagccaatttcaaggacacgtaacagatacacaggcaactctttgaagacactctgcattctcaacagaaggctagccattaagggcaaactgcccttgccccaaaggcaaaaaccagccccagctcagggaaaacactagaccactagactaaaggtctggctccttggccattcttggctttgaccccatttcccgggacttgaccctttttttttttttttttttttttttgagacagagtcttgctctgtcacccaggctggagtgcagtgaggtgatctcggctcactgcaacctctgcctcccaagttcaagtgattctcctgcctcagcctcctgagtagctgggattacaggtgcccaccaccatgcctggctaatttttgtatttttagtagagacagggtttcaccatgttggtcagactggtctcaaactcctgaccttgtgatctgtctgcctcggcctcccaaagtgctgggattacaggcatgagccatcacgcccggccaggactttacactttaagcatgccctggatacatgccagtgagttctataaataaactgtgtgagctgggtcagcaggctgagttgtgtaggggagggtgctttctgctccctagagacctgtgaatccgtgccacatatcttcagtctctcaacatactcagagcccagcctcctataggatcctcctaaaacagcatctaggaaggctcatcctaaactctcagggcctgttttccagcatgtcaaccacaaggaaacttcctgaggaattcatggggtccctagagcacagagcctggcttccaaagagagagcccatcccaggtcagcagatgatctccccatcccatctctctcacagaaaataaacttggattgtggaaagagttgagcactttccttttgtccttttcctgtggttctactgatactaccatttcatgttctcttgctctgagaagatatgcaggcttccaaaaatacaagcaagttttctacataagagtgtcaactccagtagcaatctagcagcttccatttgtctagttcatacatatattttaacgttgtatagctttgcactttttattaaaatatatctatacagaaaagtacatgtatcataaaggtaccaagtgaacactccccaccagaccagcccccggtcaagacacagagcatcgccagtggccaagccacttgtcccatttctcagtcacaacccctccccattcattccactgactactaacagcatagattaatgttaccaggtttttttttttttacttacggaaaggaaattatacagtatgtactcttgtgtctgccatctcttactcaacattatgtttatttcatgtagtttcattttcactggtgtatacatttggttctcatgtttttcaaatacattttctccaaagaatttgggtactctccttccaccttggcaagccccccctgccagcttcctgtttcctcctctttgtactggcctccctcttcctgtctcatcactgtaagtttaaaaggcaaaagatctggagacaactgagatgtttatcttgtatcaacatttattctgattctttggtcaccctgaagtctatatccttatcctaccaggctctggacattatttaatctggccaaagcctggtagaagatgtccctgtagagcagccccagggaagggggattcaagaagctataaatgcctctgggctcacctgaatgtgtttgactgatgagtggggttttttgttttttttttttcttcctaggagtgcctgaagctgaagtcacttggttcaggaataaaagcaaactgggctccc

SEQ ID NO: 41572 - DNA, 2300 bp, Homo sapien
gcgtcggatagaaggcctgccgcacaatctcaggaaggtctcctaacctctctaggcctctgtttcttcctctagtggtgaactagatgatttctagggattcccaatcttgtgtaaattttaacagttctatctctggattcaaaaacaagaaatgctaggccaggtgtggtggctcacttctgtaatccttgcactttgagaggctgaggcgagcagatcacttgaggccaggagttcaagaacagcctggccaacatggtgaaaccttgtctctacttaaaaatatgtatgtgtatatatacatgtgagtgtgtatgtgtatatatatatatatatatatatatatatatatatatatatatatacacacacatacatatacatacatacaagtatatacatacatacacacacacagaaattatctggacatggtggtgcacacctgtaattgtagctacttgggagttggaggttgctgtgagctacgattgcaccactgcactccagcttgggtgaccgagcgagaccctgtcaacaaagaaatgaaacattagaaaaaatcccttctctctatagttgcataggcacccacacatccacagagggtagccgcctgtcttagtccagtcaggctgatataacagacatataaaaactagtggcttataaacaaacaaaacaaatttgttttttacagttctggagtctggcaagtcccagatcagtgcagccgcagatttgatatcggtgagggcttgctgtctgcttcatagatggcagcttctcattgtgtcccacatggtggaagggccaaggcagctctctccagggcctcttttatggggacactaatctcattcgtgaggacagagcccatgtgacagaatcacctcccaaaggccccaccctctgataccatcaccttggtgattagaattcaatatgaatctagggggtatacacaaaccctcagactatagcaccatctttgtgtctcgtatctcatcatctcctgccttgcatctgcagttttatgagtgtactttctaaaaatcttataccagctgagatctccctagaagagggaagatagtcttaattatcttaactgtccccagagcagtaggtaccaaacagatgtttttctaagtgaactgagggggaaaaaaatctatagattctttaattttcaatgacttactgcattttacacttccaaagaaattctctgtggaaggtaagttgctggggcacaacagcaaattcagcaagtaccctgaccttcaaggaatttctctcacaactgcaacctgtttatcttaccgattctatgctacaaagtcttgggtagacatttgagtttattatatcaaaatatgtttgatggctctgtagatgtgtataatattgtacatgtccagtgcaggcttggcaaaagccttcagaagacaaagccttatgcagaaaaaagatccatgtctaaaattgctttcctagtctctgattggaaaaatctcataacaagtaaaatgagggaatatgatacttttaccaaatcaagtttgtttcttaactattactatatagtatggtattttttcccaacatatcgtatttgaagaaggaatttctgtcagaaaaaaatcactataagaactacttaccttgaaaaaactgttcaatgaatgaagattaattgtatctttttttaaagttagtatagggacataaacagaaagaaacaggtacttttgttatccagtaattttacttaattgaatgaatcatagtcaccctcctagaaattcagagaataaaaacatctcctgtttgctcaggaatggcaaatgtaataaaaatgccacagacaaggccacattgtgtgtacaatttctagagccacacagacagtaaaccagtgcaccagcaatgtgttccttatggctttactaaggcttacttcttttcctctccttctaggctgccccatcaaaggtcaccctgtccctaatatcacctggtttcatggtggtcagccaattgtcactgccacaggactgacgcatcacatcttggcagctggacagatccttcaagttgcaaaccttagcggtgggtctcaaggggaattcagctgccttgctcagaatgaggcaggggtgctcatgcagaaggcatctttagtgatccaaggtaagaaaccctgcagactttgcatactggacttgaacaagaaagcccacttgggaatctaactatctagcagaacaaagagatttctgatctccagtggt

SEQ ID NO: 41573 - DNA, 2300 bp, Homo sapien
aaaaacaggcataaactaaactgttttaaaagttaagtctcagtggttacatgtgcagatgaggaaagagactagagagtagacacaaagtaggctcctgagttgctgacagcattttatttcttcacgtgtatacaggactagctacataatttgtggggcccagtgcaaaatgaaaatgtggggctgcttgttcaaaaactataatgaatgtcaaggttgacagtagagcatcaaaccaaccacagtttccttctaagggggtagagacatccatgcagctagctttgcttctctacagttgtcccttggtatccacaggtgattgattggtgtcaggagcacctgcatatatcaaaatccacacaaactcaagtcctgcagtcaatctcacagaacccgcatatacaaaaagttggccctccacatacatgggtttcacatcccaagacctttggttgaaaaaaaaaaaaaatgtataagtggacctgcccagttcaaacccatgttgttcaaaggtcaactatactcactctatagtaactcactgagatatacttcatgttttaatcactttttttttttagagatggggtctcactatgttgtccaggctggagtgcagtggctattcacaggcatgatcatggtgcactatagcctcaaattcctgggctcaagcttactcttgcctcggctttctgcatagctgggaatacaggcatccaccaccacacctggctgttaatcagttttctgtatgcacactgtactgcacaataaaaagttattttttggccaggcacggtggcttacacctggactcccagcactttgggaggccaaggcaggcagatcacctgaggtcaagaattcaaaaccagcctgaccaacatggcgaaatcctatctctactaaaaatataaaaattagccgggtgtgatggcacatgcctgtagtcccagctacttgggaggctgaaacaggataatcacttgtacctgagaggcagaggttgcagtaagccgagattgcaccactgcactctagcctggtgacagtgagactccatctgagaaaaagaaaaaaaaagttatttttaaaaatacggttaaagagagaaattttagccactcaggaggctgaggtcgggggatcaattgagcctgggaggtgaaggctgcagtgagctgagattgtgccactgcactccagcctgggcaacagaaagagaccctgcctcaaaaaaaaaaaaaaaaaaaaaaaaaaaaaaaaaaaaaaaggtccgtttatgtgtattttacgatttaaaaaaaatcccagtcattggtgttaagggggctttttttttttttttttttacatttaccccaaccctccatgtgtttgtgaataatagtgtcaaactgggcccttcagagtccagaagagcaataattcgccttgggcacagctgtctgacccaagagagctacttttaccttaaatcctgctctttcagtggttcttaacctttgaggtcatggatccctctgagtacttgatgaaagctagagggaacctcttgctagaaaaaagccaataaacacaaaacttttgcttatactgttaaggattaacaccccagcaccacccccagtggaaccctagggatccaaagacccccaagttaagagcctttgttctaaagtgacctccatgggatgcgtatcctcttgttttactgaaatagcagatgttggctacatgttggctaaaggcctgctgcttttgtatttcacagacagttgttgctaggtgtatttactgtgacagggtcaggctccatgaactctggggaaagtttaacaatctccatgagcacatagcaagagaatatgagggaggactctgcatacctaagtctgctttctgttcagtcatcctaggtttaacctgcagaaaatgaagccagggtaagaaaggatggagttggttatttggatgactttagcaagaaaacgataaaccatattaccctctctgcaccgaaggggtggagctatttaagggtcttcagttctaaagtctactgccacattcctagcatattatgccaaaatatctttcatatgattaatctgagaggagcttgacgttctcttactggttctacactaccattagccatttgctggcagaatgcccacagaccacaggaaatctaaccatcccataaagaaaacgtatcagtgagtgtcttttagttagcccaaagaggggaaagatgaatggtctgagagcctccaacaagacctaca

SEQ ID NO: 41574 - DNA, 2300 bp, Homo sapien
catggcgggtggcaagagagaaaaatgaagataaaaccgtcagatctcatgagacttattctctatcataagagcagtatgggggaaaccgcccccatgattcaaattatctcccactgggtccctcccacaacatgtgggaattatgggagtacaattcaagattagatttgggtggggacacagaaccaaaccatatcagatgggtcagggtaagtttggctggatgtaacaaaagatggacagtaagtgtaactaggtgaggggaggttgtccctactgtctagcactgatctttaggtatatcattgttgaggctattttgtccacaccatcttcatctttcaagatctctaccctctattgagggcatggatggaggaagtggggagtaccatgattgttgacaaggtggccacccacaagggcagtttgaatggcagggggcatgaacaggcattcttctgctgaaagatttatggataatgtttaggcagccatcaagagaaggctggtgtccagcactgtatttcctctgtaaggactgtgtgatgttctctgtcaatggcaatggatggcatgcaggttttgctttgacttccaatagctcccacctcttttttgtctggccatgtttccatcctcccctgtagagttctgacttcctactgggaaggcaaggagcagcttcccaccccactgttcttaagaatgatcaataagctttgctcctgtctgaatctaccttgctgacttcctataactggggttggaactctctctctgtaaaatgtcagatagtgaatattttagcttttgtgggccaagaggcaaaatcgggaatgtttacacaaattttttgaaaaaattcaaaactttattcacagacactgaaatttgaattttaggtaagtttcatttgtcatgtaatattattattttaattttttcaaccattaaaaaatatgaaaaccattcttagctcaatggccagatagagtcaagtggccaactgcagacaatagtttgctgacctctattctagagcctattactgaaggaaaaaacctaaccccccccacacaaaaagaaaccctctgaatattaagtgtcttgcagtccaagatgcctctgactgactcattcactaaaatgaatggaaagagttaggaagcataggaaagaaaagcataaagattgtcaatactttaagctcccatttcccataagcaggaagtcaaaatgttttaagtccaaacaactggccagagcagtgtcttttgaacttgcttcatgaccagaatcacctggcttcttgttgaagctagattcccggactagaggttttgatgcaagggagacttctgggtgggggtgtgctctcgggatcaggtaagctgaagaaacactattccagggggtgtaaaggaacctcaaaagctgtagttcttaaagtgtggtccgtggcccagcagaaccagcattacctgagagcttgtaagaaatgcaagtctttggcctaccctagaaacactgaatcagaaactgggggtggggtctggcaatctggttttcatcaagccaggtggtcctgatgccaactagaatttgagaacgcctgcttcaaggcatcattaccagcatctggagaagtgattgagaacccacctgagcagtgaaggcctgggcgctcttaaaccactgtgttctcaagagcgcaggtctgtgggtgagagcaattctaacagacatctgaagccaaaggcctaggtttccacaggaagatctggaaaccctgttcaaggcaagccttttggaagtcaaggctgtattcccctaagagggggcaccatggatcctagagatagcaaatgccacccaaggtgatggtgagggagttttcagcttttctgcacgtgtgaccgtttactgcaccaggagctttctagtgacttccacctttttcaggtttttccaaggttcaccggggaacccctgtcctgggcctgccagtgaggtgctgggagcttcccgacctcacaagcggctcttgtgatgtaattgccacctgaggcgtgcccctcctggccctggcgacatcacagaggctacctgggcacggaccccgcagcttcctggggcccagtcagccgctccaggtgcttaagtctggactgcggaggccggggcggtggcgtgcagggtgaggtctcccgggctggcgcgcgtgcaagccccctgctgctacctcgcgctaggccagctccaggagggcaacagacgacaggacattgcaaaag

SEQ ID NO: 41575 - DNA, 2300 bp, Homo sapien
gaatctcttgaacccaggaggtggaggttgcagtgagccaagatcgtgcaactacactctagcatgggcaacagagtgagactctgtctccaaaaaaaagaaaaaaaatacattagaggagactccgtaaaatgtgatatccagaccttaggagtattcacatgacagaatagaggaaatacatcatcaaacaattcaagaacattgtttagaattcaagggcatggtttccaaattaaaagacacattggagagtccagtacaatgcaaatttgggctcaacaatgccaattatcattaagtttcagaacactagaataagaaaatttcgaatatgtttttagagaggaaagaatagatcaaaaccaagaagcaggcatcagactactggctgctaaaagacgatggagcaacagagcaatgcctccaagactctgaggaaaaattatgtccaaccaatcaagtgtgagggtaaaaacaaagaaattttcagacatccaatctcttgaaatttttactctcctcatactttttatctggaaactattggaacatgtgttccaccaaatgagccaaaaatgagaagatgtgaaatcaggaaaaagaatacccaactcgaaagaacggggaagggaaaccccagaatggtggtgaaaggcgatcagataagaaggctccagaagaggtagcaccaaggagatgaaactgaatacattgagaggagattttccacatactatattgtattatggaatttcactctatgatttccataaactacagcaaaggccatttttgaacttcttttactgcacacgttaacagtaggaattaaaatattttttgaataaatgaaagaatggaatacctgaatttgtacagtacagtatacactttgataagggctttaggccaggcacggtggctcacgcctgtaatcccacactttaggaggccgaggcaggtggctggcttgagttccagaccagcctggccaacatagtgaaaccccgtctccactaaaaatacaaaaattagccgggcgtggtggcaggtgcccacaatcccagctatttgggggactgaggcaggagaatcgcttgaactcaggaggcgtaggttgcagtgagctgagatcgcgccactgcactccagcctgggcaacagagtgagactccgtctcaaaagaaaaaaaaaggactttaaggtagatacagaggcttcagtatcctgatgactctcattcattctgtatgaacgatactggcgacactgattcactcatctacttgaagaccaagagcagaatcatattatgctttgagaggggcacagggtagcctattgttaggcaaatagaccgcagcaagattgtctaaaaccaaattccatttcatcatttagtatctgtgtaacttggtcaagtgacttaacctctctaacctttgattccctaacttgaaaatagggttattaattcacagggttactgtgaggatggaactaatgcctgggattccacattatcatttcctcgagctttggaattctaattataaattctaaagtctgagattacggaaaagcagatgtgagaaaggaattaaaagcacccactggaagccaggatgtctcctaggagggacttgctattacctagctgcgcagcaacaggcaatcgcttgcctacaagtctcactttccgcgcctgcacagtctccatctgccctgcccttgtactcactgggccgggcaagctggggaggcctaagcggactgggaagttaggctttccctccacttcaccagtcggctgcccctgcggaaaccggcccgacacacctcgctcctaaagccagttgcggtggtggtggcggttggggctttttttggccacgagagggcagcatttcccccggccaaccacacacgtacccctagcaacagcaaacccagctgcaacagaacaaaagaccgaagtcctcgagcttcccttccatcttagggctcacgccgccccggttaggtttcattagagcagcggcttttcaaggctcgtcgggcacggagggcggagcgagggagctctcgcgagatcgccgccggaagtgggtggtggcggggacgcagcggctccctcccggaaagcgagcgtatctcccgagccgttgccactgacagccgcgggcgctcccatctgagtaagagccagcccgtccgcggcctctccagccccgggttcgcgctctcgactctcctgcctgcccagctgcgcggcggagcggagcgaggcgcggcct

SEQ ID NO: 41576 - DNA, 2300 bp, Homo sapien
tgagtttcctcttttttttgaatattagaacacactgcaatatcatatcattatcactgagcataggttttgttctttttgctgtctaaaatatttcagaagtgattagatgcattgttgttcatgaacttgattttcctaaccagccccctcccttaacactattctgctttttactggtaagtgaccacacaatactaccattgctcagcattacagaactcatttcactcaagctaaattctgaagttatttgctaatgttatttttagtacatgttttccacaacatgctttagcattgcttgaatttggttaagcagccagaaaatcagtgttactttttattcctgagacactgaaagaaaaatttggtttagcagatattaattcaggtattagagttccctcctttattgcattcctgatcaaactaaatgagcattgtccaaataagagaactggatgtcagacacttttcttttttcttttaagacagggtcttgttctgtcacccaagctggagtgcagttgtgtaattatagctcactgtaacttcgaacttctgagctcaagggatccttccacctcagccttccaaacagctacgactataggcgtgcaccactttgcctggctaagttttttattttttgtagagttgggaactcactcttttgcccaggttggtctcgaacccgtagcctgaagtgatcttctagctttggcctcccaaagtgctgggattacaggcatgagccaccatgcctgactggatgtcagttatttttcttgtttgtaacatgaggtctagtttcatggtccctaagtacttttaaatctctaaagttctattgtttctcttcattgactctacactaaagtaaagatggttagtattttttactttcctaattttgaaaggaaaaacacattttctgattaaaagaatttatattagcaatgggatcagatagaagaggaaagtcttaaaatttcatgaagctctgaaagtaaaattaattttctttaagagtgtttatgacaggggatatttagtgttttaattcccagaagcactctgttttcttgagggagaagccctttttttccatgggccaattttatttgtatttttaaattttatttatgttatttttttgagacggagttttgcacttgttgcccaggctggggtgcaatggcacgatcttggctcaccgcagcctccgcctcccgggttcaagcgattctcctgctgcagcctaccgagtagctggaattacaggcatgcgccaccatgcccagctaattttgtatttttagtagagatggggtttctccatgttgttggtcaggctggtcttgaactcctgacctgaagtgatccgaccgtctcggcctcccaaagtgctgggattacaggcgtgagccaccatgcccggcctcttgggtcaatttaattatggcttcaagaagtttattttttagtgatgtcgggggcagagtttttaatttgcatgttttttctttttcggttttattgatatttaatagagagcactattttgatattggatacttttttagttttagaatgtacgtatgcttttttcagtaatgaagatgtgataataggtttctggtgaagaggtatgttgtcagaatgattctgtttcttaatagagatgtcactgtccaaattgattataattgagaagagtctgcttcctttaaaactagtcattttagtgaatacagagctgtcaagctcacagttgtggcagacagcagcttaggtcactgcacaactggaactgcctctaaatcttcccagcataaagattcttatctattctctcctttataatgggatatccatttaagatgaggaaatacttcagtgtttcatttcactttacaggattgtacctggatggtctatacagagttgttggggaacttctttgttgcttatttttgtgttgtctgcaatgggaggggctgctgactgtgaagtgcttattatccttatcaggggttttgttgcattctaccaatgggcttggtaatctttgctttactttttcttttctgttttaggttgccagagcagttttatctgattcaccacagctctctgaaggaaaagaaataaaattagaggaactaattgactctctgggttctaaccccttcttaacaaggaatcagattccccgtactccagaaaacttgagtaagttaataatgctttctgttacttttttctttcatcgacataaccactgttagaaccat

SEQ ID NO: 41577 - DNA, 2300 bp, Homo sapien
agatatttagggtggcacacacctatagtttcacctactcaggaggctgaggcaggaggattgtttgagcccaggagctcaaggctgcagtgtgctctggttgtgccagtggactgtagcctgggcaacagagcgagacccgtcttaaaaaagaaaaaaaaaagaggcgggggtacagtggctcacgcctgtgagcactttgggaggccgatatggttggatcacttgaggccaggagtttgaggccagcctggccaacatggtgaaaccctgtctctaccaaaaataaaaaagtagtctggtgtggtggtactcacctgtagtcccagctatttgggtgactgaggcacaagaatcacttgaacctgggaggcagaggttgcagtgagccaagattgtgccactgcactccagcctgggtgacagagtgagaccttgtttcaaaaaaaaaaaaaaagaaaaaagaaaaaaagtgaactaattagagatatttaatattgtatttttatcgtgcaggaagaacatgtgtataattatatttctccacctccctccctcttttgtaaattctgttaatgcataacatatatacaagaaatgtgtaactcataagtatatagcttgacaaattttcacaaagtgaacaagtccatgtaaccatcatcatttaaggaataggatgttaccagcaccctagaatcctccttgaacctgtttagtttacactgtttgcccccacggggaaacagtgccctcacatgttacactaaagattagttttgcctgtttttgaacttcatataaatgccagtatatagaatatattcttttgtgtctgactttggctcaacattgtttatgatatttatccatgctgttgtgtgtaattgtagtatgtttattctcattgctgcttagtgttctattttatgaatatagcaccaatgtaccctttttactctggatggacctttggattgattctactttttgattgttacaaatagacattctatgagtattctttttttttttttttttgcaaggatcctgggcttaagggatccttttacctcagccttctgagtagctgggattacaggtatgcgccactgtgcgtgcctaaatattcttgtatatcaattttaatgaatatagattagtatatgcctaagattttttgcttttaatgaggcataattttttacactttaacttcctcaaactgaatgacttaaaattgagatgtagtagtttttttctcttgaaaaaaaattttttttttttttttgagatggagtcttgctctgtcccctaggctggagtgcagtggcgcgatcttggcttactgcaagctccgcctgccgggttcacaccattcttctgcctcagcctcccgagtagctgggattacaggcacctgccaccacgcctggctaagtttttgtatttttattagagacggggtttcaccgtgttagccaggatggtctctatctcctgacctcgtgatctgcttgcctcggcctcccaaagggctgggattacagacgtgagccactgcgcccggcttctcttgaaaaatttttaaaattatttctccctgaatgatcttcattcgattaattacatgtcagcatatagaaaatgctaattgtatcttgtataagatttcttagatttggagctgggtgcagtggtgcgtgcctgtagtcccagctacttgggaggctgatgtgggaagattgcttgagcccaggagtttgagtctggcctgggcaacatagtaagaccccatctctgaaaacaaaaaaattcttagatttgtttgaaaattatagtgagctagattctcctgatacatttttttaaaaattccctttggaaataatatccaaagggacttttaaactattaaagtataattatttaattttcttactagaaatcattctaggaaatttgttactaagagtgaacatacatttacatttttaaaatatgtacagattatgtgtggactttaatattttgtttctgtttccaaaggttcggtctttgtgggcttcagtgaatgaaacgctcatgtttttggaaaaagagagagaagttgttagttcggtccttagtcttgttaaccaatatgctttagatggaactaatgttgctattaatattccaaggctcttacttgacaaaattgagaaacaaatgtttcaggtaagcatttgatattaaggaagcttttgagaaaactcctatcatgtaattgtatattttcttgcaatgttcttctgctt

SEQ ID NO: 41578 - DNA, 2300 bp, Homo sapien
aataattatgcctcagaataaaaatttggaaaagcctgactgtgaaaggaaagcagtaggtaaattttaaaccctaatatttttgaccaaagttgaagcaaaacttctctttttaatgtttttctgtcttgtttagccacaaaataatagcacccacagttatgataaggattatctctaggagtcataatcttgtatgccattttttctcttcttcatatatatctgtttatgtttctctctggcaagattactatttcttttcaggcttaatttactaatttatttatattgtctttatgcactagtccagtggatccattgagattgttgtctttagctgattttcagcaatttttatagctgttcattccctcatttaatacattttagttatttgtatgacacagaactcaaccctatagatgtttataaataaaaaaattaaatttctcacaggttggtgtctctctagctgttatctaagaaggttagctttaattcatttcactttaatggtttttttttcttttgagacagggtcacccaggctgcagtgcagtggtgccatcttggctcactgcagactccatctcctgggttcaagcaatactcgtgcctcagctcccgagtagctggggctataggcgcacaccactatgcctagttaatttttatatttttaatagagacgggatttctccatgttggccaggctggtctcaaactcctggcctcaagtgatctgtctgcattggctttccaaagtgctgggattaaaagtgtgagccaccgcgcttggccatgcattaatatttctggtattagaaataagtttgatttttaaaaaatttgctgaggcttttttttttggctattgttgtgcatagtccttacgcttttatttttgttttccagattttgttggcccccatttgaccaaaaaagtgacactgaattccgaaaacattgctgtgaatggataaaaaggatttctgtaagtattctttttgttagaagatacagactttaagaagttaaaaactactttaactctttaactttttagaggtgaaatccttttaatgctttaatgctatcagtataagcaaggaaatattagttaaaatagtcttctttgatggtttttggttgggattctatatatttcgaagaaaccagctttgctggccaggtgtactgaaaataggctttagagttcctgagcgtttatagcacagtttttgtttaaagaaaacttttccaaccgtatattattttagtttgtttgcccagatagtatcaatgattgtgtctgtatcattataattgttttttctgaccaggtccacgtagagtttagaaaaaccaaaacatgtaacttgtggtttaaaaggaataattctgatcaaattctttattttattttattattacttttttttgagacagagtcttcttctgtcacccaggctggagtgcaatggcgcaatcttggctcactgcaacctctgtctcccaggttcgaatgattctcccatctcagcctcctgagtagctgggattacagccatgtactaccatgcccagataacttttgtattttcagtagagacggggtttcaccatgttggccaggctggtcttgaactcctgacctccagtgatccgtctgcctcggcctcccaaaatgctgggattacaggtatgagccaccacacccagccctgatcaaattcttttatgcttcaaaaatagtgtgatgaggagacagtggcctgggggccttacccactttgctttgcactctgctgcacagttggatgtgtccaagccactgtgctatgaagaggtcctagggaaccccacgccaacctatagcatagtacttatgaaaatgtgggacttctattgcaagactgtcacaccctttaacaaaaatagtgtgatgtaaatgtaagagttattgttaacaaggtcttcaaatcatcttatttcttttcttcatagggtgaatgtggaagtagctttcctcaagttgttggttcactatttctttctcctggtggtcctaagtttattcatctgatgtatcattttgcaagatttgttgcaatgaaatatattaaatccaattctaaaagtaagttcaacttataaaagattttttgttttgattcttaaatttttattgttctttacaatttttaaatcgtgaagagatcttagtaaaatcaaggtaagttaaaacattaatgtaccccaaaaaggaaatggttaatattctactggaagtgtac

SEQ ID NO: 41579 - DNA, 2300 bp, Homo sapien
ggcctcccagagtgctgggattacaggcgtgagccaccgggcccggctccactttttttaaatgttaaacataatgtatgactcaacaatccattccaaggtatttgcccaaaaggtttgcagtttggaaaaatcatatggttgcattacagagaatagatagaaggggaagaagcgctttgcagttaattatttaggcctgaactaaagtggcagtaggaataaaaagaggtgattcatttatttgttcattcaacaaatatttattgaccactgtattggacctggctatacagtggtgaagagaatagatataaattttcccttatataatttttttttttttttttttgagacgaagtcttgctcttttgccaggctggagtgcggtggcgcgatcttggctcactgcaacctctgcctcctgggttcaagcgattctcctgcctcagcctcctgagtagctgggattacaggtgcacgccaccacgcccagctaatttttgtatttttagtggagatggcgattcgccatgttggccaggatggtctcaatctcttgactcatgatctgcctgccttggcctcccaaaatgctgggattacaggtgtgagccgctgcacccgaccccttacagaattttagtctagcgatggaacaaatcttcaacaaatatcttattacaaattacaataagtgtcaaagagaagagaacaaggtactttgtgaaaaaacaacaggtttgagagatggtaaggaagtaggatagatggaacttcatttgtgttacttgaagagtagagatgttctaaggacaaaagtgttgtttgacaaatggataggcataggaacttacgcaagagaatagtaatcctaagtcagaaattcacttgatttgattttttggaaggaaatttcatgctttgccgtttaagttaactcttgattccttatagttgtgtgacattttcttaaagggtttagtgttctttcatttttgttttcactttttttttttttaggctttgttttgattaattagggtaattggcacaataaaaactattgccagcattatgttataaagatggttctggaaataaaaatctagtagtgaagaccctggactctagggtgaggtgacatatttcaaatcagtgctttctccacatcctttccagcacctgttgtttcctgactttttaatgatccccattctaactggtgtgagatggtatctcattgtggttttgatttgcatttctctgatggccagtgatgatgagcattttttcatgtgttttttggctgcataaatgtcttcttttgagaagtgtctgttcatatccttcacccactttttgatggggttgtttgtttttttcttgtaaatttgtttgagttcattttagattctggatattagccctttgtcagatgagtaggttgcaaaattttctccctttccgtaggttgcctgttcactctgatggcagtttcttttgctgtgcagaagctgtttagtttaattagatcccatttgtcaattttggcttttgttgccattgcttttggtgttttagacatgcagtccttgcccatgcctatgtcctgaatggtattgcctaggttttcttctagggtttttatggttttaggtctaacatgtactcttaataaatattagctatttattgttattcagtaaatgtaggttgttaccattataaggcatgtttctcttgaaataggttttccttccttttctgtagagtgttttcattaaagccagttctgccagtcttatattgaatctgtgttttcagaattagaaaatgaaagcttgtatgtttttcttactggttataaaatacacatgaatgagaaaaattaatttgccttgacttcctgaagagaatgaaaacattaatttgtgtcaaagtcttactcagcttttgatgatgtttagcttattaacctttttctttttctatttctatttcatttttaaccactaggaacatgtttgacaagctgaaccgtgatgcctttcatataatttcttattttttgtttcaagttctggaccagtctctcaccaaagaagttttcaagtaaggaaaaataatttcattttcttaaatttctttccaaatttgaaaatggacagcgttttgatacaagccagaattctctcctttttttttttttttttttttttttgagacggagtctcactccgtcatcgaggctggagtgcagtggcgtgatctaggctcactgcaacctctgcctcctg

SEQ ID NO: 41580 - DNA, 2300 bp, Homo sapien
aagagcagcccactttacttaaagatgacgttaatgagcaagcttaggttgaaagattaatggtctctgaaagcacaatagccctacctttagtgagcacatctgcgcattccaagtttaatcacagctctttatagtttcttacaagcagagacagtaacaaaggaccttgtgttcctccgcctgctttctgaggttgctccgctcttcaacggagtagtttccaataaacttgcttccttcattgtgttctgtgattcacctcaaattatttcctgcacgagatccaagaaccttctctttgggtctggatcaggactctgttttttccggcaacaattttacagactttgactctttttgtcgacaggagtcagagattttttttttgtggctgttcttttgctttgagaagggtcttgctctgtcactaggctgaagtgcagtcgtgcaatcacagtttactgcagcctcagcctcccagggcccacgtgattttcccacctcagccttctgagcagctggaccacaggcgtgcaccaccagaatggagtcagagatcttacagatgacctccataatgaaaagctatgggtgatagcataaacttcaaaaggtgcttttaggctgggcacggtggctcattccttgggaggtcaaggtgggcaggtcgcttgagcccaggagttcgagcccagcctgggcaacttagtggcttttctttctttctctctctctctctcctcttttttttttttttttttgagacagagtctcactttgtcgcccaggctggaatgcagtggaaggatcttggctcactgcaacgtctgcctcccgggttcaagcgattcttctgcctcagcctcccgagtagctgagctgggattacaggcatgcgctaccacgcccggctaattttgtatttttagtagagacggggtttctacatgttggtcaggctggtctcgaactccccacctcaggtgatccgcccaccttggcctcccaaagtgctgggattataggcgtgagccactgtgccccgcctctctctcttttattaaggtgattttagtgaggcaggagacaatcattgccagaggtagcaatgagacttaaaagcaggttacccaatccacttccaggccctgttgtcagtggggtttgtggtaggcaacagctgtcaattaagacgacgggccgggtgcggtggctcacgcctataatcccagcacttcgggaggccgaggagggcggatcacgaggtcaggagatcgagaccatcctggctaacagggtgaaaccccgtctctactaaaaatacaaaaaattagcccggcgtggtggtgggagcctgtagtcccagctactcgggaggctgaggcaggagaatggcgtgaacctgggaggcggagcttgcagtgagccgagattgcgccactgcactccagcctgggagacagagctagactccgtctcaaaaaaaaaaaaaaaaaaaaaaaaaaaattaagaggactgcaggcggccaggcgcagtggctcacgcctgtaatcccagcactttgggaggccaagaccggcagataacctgaggtcaggagttcgagaccagccagccaacatggtgaaaccccgtctccattaaaaatacaaaaaaattagccgggcgtggtggcggacacctgttaatcccagctactcgggaggctgaggcaggagaatcgcttgaacccgggaggcggaggttgcagtgagccgaaatcgcgtcactgcaccccaacttgagcaacaagagcgaaaccccgtctcaaaaaaaaaaaaaaaaaaaaaaaagactgcaggactgcaggggagtatagagccagatttcatttaaagcaggaaaaggaacatccggcatttgaggacatagatttcgctaacgacagaaatgaggctcagagattacgtgacttgattagagtcacagtgagcatagcggaggatggaaccaatgctttaactctacaccgaggcatagtgctccatttatggcttttttgtgacgtaacaactaggatacacaagcaaatggaccccactaaccaagaatcagaaacccgaaggcccgaggatctgggcacgacagcggttaagcaagcgcagagcaagtcgctggccgcgcaatgcccggtgggtcttgcagtttcttggctgggcatggccggaagggaggagagaaggacgcattgcatggcgggagatatagtctttgccggaagtccctcctccctcggacgcctggcggcgccggcgca

SEQ ID NO: 41581 - DNA, 2300 bp, Homo sapien
aaaaacccaaaccagaacatttttggacttcataacattttatggttcagtatttatggcttagtattttattttgaattacatgtggggaggaggggtaaaaatactttaatttttcttgctaagtaagtactattatatattcaggtataatgggataagggataccattttaatgggtccgtttggagctttaaatatgatcaacagtatctgtgtgcatgcaagattggttaagaaactgggttagaccgagtgcggtggctcacgcctgtaatcccagcactttgggaggccaaggcgggcggatcacgaggtcaagcgatcgagaccatcctggccaacatggtgaaaccccgtctctactaaaaatacaaaaattagctgggcgtggtggcccgcgcttgtagtcccagctactcgggaggctgaggcaagagaatcacttgaacccgggaggctggggttgcagtgagccaagatcgcgccactgcactccagcctggcgacagagcgagactccgtctcaaaaaacaacaacaacaacaacaacaacagaaaatgaaaacaaattggggtaaaagtctctgagagcttcctacagttacaactccaaagcttcacaaagccagtccctcctggctggagccagggactccaacgctgtgggcctctcagggggcggacccgcggcgccagcgcctgctcccttcccacctcccaaccctcctctctgctgtatcctccctgcgagctgtgtcgggggccggggggggggagtgggggccgaggccggacagcttcatctggaaatcccccgccactcacgggggaagaagtcccacgagccctatctggcctcgggcgctggcgcaacttgtctgctcaaataatctcgttccaaatctgtgcgttttacacaagaaacaaacaaacaaaacaacaacaacaaaaaaacacaactgggactcagatgacgttttaagttgtctttgaaaaacaatgcataaccctgcacgtataaagttgcctatgtcacataaccctaggcagctgtcattctggagtgatctggagttaagttttttgttttctttttcttttttcttttctttttttttttttagacagggtctcagtcactcaggctggggtgcagtggtacagtggcgcgatctcgactcattgcagcctcgaccacctgggctcaaaagattctttcacctcagccacccacccgcctgcccccaaccccgctaaacagccgggactagctgggactacaggcgcgcgccaccacgctgggctgctttctttgtattttgagagagacggggtttcgccatgttggccaggctggtgattcgctcgcctcggcctcccaaagtgctaggattacaggcgtgagccaccgcgcccagccgccacaaaacttttaaaagttattacttcgctaaaaataacagcgtagaagccattgtgcagcgccacgcgatctcggctcactgcagcctcgacctcccaggctcaagcgatcctcccatcttagcctcgcaggtagctggggccacaggcgcacgacaccacgctgggctattttttaaaataaaataaaaatcttcgccaggctggtctcgaactcctaggctcgacagatcctctcgcctcagcatcccaaagtgttgtgattacaggcgtgagccaccgcttccatttttagagttctattctgaggactaacgccgttcaacaagttggtgtgaatttgtttgcatttttcaaaaccccaaagccggcctgggcgccatccccatttgccccgggcctctcaggaccccgaccacaggcaggaccccgaccacaggcagcgccccgactccaggcagcgccccgactccaggcagggctacctccaactcccagcctccccaggccgggcccccgcccggctcccgacaggctcctctccccgtggcggggcccctcgcccaggcagcacaccctctcaacccgaccgggcccccaccactctaggagggccggcgttgggggagggcgccgggacgtgcccgagggtgacactcgggcttgggacagggcgtgctgccgcgggtcacgtgctgcggaggcttggggaggggcggcgaggcggggtttatagcccgggcgcccgcgggccccacgctttgaccgggtcgtggcagccggagtcgtcttcgggacgcgcctgctcttcgcctttcgctgcagtccgtcggtgagtgcgcgcccagtgggtgccccagcgaaccggtcccggg

SEQ ID NO: 41582 - DNA, 2300 bp, Homo sapien
atttcctacaagttgaatactattttgtcatcaaacatagatctgggtgattgtaggtatgcttgtaatcactgcaatatattgtctttgttttcagaaattcatttcaacttgagtcattagataggcaaatctttttttcctactagcttatcattttgaatactttattaaaaatattttcatatacatgtgattctgtgtggcatattacataggcatagaaataacaattggctaggcacactggctcacacctgtaattccagcactttgggaggccgaggcaggtggatcatttgaggccaggagttcaagaccagcctggtcaacatggtgaaactctgtctgtactaaaaatacaaaacattagctgggtatgatggtgcatgcctgtactcccagatactcgggagtctgaggcagaagaatcgcttgaacctgggaggtagatgttgtagtgagctgagatcgtaccactgcactccagcctgggtgacagagtgagatcctgtctgccccgcaaaaaaaaggaaaaagagagaaagacagcttctcactgtgttgcctaggctgaagtgagtggctatttacaggtgtgatcatagtgcatgacagcactgtgatctcctatgatcactcttaaactcctgggctcaagtgatctgcctgcctcagcctcatgagtagctgggacaacaggcacatgccaccatgcctggctatttattattattattgagacggagtctcactctgttgcccatgccagagtgcagtggggcaatctcagcttattgcaatctctgcctcccaggttcgtgcaattttcctgcctcagcctcccaagccctgggattacaggtgtgcaccactacgcccagctggtttttgttgttgtttttttgagacggagtctcactgtcgcccaggctggagagcagtcctggctcactgcaaactctgtctccccgtctcaagcaattctcctgcctcagcctccccagtagctgggattataggcgtgcgccaccacgcccagctaattttgtatatttagtagagacggggtttcaccatgttagctaggctgatctcaaactcctgacctcaggtaatctaactgcctcagtctcccaaaatgctgggattacaggtgtgagccatcatgccgggccctagtttttgtatttttagtagagacagggttttaccgtgttggccaggcaggtctcacactcctgacctcaagtgacccattcacctcagactcccaaagtgctgggattacaggtgtgagccaccatgcctggcccatgcctggctatttagtgtttatgaagatttcaaggtatttttgttgttgttgttctttgtaaaataatttgtcctcctccattgtccactccacttttcttctttctttttttgtcttgagacagtcttgctctgtcacctaggccacagtgcagttgcctgatcccggctcactgcaacccggctcaagcgatcttcccacctcagcctctttagtagctgggactacaggctacaggcacacaccaccgtacctggctaattattgtatttttttatacagatgaggtttcactatgttgcccaggctggtctggaacttctgggctcaagaatcctcatgcctcagcctcccaaagtgctgagattatgggcatgagccagccacttcacttttccttgtctttattaatgctctggagtttgtaattatatggccaacctaggggttctgggaacttactcaggccaggagaattaccatttgcagattaccctgtggcttggcaaggaacgtcataaacccacacatgctggtcaaaggaggagatggtttaagtcttttgaaatggtgtcatcaggagaatggagacattgtcagctgtcagcacgacaccatttgacatagggtgggaggaggcagagcaatcagcaggctcttacttctagactgttcttggagttggctggcagcaacctgattggcaatagttgtttgcctgagttcccagaattccattttgagttcattctggttgaacagaacgttttgtcagaacaattatggctttcttcctgaagtgtgcttggccggaaaagaaagcaggagacctcaagggctaataatctagcagtggctgacactgaaatgatgcatggaagaaaggctaccaagcaagggaggtggagagcagtttgaagcaactggggtaagctgaggtgtgtgaaagcagcccttctgcttgtgcgtccccacagcgaca

SEQ ID NO: 41583 - DNA, 2300 bp, Homo sapien
tttacacttcttaaattatgttttggcttttgaaaaatagtttagagacttgtagttcccaaaggaataattttaattttggtttctagtgaagatttgggaaacaataggagagaccaaaaaaattttctttgatttcaagaagaaaaccagcattaacctgaaatgcatgtactatatatatgtacatatgtatgtgtgtatgtatatatctatatctatttcttccccttcctgccatgcagagttctatatgaagggaaagaacggcttattccaggatgtgaagtgatcctagccacaccctatggtcgctgtgccaatgtcaacaatagttcaactacttcacaaagaatctttatcacttatcgaagggctcctccagttcgaccccagaattccttggctgtaactgatatctgtgttattgtaaccagtaaaggagaaactcctcctcataccttctgcaaagttgacaaaaacttaaattgtggaatggtaagaataaagttttcatcttcaaagtttcatatgaaaccaaaaagggatacgttttggattcctgtttactgttgggtatatactcacattttatattttcatgatgcttgtttttatttttcctaatttttatgatttgtaataatttttaaagtcctatcccatgatttataataatttcatctttaagtcagggatatttttgagggagtaaatcctaatattgtctgtgttacattaacaaaggttttattcacttttggatttcagtggtgtcttcagggacaactgtggggttagagtgggtagaagctctccttacattcatttattcattcattcattcatttgtttgctttttttatttttttgagacagggtcttgctttgtcgcccaggctggagtacagtggtgcaatcacagctcactgcagccttgaccccccaccaggctcaagtgatcttcccaccttagcctcccgagtagctgggactacaggatagtagagacagggtttcatcatgttggccaggctggtcttgaactcttgaccttaagtgatccacctcccttggcctcccaaagtgttggaattacaggcgtgagccaccatgcccggcctgtttttgtttttgagacagggtctccttaagttgcccaggatgctcctgaactctagggctcaagagaaaatattgcagttttgcatacttatttttttttttcagacggagtctcgctctgtcgcccaggctggagtgcagtggcgtgatcttggctcactgcaacctccacctcccaggttcaagcgattctcctgtctcagcctcccaggtagctggggctacgggcgtgcgccactacgcccacctaattttgtatgtttagtagagatgaggtttcaccatgttggttggccaggatggtcttgatctcttgaccttgtgatccacctgcctcagcttcccaaagtgctgggattacaggcgcaagccaccacacccaatccatgcatacttactctttaaaaggactgtagtgaagaagaaaatgaacataaatgtttgattcatagtttttaaagactacagcttacttttggttcagatttactttgaaaaatatcttcaggtcaaactaatattagcttaatgttgtataggcggagatgacaaatgcacccagaacaattagtgaagacagggttgcctctggaggtgatgacctcatagtcctccagtgacccaagtcttccccaatttgggctccagtgcacactccgttttgtgctgtgtcttacaagaaggggcaatctctgagtgattgtgaaattctaaatcttttgaaatggccttcatatcagtttgatttttgtagcattgttttcttactctcttattttagtgttctgaacttcatgctttgctgtattttatactgcatagttcattatataaacgttttaaatagactcttctgagtaaataaatgaatctttagttggtatccaacaaaatcaatttcttttcactcttttgtcttttttataaacctaattcatgttttacagtggggttccagcgtgtttctgtgttataagaagtctgtacctgcttcaaatgcaatagcatataaggctggtaagtgagttaaaaaaaattgtctcaattgctatagttattggtgcatattaacatttggctaaaagagataaagtatgctcccttacatagtttgtagaattgatctattcataaaattatctataattttagcatataaagatatgtgttttctt

SEQ ID NO: 41584 - DNA, 2300 bp, Homo sapien
acaaactcaaatcttataacagaattctgttactctttaggtatatggagctgccattcagttttatgaaccttactctcgggaacttctatcagagaaacagcttatgcacctgggcttgttgacgcctgtggagagaaaaatggtctccaaatccatcaatacaaacaaatgcatttgtttactctcacactggcctttttttgaagcttttaggaaatttcttatgtttatctacaaactttctgtgtctggaccacatcctcttcccattgaaaagtatgtataatgattagaaagatggctggtggaaaactgggtatataaatatatacatttgtttgtgtaatttttagcagcaaagttggaagggaaggaagcctgcatttaactgaacttttttttttttttttttgagatggagtattgctctgtcacccaggctggagtgcagtggtgtgatcttggttcactgcaacctccacctcctgggttcatgcagttctctgtgtcagcctcccgagtagctgggattacaggcacctgccaccacgcctggctaatttttgtagagacaaggtttcaccatcttggccaggctggtcttgaactcctgacctcatggtccacctgcctcagcctcccaaagtgctgggattacaggcatgagccaccaactttttacttactcccttcttcgcctgaatcattgactgtgagcttaaaattggatagtagtggtaaggttggccaaataataatcctttgagaattcagctgaagaagtaactcttataaattatattgtgagtgttcttcttcctatttattctctaataaccaagagacaaatagttactgctgcacacacacccaccaatgcaagtggccattccaaattctaaccgtaatacctctctaaagtgatgtagaaattagtcggaatgagttaattgatgttaaaagtggagttttggttttagcattgacagaattatttgagctttctctttaatttttaattctttttgtcatgcgatctttctttcctaagaaagaaaaatgtatgttgagctactcttttttaaagcatcttttctgatttctagtggcgcattgacttctgtttatgatagtttataatttatgtatcctgctaacaaactaaaaagtgtcaagagctgtaatgtattaaagtatgtgtaagcttagatgtttcttacaatttcagaacttttacattatagcagaaagaatatcagtgaaacatactagtttagtggataaggtaggggtaattatgtgagggtttaaaaataatgctgtccaaaaatcaactttaaaaagagtgaagtactgtgcataaactcatcataatttgatattgaaatatggttgcaactttcattttgtactcttgaaatggcagtttaatgatttatagttctgggtttaactttcagctgtcagattaatttaaagtttattgaagtaaaatgtaacattagtgtcaagttagcaaccttttgaaaaattaagattctatgaatagcttgtgataaaatcaatgtatataatcaatatttttttcagttgaagtaatatgttgcgtttttatggctcctaagagctccaaactttggagaaacttaagaagcaatttttataggtgcaaaaatagaatgggtaggtggttcatccagtgttagaggagtaaatctgggattaaactgaattttagtgtaaattcattatagcacagttagttgctccctgtactggcacagataaccagggctataaaaattcacttctttcatgaaaactatttttatgttatttttatttgttgggtaatgataggggatataaatagactttaagtcaggaaatacattgtgtatttcagaagtttaatgggcatggataaattcatttacatggagcaaatttacttacttagcctacattttagataaatggccatgtcatatctgggatgatatatagtgatatttaagatttgttaaaaactgtgatgcatttagaaaagtaattattatatttatttcaaatttttttttctaggcacatttcacattttatgcaaaacatcccttttccttcaccacaaagaccgagaatccttgtccaggtaatcaaaagagagtatatttggggagaactttgcatatgctcacctgagtcattgcagagtggattctgtatacctttgggtttgaggtggagcaatatgcattcataaagtccttggattttctgtgctttgtagctttact

SEQ ID NO: 41585 - DNA, 2300 bp, Homo sapien
aaaacattgacatattttgttaaaataaaagatgtaagtatgcaaaaaaagattccaaaatgcaatgacttgcttagaaaaaaaaactgcatgtgaactgcactgagtgctaaagaaaaataatacaaaatagaacctgattaaaaaatcatttcattaataaaggtacaaccagtgttccaggttgatcctaaagctggaatctctgcccttttcattatgccatgctacatttagagaaacctaagcaattcactgacttaggtaaagggcttacaactgtagcattttgggttaaaaaaagaatcaggctgagtgcagtggctcatgcctgtaatcccagcactttgggaggccgaggtgggcgtatcacatgaggtcaggagtttgagaccagcctggacaacatgatgaaaccctgtctctactaaaataaaaaattagctgggcgtgatggcgcgcccctgtaatcccagctactcaggaggctgaggcaggagaatcgcttgaacctggaatgcggaggttgcagtgagctgagatcgtaccactgcactccagcctggacgacagagactccgtctcaaaaaaaaaaaaaaaaagaaaagaaaaagctgagccagactttcaagggtaccagttttatttggaagtttcagttctaacatacttcttggtgagactgaaactatgtgtcctgttctgtgagaagcctttaaaatccaaggctgtctgttaatcttcagggcagatgtggccttggtgttactctgggttttcaacccgtgaagatgtccccaattttcttgccagcttaaccatgaattttaaagaaagtttgttatatttatgctaacttttgtaagaagagggctttttaggcagttgtctgctgtattttatattcttatattcttggaatatatatatatatacatgtatgtatatacatgtatatatgtatgtgtatatatatacgtgtatatatgtatgtgtgtatatatacgtgtacatatatgtatgtgtgtgtatatatatacacacacacatatattttatattttcggaatataaaattttggaaaaagaagcttttagtaatacctttaaaaatggtcatctctatggctttggggtttttttttttctttttgagacatagtcttgctctgttgcccaagcctgagtgcagtagcgcaatctcggctcactgcaacctccgcctcctgggttcaagtgattcttctgcctcagcctcctgagtagctgggactacaggcacacaccaccacacccggctaatttttgtatttttagtagagacggggtttcaccatgttggccaggctggtctggctttggtttttattgtttcatgatcatagattatattgaataatggcgttatgattatttttaactgtgagggctggatgaactacatgtgcttttaatccttacttaaattccagttcttgtctttgggcacacagcatttttgaagcctaccagtaggtagtttgaagtctcatgtcaactaggtttgacacttagaatattataattctaaaatgtaacttttgaatctagacttcagtgttgtattcctaactccaacattgaaaatatatgttggaaggttagaatgagatggctaaatttgacagaggtcgattgaatgaaaagagaacttccttgaaattcacttattcaaattgtttgcatcagttaagactgtagtaaaaacatcttttccattttcttgttttaggttgatgcaagaattttgtctagtaaaagcagattatgaataacacattttatgaattttgttctgatttaatagatcagatgaaaagaagaacatgaactggaagcaacttcccaaaaagccgtgcaaaaatctacttagcaccttaaagaaattgtatccccagctgtcttcaggtaatgtgagggaaaaggaatattattaatgaaggaatgtatacgagaaaattcttcttaaatttaacataataccattttctgtttttatttcctttgttagttcaccaaaaaactcaagaaggctcagcgattgacatgactccaattgaagcagatttctcctggcaaaagaagatgacacagcttgagatggaaattcaagaggcatttttgcgctttatggcgtctattttaaaaggatatagaacatatctcagaccaatcacagaggctccttcaaataaagccacagctgctgattcattgtttgaccgacagggtgagtagcattgaaagtacaattcctttta

SEQ ID NO: 41586 - DNA, 2300 bp, Homo sapien
atcttatttccccccaaccctggtaggtaaccatctttactgttttctggtttattttgcctgcattactttttgcaaaagtaagcagatatatgtgtgttttattcttacagagaagttagcattctgtagacacggtctccaaaagagacttccaaacatcttgtctaaatctttttaatttacagatgaagaaattaagatgtagtgcttccaaatgtgtttagtctttgatgttcctgtttctactgttctttgcggcttatcattatttttaaaatgttctgtgttccttgtgtgctttcttgtcttccttttgtctaaccgtaattgtgtagatcagtggaattttcttgtgatttttatatatgaattataagtatatgaaaacatttatatgtaagtctgcattctttttaacaggtggtcagtctgaccaaggatacgggtctaaggatgaacttataaaggatgatgcagaaattcatgtgcctgaagaacaggcagcaagagaattgataactaaaacaaaaatgcaaacagaaggttaagtactgatatttacgaactttacttagaataatacctgtattattaataattaaaagtttatcttagttgatagctttgatgattattttcacaaatgtaaggtctggctcctaagatgctgtgtactgttacataaggtagattttggtagtctctgaagttttaaaatttaagagaactttctttctttctttttttttttttttttttgaggcagggtcttgctctctcgcccaggctgagtgcagtggcgagaacatgtattactgcagccctatctcctggcctcatatgatcctcctgcctcagtcccctgtcagctgggaccacaggcacgtgccaccacacccagctaatttttttatgttttgtagagacaaggtctcaccatgttgccccggctagtcttgacctactgagctcaagtgatcttcctgcctcagcctcccaaagtgctgggattacaggtgtgagccaccacacctggctgtaagatacctttagagactctgtaggtcagcccataattttccagggaagtgtgacccattgaggtatttgccaaaattacatagctacttttgacagaaccaggactaaactttgagttattaaaacttctattttagtgccctttttaattctaaaaggctctttcactagcagtccttcaaatatctaggtgcatagttttcattggtaggttaaaaatagtctatgtgggctgggcgtggtggctcacgcctgtattcccagcactttgggaggctgaggtgggcggatcacgtggtcaggcgtttgagaccagcctggccaacgtggcgaaaccccgtctctactaaaaatacaaaaattagccaggcatagtggcagcacctctgtaatcccaggtactggggaggctgaggcaggagagtcatttgaacctgggaagcgaaagttgcagtcagccaatattgtgccattgcactctagcctgggcgacaagagcaagactccatctcaaaaaaaaaaaaaaaaaaaaaaagtctatgtggtttttcccggtttttataggactcattaaggcagagataatttgttgtaatcattttatgaaaacatggaggaatattttggcttatggaataagacactcttcctgttctctatcacaaaagtgtactttctttaatgttatttattttatactccagagttatggagaaacaagcccctctccatttgccaagtgatgagaaggagaactgaaggccagagacttaattgattcactaaagaacatttatgttaggattattgaatgctaaaacaaagcatttatttcagttaatattggcagcatttatggcataaagtaaaccagacacagtctattttactttgtgtctaaagtaaaatagacacactgactgttggagaaaaatacatacaatatctaaaagtcaatatatggtttctgtttaatattggcaaaagtaggaatgataacatccaaatatttttttccagaggtgtgtgatgcctctgctattgtggcaaaacattcacaacctagtccagagcctcacagtcctactgaacctcctgcatggggcagcagtattgtgaaagttccgtctggtatatttgatgtcaacagcaggaaaagtagcactggtgagtctttacattttggttattaaatatttaaaatatacttttatagactcatatgtgtctttaatgacattaaatttttgacttaa

SEQ ID NO: 41587 - DNA, 2300 bp, Homo sapien
agtagctgggactacaggcgaatgccaccacatctggctaatttttgtatttttttgcggagacagggtttctccatgttgcccaggctggtctcgagctcctgagctcaggtgatccgcctgcctcagcctcccaaagtgctgggattacaggtgtgagccaccatgcccggcataaccctaacttaaaaaaaaataaaagaaagaaatttatttcttatagttctaggggctggaaagtccagggttagggtgttagcatggtgagttctgcagagggccctcttccaggttgcagagtgctaacttattgtatcctcgtacagcagagaaggagagagctctcctttaagggctctaatcccattcatcagggttccactttcatgatcaaattatctttcaaaggccctgcctcctaatactgtcacactgagggttaggattttagcatgtggattttggcggacacaaacattcagtccataacaggtagacttaagttctaataatgattcaaataggaaataacagcttttggtcttggagtgaaacaaattgcatggtagccaagagtaaaagactgctttctttttccaaagctgggggaagctgctatggccattagcatattttttctctacctgatcaaataagactgacttctgtgaaggctaggattatgtctgttttatttgcctttatattcctagcacctcatatagtggctactagtagacgtttagtatttgttgaagaaatggatatatctgaataattttttaaccactcagattttatcagccttcttagaatttgccagtgctaagcattccattccggattattttactttacagcagtaagactttgagtatagcaaatatacaattcctataagattacaaatttgctttttgcagagtagattactggcaagtatttgttgaattggatacaaaactaagatggaagagattctttctttttctgtattttagtgaagaacacaggtatatccatctatcatatgttgcatgatttgtttttttaaatgggtgtttatataaatataggatgaaagacaggttatacattaaaatgtccctgggaggcaagttttaaatagcttttccagtgcacttttttttatactttctttatggcctctaaattttctggatcttttattctgagtatatgtcacattcataatcaggaaaacaataaatattttaataaaagttaacttggaaaataggttcattgttaatattttactttcccttttaggtagtatatcaaatgtgctgttttctactcaagatccagttgaagatgcagtctttggcgaagctactaatctcaagaagaatggtgatagaggagaaaaaagacaaaagcattttcctgagaggagttgtagttttagttctgaaagtcgagcaggaatgttgcttaagaagagtagtttggattcgaattcaagtgaaatggctatcatgatgggagcagatgccaagattctcacagcagcattgacatgtcctaagacttctctacttcatattgcaagaacccatagctttgagaatgttagctgtcacctacctgatagtaggacttgtatgtctgaaagcacttggaatcctgagcacagatcatctccggtgccagagatgcttgaggaaagccaagaactccttgagcctgtggttgatgacgtacctaaaactactgcaacagtagatacatatgagagtctactaagtgatagtaacagtaatcagtccagagacttgaaaacagtatccaaagatctgaggaataagagaagtagtttatatggtattgctaaggtggttcagagggaagatgttgaaactggactagatcctttgtctcttttagccactgaatgtacaggaggaaaaactcctgattctgaagataagttgttttctccagttattgcacgtaatctggctgatgaaatagaaagctatatgaacctaaaaagtcccctaggtagtaaatcttctagtatggaattacacagagaggaaaacagagagtctggcatgactactgcatttattcatgctctagagaggagatcaagcctacctttagatcatggttcaccagcacaggaaaatcctgaaagtgaaaagagctcacctgcagtgtccaggtctaaaacttttactgggcgtttcaagcagcaaaccccctctcgaactcataaagaacgttcaacttctttgtcagcactggtgcgttcttcgccacatggctcg

SEQ ID NO: 41588 - DNA, 2300 bp, Homo sapien
gtcttaatctggcattatgataaaaaagaaaaaaaaaagtgtatcattttattttattttttgagacaggcacttgctctgttacccaagctggaatacagtggcacagggatggctcactgtagccttgaccccctgggctcaagcaatcctcctgcctcagcctcctgattgctaggactccaggcgtgccccaccatgactgctaatattttattttttgtagagatagggtcttgctatgttgcccaagctggtcttggactcctgggctcaagtgttcctaggtctcccaaagtgctgggattacagccatgagccactgcacccggcctttgttttatttttgaaattttattgaggttggttatgaggactcatgcctgtaatcccagcactttcagaggttgaagtgggcatttgcttgagcccaggagtttgagcctagcatgggcaacatggtgaaaccccatctatacaaaaaaatacaaaaattagctgggcgtgatgtcatgtacctgtagtctcagctactccagaaggtgaggtgggaggatagcttgagcccaggaggcagaggtcgcagtgagccgagatcacaccactgcactccagcctgggtgatagagaccctttctcccttgcctccccaaaaattatctgttaaaaacagaagtacattacacagggatatgtggacttggaatatgtgacactgtaaattccaagtcactgtggatcttgtcttgtcttttcattgttacatccctggcaccagtaagcagtacctggcaaaaggcaaataggagatacctaataaatatttacacatgaaggaatgaatgaaaagtctataaaatgtttttaactttcatcccgagtttaaggaattaattagaggtatatgtaaaaatagaggaatttaccaatgtaatttatataagattgaagcattttgaatgtttaagcaacaggggagttagtaaatacataatagtatatcagtaaaacagattagttcacaggtgtttaaataattagaagaaaatttaatgacattaaaataattacataagaagtacaggtgaaaaacaatattctaatttgtaaagatttatatgattttatatgtatgttttaaatgactagaaagatgtatatcaagattttgattatattctctgactgttgatatcataagcatttttcattccttgttttgcttatctgtatttaattttttaaaatcatgtaacatggttttataacaaggaagacacaaatctttcatttttaaagcaaaaaaacctgattgttgaaatgttttctacctaaagcttcaacaatcacctatgtagttaagaactacagtgtttgaaactttattcatgtttcttggctctaatattgatatttgttattctgaacattcagattcccagccgaaattatcacagcagctttatttgaaacaactcatattatccatattttcagattacataattaaaagttaaagaagtttagtaatttctgtaagtttacatatctaataaatggtggagaacaaggtcacaatctggctgtctgattcaaaaacccctactctacttgtactgggattcctgattccattggagacagtgggctccctagaattctgttattttataagattcaatattgagagacacccagacctcccacatacacctgaggcacaccacgatctttcttaaagtattgttgcttatggcttgaatgtcttagagtgtggaagtgaaataatagtgaggagatttcatggttttgaaaaatgtggggatgatgatttgtttaaggattatagagtttaattttgaaaagggtagagtgggtataatcccactggagaaggtattatttatgtatgtggaatttttttttttcaattaaaggaagaaactaatagagactacagcttcccagctggcctagaagaccatattttgggggagaatatatcgcctaacacaagtatctcagggttggtccccagtgaacttacccagagcaacacaagtcttggcagtagcagcagtagtggagatgtaggaaaactgcattatccaacaggtatggggaaggattatcctttcttcatttgctttataatagtttttgctttttttttttaatttaagagacggggttttgtcttgttgcccaggctggtctcgaactcctgggctcaagcaatctgcctgcctcggcctcccaaagtgctgggattacaagcgtgagccacagcgcctggcctg

SEQ ID NO: 41589 - DNA, 2300 bp, Homo sapien
gcaagccccacctcccaggttcatgccatcctcctgcctcagcctcccaagtagctgggactacaggcacccaccaccacgcccggctaatttttttgtatttttggtagagacagggtttcaccatgttagccaggatggtctcgatctcatgaccttgtgatccgcccaccttggtctcccaaagtgccgggattacaggcgtcagccaccatgcctggccattcattgcctatttttctattgatctttctttttcttgttgatctgacttgaatattattgatattaattacttgaaagcattaattttgatgtcatccattaattttttaccttgcaatttgtgcttttggaatcttgtttttaaagttgttccctatccctaggacctgaaatttttatccttgaacgtttttgcttatattttacttttgatgtttaggtctttaatatatctttattctactttttatatatgatggtagagatccagctttcatttttcctccatgtaacaatccagttatcccaatattatccactaaataacctatcctttgcttactgctatatggtgtcacctttatcatatttcagttcccatgtatacctcacttggttctgcattttcttgctgtttttcttaatgccatgttgttttcatcacttggtccttgtgttgtatctctggttagtagggtgagttcccactcttggattgtattgttattattttttgtatgcttgctctttcctgtgaattcttagaataagtttgaggtcctcaaaaaaaatccaactagagttttctttgagatttatagattaatgtgaggaaaattgacttttctattattattatcttatctgtgagcctggtatatctctgtattttttttcagatcttcttttatgtcctttaacacaggtttaaattattctccataagtcctatactttttgagttaattgtgtttttaagctatcgtgacaagcattttattttatatttttcaaattgggtataaaggagcattattaagtctgtcccctgaatatgttgttatagaaaatttcaagcttacaacaaattttaaaggttttttttcaatgagcacgcaaatatctacccctgcgtccttcaatttacactttactatacttagtctatcacctatctgtctctccaccaatctatcttaaatttttattcatttgaaggtgagatagagatattaatacatttctcccccaaagactttgatatgcatatcattagagttcagtatttattgacaatttttttattttgagataaattgatatacagcaaaatgtacaaatcttaaacataccatttgaagaataaatgcatgtatttgtgcaaattaaacccttagaaaacattaccattacctcagaaaattctctaaatgttccttgcaaggcccttccctcctcaagtcccacccaaagagagaaggagagagataagatgtaaataaaacaatgaacagagaagaaatgattagaaacaagatggagatttataagtgataaaagacattataagtaattataggttaatatatcttaaagtgctgctactgcagctctttatttttttttttaactcaggaaattaataaaatattttgctttccctcttccctcacagttttctttagtggttctcaaaaattggaatatcatttattggaccatttccaaccttgtatttgaaaagtttaggataggaggggaagagaaaatgagagcaggaatgtgtgtgtgtgtgtgagagagagagagagagagagagagagagtgagagtgtattggaaataggccgtgttttccttctggattatatataattttattaatgactgctttagcaataaaatgattctaaatatgatagaattttagaaaacttgaggatttttaaaggctctttttccccccttttccttatgtagctttttcctgaaaccaagtacctctggtgacagtttacaaagtggaagcattccattggcaaatgaatccttggagcacaaacctgtatccagtttagcagaacctgacttgatcaactttatggacttcccaaaacataaccagatcataactgaagaaacaggctctgcagttgaaccaaggtatcaaagggtacagagacctctttatgtagtaataaatggggtacccttgtaaaaattctgtctctaaagacaacctgactcatataggcataagttctggcatttaagagtacatcttaacttattacc

SEQ ID NO: 41590 - DNA, 2300 bp, Homo sapien
gagatgatcaaagaggattcagtagaatcgttcaacttcgaatgtaaaacagtcctaaactcaaacctttgtgacactaaagtggggagatggtatgtgatagttttagatagtaaaaattattcttgtttacttggtctcgaactcgaacttttttgaggcggagtctctctctgtcgcctgggctgcagtgcagtggtgcgatctggactcattgcaacctccgcctcttgggctcaagcgattgtcgtgcctcagcctccctagtaactgggactacagtcgccccccaccacgcctggctattttacctatttttggctattttacctatttttattagagacggagtttcgccatgttggccaggctggtctcgaactcctgacctaagatgatccgcccgcctcggcctcccaaagtgctgggattacaggcgtgagccaccgcgcccggccttgccctcctattttggtaccgtcagatgcaaagtgcctgggacagaagtggggctccgctggcgcccagctccaaaacccaggcagcgtggaaaagactagacagggaaggggttagccctcagaattacacgcgggtttgccttaccagactaccaccactggcacaacctcagacccacacccaaccgactttacctcccaggccctgattaatctcgcccggaagtaccgcccacccatgctcacttccgctatcccgtacttctgctcatctcgcgagaactgaaagcgcctatgtgacctgcgctaagcggaagttggccctcttttccgtggcgcctcggaggcgttcagctgcttcaagatgaaggtaggtgatggtggcgagtgttagactgggtttggggaacgtgaatcgagtcccagaacgcggcattgcctcagttccagcactccaggatcctggctttaggtggagaagggtctcaagtaggagaaggctcgcctttctggggcatggagctttttggccgaacggatggcaggcgattgcggctggagccgcggcgggccgggagcgccatggtggcgtccccgcgcccagccgggacggatgcggcgtgttgcccagtttgcggcaggcctgtggtgcggctcttgaccccggctttcttgcttcgggagggtgaacggctgcggagtgccctcgcccccagagtcattccgcggggcttgaggggaaaacgtcctgctgagtgcggcgcttcttgactgctactctgctttcacgtgcttttagtgagtacagtcggcatcttatatttcctgcttgtgtggaggcaacatgaaaggctttttgcagtggaattaactttgtagatggctctacaattacctgtatagatagtttcgtaaactatttccccccttttaatccttagctgaacatctccttcccagccactggctgccagaaactcattgaagtggacgatgaacgcaaacttcgtactttctatgagaagcgtatggccacagaagttgctgctgacgctctgggtgaagaatggaaggtaaaagttgacaaattgttgcaggtatttaagtcagagacggtaaacgccattggtaactggtatttggaatggggttcagactccgggttctggcttctgacctttggtaagttgcttccgaatgccactttataaagttagaggtattaccttggagggggggacgtagagtaagccataaaatatacgtaaagtttacatcaacataattcttgccctgcatcatgcatttggcaatatgtcacatagctgtcctcataatccccaaagtgccaaaaagggttgtatctgatttgtttgttgctgtttgatattttatcttcttagtgctgttatctctaataaaacatcggttagaaatgcgacttgaaagacatttgataattgaacttgacaagttgggaatatagacaaaactcactgaacagagaaaacgtgcttaagttcaaattggttttcataattatactttctcatataggtgtgttcacagaggtcacaatcctgtactgtataattttggaatagaaatagtaaatgtgtcattcattgtatgctcttgcagggttatgtggtccgaatcagtggtgggaacgacaaacaaggtttccccatgaagcagggtgtcttgacccatggccgtgtccgcctgctactgagtaaggggcattcctgttacagaccaaggagaactggagaaagaaagagaaaatcagttcgtggttgcattgtggatgcaaatctgagcgttctcaacttggtt

SEQ ID NO: 41591 - DNA, 2300 bp, Homo sapien
ttttaaaaaattaaaaaaataacaagtgttggccatgattttgataaagtgcggtcctcatacattgccggtgggaatgtaaaatggttcagctgctttggaatacagtttcagtttctccctgagttgagaatagaactactatatgacccagcaatttcactcttaggtatatacctaaaataatttaaaacaagtactcaaacatagaagaactatttacagtagttaaaaggcagaaacaacccaaatgtctatttatggaggaatggataaacaaactgcagtctatatctacactagaatattgagccataaaagcagtgaagtactgatacatgctacgactcaaaagattagaagacagatacaaaaggtcaatattgtatgattccatttttatgaagtaggtacatccactgagacagaacacagattggtggttgccaggcctggtcgaaatggggaaggggcagcaactgctttaacagggtacagggttttcttttaggatgatgaaaatgttttggaactgtatcgatagagatggtggttgtacagcattgtgaatgtactaaatgccactgaattgttcactttaaaatgactagttatgtcaatttcacctcaacaaaaaaatgacacacagtactcagattttaaaaagcatcatttcaccaagattccatgaattaatgtgagatgatcaaagaggattcagtagaatcgttcaacttcgaatgtaaaacagtcctaaactcaaacctttgtgacactaaagtggggagatggtatgtgatagttttagatagtaaaaattattcttgtttacttggtctcgaactcgaacttttttgaggcggagtctctctctgtcgcctgggctgcagtgcagtggtgcgatctggactcattgcaacctccgcctcttgggctcaagcgattgtcgtgcctcagcctccctagtaactgggactacagtcgccccccaccacgcctggctattttacctatttttggctattttacctatttttattagagacggagtttcgccatgttggccaggctggtctcgaactcctgacctaagatgatccgcccgcctcggcctcccaaagtgctgggattacaggcgtgagccaccgcgcccggccttgccctcctattttggtaccgtcagatgcaaagtgcctgggacagaagtggggctccgctggcgcccagctccaaaacccaggcagcgtggaaaagactagacagggaaggggttagccctcagaattacacgcgggtttgccttaccagactaccaccactggcacaacctcagacccacacccaaccgactttacctcccaggccctgattaatctcgcccggaagtaccgcccacccatgctcacttccgctatcccgtacttctgctcatctcgcgagaactgaaagcgcctatgtgacctgcgctaagcggaagttggccctcttttccgtggcgcctcggaggcgttcagctgcttcaagatgaaggtaggtgatggtggcgagtgttagactgggtttggggaacgtgaatcgagtcccagaacgcggcattgcctcagttccagcactccaggatcctggctttaggtggagaagggtctcaagtaggagaaggctcgcctttctggggcatggagctttttggccgaacggatggcaggcgattgcggctggagccgcggcgggccgggagcgccatggtggcgtccccgcgcccagccgggacggatgcggcgtgttgcccagtttgcggcaggcctgtggtgcggctcttgaccccggctttcttgcttcgggagggtgaacggctgcggagtgccctcgcccccagagtcattccgcggggcttgaggggaaaacgtcctgctgagtgcggcgcttcttgactgctactctgctttcacgtgcttttagtgagtacagtcggcatcttatatttcctgcttgtgtggaggcaacatgaaaggctttttgcagtggaattaactttgtagatggctctacaattacctgtatagatagtttcgtaaactatttccccccttttaatccttagctgaacatctccttcccagccactggctgccagaaactcattgaagtggacgatgaacgcaaacttcgtactttctatgagaagcgtatggccacagaagttgctgctgacgctctgggtgaagaatggaaggtaaaagttgacaaattgttgcaggtatttaagtcagagacggtaaacgccattggtaactggtatt

SEQ ID NO: 41592 - DNA, 2300 bp, Homo sapien
ggagttgtttaatgagtatgaagttcccatttcgcaagatgaaaaagttctggagatctattttacaacaatgttaatatatttaacattacagaagtgtacacttcaaaatggttaagatgatacattttgtgttatatgttttttacccacaattaaaaacgcattaaaatttttttttaaatgagacagggtgacactatgtttgcccaggctgatctcaaactcctggcctcaagagatcctcccatctcagcgtcctaaagcgtctggattactggtgtgagccactgcatttggccaccctaaaatatttttaaaaggaaaaacaaacaaaaaaaactagcccatagttctagactttctctttgcctcacattaatttactcccactacttcaataaaaataacagggggagctaagagcttgtacagacttttctctaaagaagatatacaaatggccaacaaacacattaaaacatgctcaacatcattagtcattagggaaatgcaaatcaaaaccacaatgagtctcagctactccagaggctgagacaggaggatgctggaggccaagagttccagaccaacaggatctcactttgagcaacaaagcgagaccctgtccctacaataaatttttaaaaaattaaaaaaataacaagtgttggccatgattttgataaagtgcggtcctcatacattgccggtgggaatgtaaaatggttcagctgctttggaatacagtttcagtttctccctgagttgagaatagaactactatatgacccagcaatttcactcttaggtatatacctaaaataatttaaaacaagtactcaaacatagaagaactatttacagtagttaaaaggcagaaacaacccaaatgtctatttatggaggaatggataaacaaactgcagtctatatctacactagaatattgagccataaaagcagtgaagtactgatacatgctacgactcaaaagattagaagacagatacaaaaggtcaatattgtatgattccatttttatgaagtaggtacatccactgagacagaacacagattggtggttgccaggcctggtcgaaatggggaaggggcagcaactgctttaacagggtacagggttttcttttaggatgatgaaaatgttttggaactgtatcgatagagatggtggttgtacagcattgtgaatgtactaaatgccactgaattgttcactttaaaatgactagttatgtcaatttcacctcaacaaaaaaatgacacacagtactcagattttaaaaagcatcatttcaccaagattccatgaattaatgtgagatgatcaaagaggattcagtagaatcgttcaacttcgaatgtaaaacagtcctaaactcaaacctttgtgacactaaagtggggagatggtatgtgatagttttagatagtaaaaattattcttgtttacttggtctcgaactcgaacttttttgaggcggagtctctctctgtcgcctgggctgcagtgcagtggtgcgatctggactcattgcaacctccgcctcttgggctcaagcgattgtcgtgcctcagcctccctagtaactgggactacagtcgccccccaccacgcctggctattttacctatttttggctattttacctatttttattagagacggagtttcgccatgttggccaggctggtctcgaactcctgacctaagatgatccgcccgcctcggcctcccaaagtgctgggattacaggcgtgagccaccgcgcccggccttgccctcctattttggtaccgtcagatgcaaagtgcctgggacagaagtggggctccgctggcgcccagctccaaaacccaggcagcgtggaaaagactagacagggaaggggttagccctcagaattacacgcgggtttgccttaccagactaccaccactggcacaacctcagacccacacccaaccgactttacctcccaggccctgattaatctcgcccggaagtaccgcccacccatgctcacttccgctatcccgtacttctgctcatctcgcgagaactgaaagcgcctatgtgacctgcgctaagcggaagttggccctcttttccgtggcgcctcggaggcgttcagctgcttcaagatgaaggtaggtgatggtggcgagtgttagactgggtttggggaacgtgaatcgagtcccagaacgcggcattgcctcagttccagcactccaggatcctggctttaggtggagaagggtctcaagtaggagaa

SEQ ID NO: 41593 - DNA, 2300 bp, Homo sapien
ccttccttcctctctctctctctttcttctttctttctttctgatagtcttgctcttctcatccaggctggagtgcaatggcgcaatctcagctcactgcaaccccctgccttccgggttcaagcgattctcctgcttcagcctccttagtagccgggattacaggtgcacaccaccatgcccggctaatttttgtatttttagtagagacagggtttcatcatgttgacaaagctggtctcgaactcttgacctcaggtaatctgcccgcctcggcctcccaaagtgctgggaatacaggtgtgagccaccgcacccgactacacatattattttctaaaaatgtcactaatcctgtgaaagactcatttgaaatgcttgccctaaaacacattaataacttttttgatgtgatgagagatctaagtacttgtgttgtgttcattttgagaaccatcaaatatttctaagatgaaatttctttgaattttcacacttcagaggagggtcaagtgtctcctaactactgtatcatttgttccccaagctgcattttttttttttttgagatggagtcttgctctgtcgcccaggctggagtgcagtggcacaatctcggcttactgcaagctccgcctcctgggttcacaccattctcctgcctcagcctcccaagtagctgggacgacaggcgcccgccactgcgcccggctaattttttgtatttttagtagaggcggagttttaccatgttagccaggatggtctcgaactcctgtcgtgatctgcccgcctcggcctcccaaagtgctgggattacaggtgtgagccactgcgcccgatgagaaagattaaagatctttttcatggcttcttggtggctggcctgcaactttcctggcaatgactgcccctattgaacatacgacatttcagatccttacctttatgtgttatgattagagaatgaagggtgagctcactggtccttatcttttccactgcctttaaggccctgacatacttaaccccctccttttcagtagacaatattttctcccacttctttcagaaatatgaactgctttatcttctctcatcctcaaaacgtgtcaaggtattcatatctatcactctctacattcccctctttcttagcacagggttctgttaggacatttgattttaagtcacataaacccaactccaactagcttaaacaaaaatgtgactttactataaagtttccagggtatcttgggaaactttgtatgtggttggatcctgggcatatagctggagctagggactccttaccacctctttctatacagccttctttgggacagcatcattattctctctactgttaactagttctgcttgcccagccatctggtggcataggccaccaatagtgcccaggtttatatctccatttcgtcagtcaaccatgtggaactggaagagctcgattctgatttgaaattcccacaaatgcattctgattagccagcttagatcacgactcactcctggaccaatgaacgttagccacagagtcaggtcacagtgtataccatggttgttcttatggtagccatctgaacggagttgggggttgggggaaggtgggaggtgggctgtcctcattgaataagaagaagcagaaggtcttggaaaaggaagagatgccaggagagacagaacaatacttggctactccatgccatcccttctcttcaggcaaaatgaaagatcttgaactttcaattctatctcttctcatcttcttcaggatttagtttaattaattacccttttatattttttgtttttttttaacactagattatactgcaataagttacgcttttttctttttacattttgaatatttctactcaagctccttttctttaggcttacatttgctcaagaatctcttataccaaaggagcatcccataacctgtcttcaagctccggcccaatctatgtacctttttttttctgccatgtaaatgtcatctgccccatatcacactttgccccaacctggccttctccctcttcatttccttcttcaatgccacctccattttcccagagtgttttttggtttctgaaaggctgaacacaggcagagtgagggaaggatgaagtctacaggccattgtgatgcagcccttccagcaggtgtgacaggtagtctctgatgtgccactgcccactccctcagagcccggccccaagaggccccttagattgtagagcataacactgaccagtctctgacct

SEQ ID NO: 41594 - DNA, 2300 bp, Homo sapien
acagacttttaataccaaagaatcacaagcacatattccattagctgtcggagagataatgacatcacacatcatgtatcctctgggaagttccaatgtacactggtaagagaatgaaaatgaaaagaaagggaggaaccacactttgagaatctctggcatataaaataatggttttttaaaaataccattatattttgatgaatatggatatatttccaagtaaactgttgttggaagaagtaaaatattgactacagggaaaattctattgctgaacagttggtgtagcattttgagacacagaaattaactgatgtatctttcttctgtggctgtgggaaacatccaccccaaccgcccttcgtttttgagatggaatctcgctctgtcacccaggctggagtgcagtggcgcgatctcggctcactgcaagctccgcttcccgggttcacgcaattctcctgcctcagcctcctgcgtagctgggactacaggcgcccgccacgacgcccgggtaattttttgtattctttttttaagtagagacggggtttcaccatgttagccaggatggtctccatctcctgacctcgtgatccgcctgcctcggcctcccaaagtgctgggattacaggcatgagccaccgcgcccggccctcaaccgcctttcttaggtggccagctcactccgggtatcctgtaggtctgggtaaatcaaccctaggggaaggtaagagtgtatcttctacttgggttctggagggcagtggaattgcccgtaaagcaggaggaagggatagaggttgggacaaagatgaaaggaggagtgtggtttggcccctgggggacaaacctggattttctagagactaggagaggcggcggggcttgcagtttttgtcagtgatggagatctctggggacttgcacatggctgtgtgggtactggtgggcagacaaacacttggtgcagaggacactgaagcaccacccagggtcctgctgggcagtcaggcccagagagagggcagaccctggggagttgctggcctttaggataccctgcgggtccgagcaagacgtcctaatgacagtcaccaatgggctgctgcccagggcctcttctgccgctgtcctgacctagaatcctacaacctttcaaggaaggagaacgggagccaccacatacacacagagggtggctttcctctagggatcctgggaaccagattggctttcatttacaaaccgcagaacagttacagaagcaaaagaaggtagttatgactggatctgaggacatcttgcctgaattgaatttccagctctgtcacttgctaatagaagcccctcacagggtctctgctgggcacactaaatgagtgatacatggaaactcttcagacagcacctggcatgtgtatgttatctatcacctcttgaacctcgatatcttggagatgtcataactgccacactacatcctctgcagtttgggatggctgacgtttgaccctttgcctaagtccccatatcgaaggctagattaagccttaacgctggagccaaggggagggagggcaggaacgtactctaaatagaagtgctcccccggggactgggcggcccaacctgctccagcagccgggaaggtcttcctgccacagtgaccgcagcgagtggcgtccggcctcggagggactgagggcacttctctggtgtaagcactggcgtccaacgccggacgcagcaaaatcgctgcaaactctgggtccagagaggtccaggtcctcccgggtttctttttattttaaatttttttccagggagagttctggcgctccttcaatcgggggaggctgcgagtctgagccaggagatgggcgtgggcaggcgtgggtagcaccatcgaggccctggccacctgccgggtgctgggtagtctggaagagtctggagcccggtctccgcctccaggcgccccaccctggacccctcctccacgcgggtcccgccccacggtgggcgtggcttccagggggaggggccggggagggtctgcgaacgagtaacctcccgcaggcgaggcgaggcggggcggagcgcgggaggccagttgggaggcgcacatccggcggttacccggtgcttcataaagccgctttcgccgctggctgtcgccgcgttttgcctccgcagcagctctgggctcttctcagctgcgcgagcagctgctccaatgccccggagtggccatgggcgccccgcactggtgggaccagctgcaggctggtagc

SEQ ID NO: 41595 - DNA, 2300 bp, Homo sapien
ctatatatatctataaatacacatattataaatatacgcacatgaacacacaaatcctgcctgttcctgtactatacctctccttgcatacctatagattagtacatacctgtaaataaagacaaagaaaaattatatatatatatataaaatcagatatatataaaagtacaaatgcatcttttcagggatagctctagtatatttatagtacttatttgaagaggggcatcaacttgcagtctgggctttacctcttaagtacaagaggtgaactaatggaaccaacaagacaaaggtagcattgctgtgaccttcagcctaccttggacttgctgtgatcctgcctagtaaggtagatggtttagggaaatagcttgcagggaggagggcttagtggagaaggtctgtaggggccctgagttgagccttccaaaacattcctacaagccaaacagagagactatctgcccacctccaccagagtaccctgaccaagaaactcagggtacttaggacagaaagaggtaaaaacccaggctgggtggcttggtttggggaagtggggaggtaaccagggttgggttgttttgttttgttcttatattgtcccagcatgcaagtagaaaatatgactacaaaccaaattagtgctttttctaggacagcaagactatataaactgaacctgtatttttccagcgcatgtcccattatcatcaaaagaagaggggtaagtttagctgtgattgtcatgtagatatattttgatgctaagggctgccaagagagcctagatgtgcaataagaagtcatccagtaaaggtgcttagtgggccttgccacctaatgggatgtaagggcatagttctttaaaacgttttccagtgtagtcataaagggctttagtgtctgaagaaatcattattcccaatagcactaacttaactctgatcagcactgcttgggttgaggcaacttagcgatgcttggaaaggcatttgcacactcagtgcaccccaggaaggtttctgagtgccaggtcgagtggtaccaggaccaggctttggttaaagttcttgtaacatctatgtctcttcttccatcaagaccttatctgggattctgtctaagttttagagtacacggtatttgacagcttccttatactggtttcaagctattcactccaacaatttgatttcttgattttgctcaacattacattgaatgcatgaaattaaaatattccacgcccccaagttctgtatgacaccttgtgtgttttctcagatctatgtcagtcgaaaataaagccagcaagggggaaaaaataggcaaactgaatcaatggaaaactatgtagagcacttttcttttctccaagtcatgctttccttaaaatcagttgaaaaattgaatcaaggatggttcattattctgtacccatcctacgtctaagttggtacatatggcatatgggaaatttcaccatatgtgttcctatctccaatctattctgtcattgacgcctgctatgattttgttgtgagcacatacctcttaacataagaggacaggatgcagaactcacagcagaataagaggaaaggtaacctgacagccccagatcaagctcagtattccttccagaaaacctcagctcaccccacagagcatggcaataacaggaaatgcccatcattcctcttcacccagaagtaaaaagcacttcaaacccgaggccccctgggaaaacaagaaatcaagatggctgccagtcggaggctggctttcaagtctctccaactcggcagattggggtcttcagatgtgggacaatgccttccaagacattgaaacaccatccaatagaggcgctgagtggaacctgccacctaatgggaatgaatctcattcatcaaggtcaggactttgtactggggcaagaatttgtcctgcttccttagagagtgaaagaatgaggaagtgaactttacgtttaaaaactccagttgttttccctgtgtatttcttgaagggcaaccaagttggttattgtgtgaattttatattattgactggtgcgttgtttgaaataaggtttaaataggtgactgactcaactgcaaacagaccatgtaaaacagaagttgaaggagacctgatgccgccctcttcttattcctgatcctccctctgcctcctcactccctcccatttattcccagcttacagtgaaggctgatcaaagcagctatggtgccctttgcttgtctcggagctccacttcacaggaa

SEQ ID NO: 41596 - DNA, 2300 bp, Homo sapien
cattggtaacacagtcagtggcagtaagcatcggaagaaccataagaacatagaaaaatatatttgtctggggtcagtaagtgtagggtcaaaacacaacactttacctcatggtgtctgcaggcatgaaagtaatatagtaattaatgttgataatacccaaagaaatactgacaaagtctgactcatgttcactgtgactcatgttagagacagtggaagtgttgagacaggctgtagggtcaagtgtgtgagcagagtgacccacatgttcaggcactggtgccatgaatcaggtgggtaacagtggtggcctggcccaggtggtggcagcagaggcagtgagaagtgatcaaatgctggacgtatcttgaaggtagagctaacgacatttgctgatgggtttggtgagggaaggataaaaagagagaaatcgagggtgacactgagattttttgtcctgtgtaactagaagaatggaattgcacttaatggaaaaggggaagacttcaggaggagtgggtttcaagtagaaaagagaggagttcaattttgggtttaagatggttaacttgaacattgaaatggagatgctgagtaggaagttgggtatgagtctggaattcagactagaaatacaagttcagacacgagagtgtagataatgtgtaaagccatgggatggaataaaatcacccaggaatgaatgtagcagggaagaactcaaaggcctaagtcctgggattcatagcattgaagcatgaggaaaacaaggagaaaccagcaagggagcctgggaggtgcagctactgaggaaggaagaagactggagaatgggaagccagatgaagaaagcacagtagtccctccttttccacagtttcaattacccacggtcaaccacagtcaaccacagtctgaaaatgttaaatggaaaattcctgaaataaacaattcatgagtttaagttgagtgctgccattccaagtggcatgatgaaattttgtgctgtcgctctctgtcccacccagaatgtgaataatcccattgtctagggtatccacgctgtagatgctacccacccattagtcacttagtagccatctcagttatcaaatttaagaaacaaaatatagagagggttcagtaccatttgaggtttcatgtatccagtgggggtcttgggacatatcctcctctgataaggggaggctactatatcaaagaaaagaaactggtgaccaagtaggatgaggtcagagaattgaacattggggttagcaatgaagaggtcattggcgacttggtaagagaagctttggagtgcttgggtgaaaacctggccaagtgggttcaagaagtgagagaatgtgaattagaggtatttgtaagggaggatgaacaaatggggatggaagctggaagaaaaatatagagttgctatggtttaaatgtttgtctcctccaaaactcatgttgaaacttaattcccaatgtggcagtattgagaggtggggcctttaagaggtgattgggtcttgagggccctgtcttcattaatcaattaatttacccatggattaatggattaatgggttattgtgggaatggaactgatggcttcataagaagaagaagaaagacctgagctagcacacttagcccgttcaccatgcgatgccccatgctgcctcaggactctgcagacagtccccaccaacaagaagactcttagcaggtgcagcctctagaccttggactttgcagcctccttctttccctttataaatcacccagtttcaagtattcttttataaccaacaaaagatgaactaaaacagagatcaagtgatttttctttttaaaagtaagagattttacagataagttcctggtcaagttggctgaataaaaacagctctggtctgcagttcccagcaagaccaacacagaaggcaggtgatttctgtatttccaactgaggtacccggttcacctcactgggactggttagacagtgcatgcagcccacagagggtaagcagaagcagggtggggcatcaccttacctgggaagcacaaggggttggggaactccctcccctacccaaaggaagccatgagggactgtgctgtgaggaacagtgctatctggcccagatacgacccttttcccatggtcttcacaacccgcagaccaggagattccctcagttgcctataccacaagggccctgggtttcaagcacaaaattgtacggccatttgggcagacactgagctagctgcagaagtttttt

SEQ ID NO: 41597 - DNA, 2300 bp, Homo sapien
ccgaacccagcccggctggcgagagcggcagccagtgcgagccagagcccgggcctcagagcgggtaggcggagggccggcggactggagcggcgggccgcgctcgggggccccgccgtgtgcgcgtcctcccatcttatcctggtaagtgcgggcggctgcgccccgcctgccgctgtagccgctgtggcggtcgtccccgcatcccggttgcgcgcatcccgttgctgctctgcaggctcacaggtggctctgccgtggatgtgggcgccccaggccccgctaggagttagccaactctctgtgctccggggcgtggatttggagcccccgcctctcctacccttgcttttggcttgggatggggggcgtggggcagggcctgccgtcgggggagacgcgcagaggggcgcttccattccccagccacctacaaacgactcagggggatgcgggccaagcgcctcaccaaatgcaacccagctccaagctcacaggtggggcgtctgtcctttagatttattttcctattaatccaccagggaaagtttgggaccacgcaaggcaaagttggggcgcggctgggggcgaacattctcctacggaggcagctcccggggagacgagcggtgggttttcagggggagcgaggatcgggctggagatgactttgcgcccggggagttgaatctgtccctgctggtcgcccgggccgggcatttacacaatcccctgagtgctgtgaatcgcttaatcgttcctgctaagcgttgacgttcgcagccacctgggaatctccgtgatggggtcgggttatctcaggagtagcagcaactcagcggggttgatttgtgctcttgctttgctctgaaaacctgagctccagctaatctcagtatttaagtggcgtgtgtttaattagcttattttacacctgagattatctcagcgactgcctccaaaatgaaatcgttgatatggaaaagaatagtctttttaaagaaaaactaaaaagagaactcttcagaatatcagctgtcaagtctggctattttacccatctcctccgtgggatagagaaagaaaactctgctttggatatctaacctattaaagtcagtggtggggctattttgggcagattttgtggacagaggtattgctacaacttgcgtattgtttatgaaatacacatgtggtctctcgaaatagcctacttgttatttcactgcattgggagttctttgacttactaagctgcctattttaaatatgactaaaggttgtttttttaaaaaaaatatttagctgaaaacaatgtctagatgtttagggaaggcagcttgtgcatgtcaccagaatttttttttgtaaacttaaatttgtaaaggactactttcccgcatctgataaaggagagactttttatgaaaaataagatctgatatcattatgtgtgcagaaaaaagatcactaaattaaagaatcactcactttccaaatgataggttaaatcagaaaaagttgcctacaactgagaattatgtaattggaccaaaagtaaacaatgaataattgttagttgccaagtacctagacagttctgaaagaagtctaggtacctttatagcactggaaggttattacatgatttaaggtgagataatctgatagattttcacctgtaaaatttttattcttacatctgccttctctgcacctaacattggatttaccaaaatatttatttgggtttatacatacatcttcataagtgccacatcccatactaagtgctacatatgtttttactcatcttgaaaacaatcctgggtggtaggtaccgtaattgtccccattttaaatgaggaaactgaggcacagagaagttaagtaacttacccaagatcgcacagctgcaggacaggactttatcatatctgcaaagatctttattaaaaagacgtgattttatgatttacttattctcgtttttatttttatttaagcataaatgatgaaagtttcctgtgaagcataacaatccctgattgtgaaagtaccccacaagcatcgttaactataaagtaaggaaaagtatgaaagaaccatctggttgagtctaaagttggaagatcaccatatccaccagaagacccaggatggatctgcaacaaagcaccaccatcacttccctagagaaatggtgtttggatgagtcactgtctggctgcagaagacattatagtgtcaagaaaaaactgaagttaattcgagtcttaggccttttcatgggtctg

SEQ ID NO: 41598 - DNA, 2300 bp, Homo sapien
caatgggtgttactatcaaactgtttgcagaggagtaaggaaaacaaaaatgagagtagccaggatgtccttctcagtcagctgagatgtgacagcttgtttagggtggttgtgcaatttcagatgtgtcatccccagcctcagatatcagtgtttctctttgctagagctctaccattatggctgcttttgggggagtccaccaccccatttctcctgcagttaccagttaccttattccctgcttttccccttttcttgacttacaccccttgtggcttctagaatgtcatcttggtcaggtttccatcactgatctagtcagctgtgtccatcagtgggatcagtgcttccagatatctacccagcagaagccactgagggtgtggctcctcctcaagagccagtaaggaccccatgagggtgtgactcctccttaagagcaaataaggatcccatgtcttatggctcaaaataaatacttttcattgcctgcagatgttaatttcctaaggttaggcccagggtgaataaaggaggagaaaagaagactgaatctctgagggtaaaacacaggacaaagtgaaatgacttcttcaccaaagtaaccaccaaactgcctagcatcttcctgctctcctgtctctgggagagtctattgtttgccccataattactatccttcagctcatttggctcttaatcatgcctttgaatgcagcacagacagaatgaacccagctcttctgactgttctaggctcagtactcttgaaagtcaggcttcaagtagagtcaattctaaggggtctttggccccagagcagtcaatgcatcaaagtggaattttctatagcatgcttggacccttggcatccagcaccaaagtaaaacacagcttgccttacataagggagcctacattatcactcccagaataactggtgaccccacagacctgcacagatgtgctgtagaacaaacaaacatcagacgttctctataaggacaggtctaggctgcacctttatctatatccagtcaaagatatatagatttatagtgacccagaaaagaatgcagaggaacctggagaaagcaccctgctgcttagatctacaaattttgttcatctcatatatataggcacagacaaaaaggaatgttgacaggctgtatttacttgatctttttgtcatctcttagaatctaatacatgtgaaaattttggcataggtaagcacaattacttgtggtagacatatatatttgtgaagctgtaactccttgtgtatatatgttttattctttacacattagttcttgctgccaaaaagctctacattttataattcaatcagccaacacctgtaccaagatttggtcactgggaacttcaaatatttcgtatttgagaatggggaaagaaaatctgcagaaaaaaaaattgaccagaacctgcgtcatgtatttttcacaggaaagctaattattagaggaggataaaaacctgaggttccctgactagggagtggagtctagacaagggatctgatgtgacagggttccttctctatcctcttcaaaatgtaaggaatgtttggcttctggattgtgtcagaaaatagaagtaacaaatagtctttattcataaaaaactggcttttcctgacagagattttaatcgtgtgctacacacgtgaatcctttttaaagaaattgctaggggctggggaatttccaagccaacctccattaacctgcagattgagcaagacacacatctgttctttaattgcacagtatttcgaatcaaaacaaacaagcccttccacagaaaagggcctgttttcctggtgatggttttggctcgagttaccctttgtgttgagtatgtctactcttcaggccataaggtagcgatctcaccgacacctccctgtgtcacgattccccttagtagtctgtgctgcagtcactaagcatgaccactagatggcgggagaggactgagttgaggttatggcggcggctcctttctccctgcagggtgggaggaacgctgttgtctctttttcttcctgcccctttgtttgacttcaccattctctgtttccttttcgctccgctgtagttacgtgactcacctttcattcagtacctcccttcaaggaaagccctgtctcctgtccttggactgggatcacacagagttcttgggatgaccctggctctcccgcgccagccgctctgctgccaagcgcaagcattcgctcccagatgcttcgcccagttctttgc

SEQ ID NO: 41599 - DNA, 2300 bp, Homo sapien
tggctttactaatggcacgtccagataacctttagtttccaatactattattacaaaggactgctctcaaatttgattattttatgaaaagtttaataatgcacaataaataggtccccccttcacgtagatactacccacacagcttgtctctgcgaatataaacgtagtccttgtacatacatacagacacagcgacgcatatacctacaggatgatatgcagttatgtatatgtgtgtcagttgacaaatctaagcccttggatttagattaaaatgtttctaccttcagtcgtttgctccattctatgctaaatcctgtagaaggctgggaagaactggggacctcaagccaaagaagtttcttgattataactgacaggcagcggaatatcagttttagggaatcaaaagttgagttggaaggctgctggtttggaaactaaggttggttccaagtggtccgacctgattcccaggatctttgtgagagctgctgggagaactgaaaattaacagcgaggacacaggacgccctaggtaacgtcctccccgctattctgctcttctcaattcaagggccgagacaacttgcttttgtggaaaagggaagtaaagggaaaagaggaaagcaaggaagttcagtcagaaagaggaagagggacaaagaggaaagaaagggacaaagaggaaagaaagggacaaagaggaaagaaagagggacaaagaggaaaggcaaggagaagagaaggaaaaatcaaggttcagcaagaagttggaaggcgagggaaaaaggggagtaaagagaaggcaaaagaggtctaagggctaggaagatgcaaggatctttttttaacgaaccaaagtcacatccatctttcactttcaaatcaatcgtctagatcttatccgtttcctttttaaaggttatctgcgtctgtaaaggaagccagtagttgatactcctctccgcgccccacgcgtggccgcgctgttctatctccggccactgagatcaaatacaacgcgagtgagaacatttgcagaggcgcgactctgggaacactcctgcgactggctgtcacccgggagtctaaccggattaatactcagagatggattacgctggttgtcaccaatacgcctaaagattataatccaatttacgcacattacagtcagtattaactttatctgctattttaagactcccggttgccccgcgcgtcctcagaggacaatcctccacgttctgatgcaactcagtaggctgtcaggaggggaagccccccgaagaaaacaactccaagcctggtccccgagggtctgtacccggcactcccaggtgtcttgctttcacctgggcaccgctttatgaagcttcccagccggggattaccaaagcggaaggcgttcccttgcaaggaaatagcatccttgtttctcccttgttcatttcattttcaaattttcggtggcggtggcagaagggcggggagtgagggtggcgggcgggtgcctgtgagtggatggggcagggggccaggggatcgttgcgggttagaacagcctcagtcattgctattttcatgctcgttttttgcaggatggcatttctctcgctctctttaagtaagtttgtttgggtgtgagttcttgtcttttcagcacaaaaccacagaaatacgtggtggaaagtaaaagaaagcccactccctcctccccgtgcgtactagctaaggacttgatttaacaccccctctccggctgctgagggctctaagcagtggctacattccagcagttttaatccgttttttattgtagggcgagcagagtttacacaggggctgggatggctccccagctggccgctctccccactcctgcgtcccctccctgccacccccccagcaggaacctgttactttaagcgaggctttccagtgtggcgctgcgggccgccggggtttcgggaggtggcaggtgattggctctttcgagctccccctggctcgctcgctctgcctccccgcgcgctccgccccgcccgcaagccctccctccgccctgtgaggctcggagcccgggtgtcaggcgccacggcgcatgctccgcaatcatcttctttaccctggagctgctgctgctgctgctgcttttgcttttggggctgagtttaataagcgagcgagcgagcaagcgagcgcggggggaaaaaggcagagaatgtccgccatctaccctccgctcctgggcgcgctctcattcatagcagcctcttcatgaattacagctg

SEQ ID NO: 41600 - DNA, 2300 bp, Homo sapien
ttttggaataggtgtggtgtggtgctgaaaaaaatgtatattctgttgatttggggtggagagttctgtagatgtctattaggtctgcttggtgcaaagctgagttcaattcctgggtatccttgttgactttctgtctcgttgatctgtctaatgttgacagtggggtgttaaagtctcccattattattgtgtgggagtctaagtctctttgtaggtcactcaggacttgctttatgcatcttggtgctcctgtattgggtgtatatatatttaggatagttagctcttcttgttgaattgatccctttaccattatgtaatggccttctttgtctcttttgatctttgttggtttaaagtctgttttatcagagactagtattgcaacccctgcctttttttgttttccatttgcttggtagagcttcctccatccttttattttgagcctatgtgtgtctctgcacgtgagatgggtttcctgaatacagcacactgatgggtcttgactgtttatccaatttgccagtctgtgtcttttaattggagcatttagtccatttacatttaaagttaatagcgttatgtgtgaatttgatcctgtcattatgatgttaggtggttattctgctcgttagttgatgcagtttcttcctagtcttgatggtctttatattttggcatgattttgcagcggctggtaccggttgttcctttccatgtttagcgcttccttcaggagctcttttagggcaggcctggtggtgacaaaatctctcagcatttgcttgtctgtaaagtattttgtttctccttcgcttatgaagcttagtttggctggatatgaaattctgggttgaaaattctttcctttaagaatgttgaatattggcccccactctcttctggcttgtagggtttctgccgagagatccgctgttagtctgatgggcctccctttgagggtaacctgacctttctctctggctgcccttaacattttttccttcatttcaactttggtgaatctgacaattatgtgtcttggagttgctcttctcgaggagtatctttgtggcgttctctgtatttcctgaatctgaacgttggcctgccttgctagattggggaagttctcctggataatatcctgcagagtgttttccaacttggttccattctccccatcactttcaggtacaccaatcagacgtagatttggtcttttcacatagtcccatatttcttggaggctttgctcatttctttttattcttttttctctaaacttcccttctcgcttcatttcattcatttcatcttccattgctgataccctttcttccagttgatggcatcggctcctgaggcttctgcattcttcacgtagttctcgagccttggttttcagctccatcagctcctttaagcacttctctgtattggttattctagttatacattcttctaaatttttttcaaagttttcaacttctttgcctttggtttgaatgtcctcccgtagctcagagtaatttgatcgtctgaagccttcttctctcagctcatcaaagtcattctccatccaggtttgttccgttgctggtgaggaactgcgttcctttggaggaggagaggcgctctgctttttagagtttcccgtttttctgttctgttttttccccatctttgtggttttatctacttttggtctttgatgatggtgatgtacagatgggtttttggtgtggatgtcctttctgtttgttagttttccttctaacagacaggaccctcagctgcaggtctgttggaataccctgccatgtgaggtgtcagtgtgcccctgctggggggtgcctcccagttaggctgctcaggggtcaggggtcagggacccacttgaggaggcagtctgcccgttctcagatctccagctgcgtggtgggagaaccactgctctcttcaaagctgtcagacagggacacttaagtctgcagaggttactgctgtctttttgtttgtctgtgccctgcccccagaggtggagcttacagaggcaggcaggcctccttgagctgtggtgggctccgcccagttcgagcttcccggctgctttgtttacctaatcaagcctgggcaatggcgggcgcccctcccgcagcctcgctgccgccttgcaggttgatctcagactgctgtgctagcaatcagtgagactccgtgggcgtaggactctccaagccaggtgcggaatataatctcgtggtgcgccgttttttaagcccgtcggaaaa

SEQ ID NO: 41601 - DNA, 2300 bp, Homo sapien
ttatcctcatttaaattaatccctgggctggtgttaggtaaacatctgtagttcactgtagagcttggtaagtagaaaacttccattgctgggttagtctatgtgcagatatgttcttgccccttgacatgtttcaccttttgccagaataggatccttctgagaaaggaagaaattactttctttcatcatagtgcctctaccctcacaaacagttgattcatagctgcattctgtaaagtctataattatacccactttgaagcagtccctgtgtatgtgtatgcagaaattggggtacatggcctgcaatcggatattactcatctgttttgtgtaaatgatgtattgatcactgttatgacaagaaagggtgggggatacattcagattgagtaattggagagagtttaataaagaacctatttacagttgtgttgtcaaggttaagggaaactcacaagagatggtaaaccgtctcagagtgcttaatgtctctggcctacagagataacgggaggaagaagaaagagtatctgtattataaattggggtgcctaaggggagccaagactttcagaagaggaatgcaggcaacctgtagcaatcctgcaagaagccctgtgtctggggaatacatctcctgacttcactgttttcaccctttgatgtcctgccagtgactccagtggttgaaaccaaccagaagccagaggacatgggagcctgttaatgcctttctttaaagactgtttttccagagcacagagcagggttgagaaggatagaggatagataagaaggagtaaatggaaaacgtcacatattggtgtttttgagctttgaatggagaatcttgattgcatctaggagggtcctgtcagaaatgggtatataatagacggtccagtgagctcttgctgcctttaatttaatcatattcatttaaaggagacttttagatagatctcttcagaatgaaattccagttaggtggacccttgctttttgtttctgtaagagccacatgcagtggttttcttttttcattttccgctacatatgatttgtttagctttaatgttttttgtttttttgtttgtttctgtattgggcaacctctagtggtccttaggaaaatcacatttgaatatgaacctatagtcttatcaaatattttgtttatacatcctgttgtcttctgacatcatatttctgttattatatagtaagtaaaatgtcaaatgataaagatcttgggcttaattagaaagaacacaagcaaagatagtggacaaatatctcattttaaaataattgtcctaatattgctaagtatagatagttatgaaagaggtttttctgaaaacacttaaatgataagaaggagccattctcatgaaaatgtgggactgatatgttccaggtggaagggatagcaaatgcagtggcactgacttaaatatcaactttgtgtttttgaggaatggaaagaggccatatgtaagtgtgacttcaacatagcaaggaggtagggtattagacattaactctgagggggagtcagggctagattataaaaggtcttgatcatggtcagaagttgtgattttattttatgcacagtgaaaagcaactggaaggtgttagggacaggaatgacaaaattctggcctctgggcagaggaaggtttatagaggatggtcaagaggaaaagaattcagtaaactagtttttacattagtttgtatgaggaggacaaaagataataagtagataaatagcagtgaaaaatggagagaaactgatggatttgggatagattttgaaggtggaatcagaaggacttgctaatggattacatgtaataagtgagggaaagagaggaattaagcttgagcaacttggtgccatgttctaatttggaggaagactaagaaagggataggtatcaagaggtctctttttaccatgtaaggtttggccagaaatgtagcttagttgtttgtatatgagttaagaacgcatgtttctcttctagcttattgtatttactctacttttggtctccttttatcctcttttagctttggaggaattttttacatcacttgtgaagcaagaaatggtgaatatgcctcgtgggatatatcactctgcattaaaaggaggtgcccgctcagaccaaggaaagactgtagcaggaatccccaattttatattgaaaatgtatgaaacaaacaagcaaccaggactgaaacctggccttgcaggtaagggtagtacatagtatcaaaaa

SEQ ID NO: 41602 - DNA, 2300 bp, Homo sapien
acctctttgagtctttttgtcctgatttataaaatgaaggaattgaaaaatatcatctatagtagttgtagcccttgctccccacttcttgtttttgtgactgttgacacttacttcatcattcttatttttcttatctgcaaaatgaaagtaaaaattaatgctttgccaactttctaaaaagattgtgaagatcaaataatatactttatgtaaaaagttttgaaaactgttaaatactctataaatacaaagtaatgttgttgatcatttaaaaaaaaaagccacctgttacccatcctctgtcttcatgcttgtattctaagatttgaagcaaaatgagaaaacacttttttgttttggtttccttttccttttattggtcgtagtacatgctttatttctgtgtctttgtagaagtattttggtcctaccctattactatccattgcctagggaattataatggtcatgggacaatcagctgagtggcagaggattatagttaattttaataaaaatataacacagattctgaactgttgctaagatcatgaatttagcttaaaaccttaatgccgaaggtcttctctgtgtattttgtgtgcctctgtcctgcccttgggaagatctggtatgtattcatcaggggctttgggtttagagctagatttttaaccatagttgaggtaaaaaaaaaaaaaatgacttaccagatgatgtagaattaaattggaagataaattttgctcaaaaagttaattgctctatgatgatttactttctgtcagaagtgttcttatttctttaatgatgaatgaaaactttagatgcttatggaggtctttgcaataactatctagttcaggtattcaccagagcaggacactgtatgaaatttctcatatgctgcttagttcttgcaaaccaataaaaataatctctttactagtcagctctgattgtctcttacctttgtgaggttttgcattaccatacttttcaaagccctgttttaaaagtcactttatttcatgtgtgctaccagctggatcattttgagtaacattatcattaaaacagtgctatattaatttaaagtgtaacttagtacgtttgatttttatccttaaagtactaaagcttagagagcgaatgggcctagaattaaaaacatattttaatgtgctttaactgcaagggacaacactgcccttatggtgtgtctgaaactttaaattggataatagtgaggaatgataaacgggctttctttcccacttgagacatatttataaatgtatataacgtctggtagagctctctaacctgggattcttatagaagctgttcatattcagctgctctgtcattttattagggctgttattcatttcttttcccataattacatgtaggaaggggcatatagagctctccatttcattttgaatagctggttattgctttgtaaccaaaggcttttaggatttcaacttcctttttaattaaaaggaattaaccccctgtaggaaataatccatctactgggaagtgttcccaccaaaaattttgggagatgtgccaatagatccctgtgctaaatttatacttgcttctccatactaaacttaaactctcttcctcccttttcctttcttccctggaaaactcctagctttctggacatttataatgtggcttgctggtttgtccaagctcagatagcttcagttttttttttgtttgtttttctgtttttttgtttttttaatatatatacatgtgggcttttaggaacactgaaattgtttcaagccttatagtgagggaatttataacctttaaaaggaagacgcttgtaatttggtttttcagatttaaaaggatattattaattatttagtagcaaaacatttcattaataatgaaaacataatctatagacaaaaacgtttggatttttaaaaaatgtattattttgggtgtcggccggggtggatctaagagaagcttgtgtggttgtatagtgcttttatgataggtatgcttccttcatgtttaaggctaaccctgttttctttctttggcatgtcctagaagtcctattctggtgaaaacacagctagtgccattgcccgttctgctgccgccacggctttgtctctccttgtgccagttttcattatctcttgcaaagagaaggttgaggaaatcctgaacatgctgactgccaggttacctgggaaaccaagtgctgatgagtctcaagccgtgcaaatccacatgggccttgcttt

SEQ ID NO: 41603 - DNA, 2300 bp, Homo sapien
gggtaaagagtttcagtttttcaagggaaagattctggagatggatggtggtattgattgcatagcagtatgagtgtacttaatgccgctgaactggtattcacagtaaagatgataaattttaagtgtacattaatacaatttaaaaaaactgaaaaaaaacattttatctgattacacatgctatagaatttccccatgtggattttttaaaggtttctccactgtcttaatattgatgataatgggttattgcagaattcattggttttaagctcgtaatgttatcgttactgttttatggttatatacccgctcacttacattcagagtaagttgtgaaaaattgaaatgtagaatttttcatatactttgctttttatgggatgctttctttttgtttaggagttgattgaccttgtgtggtctaccttggttttttcaccctaacctcttcaaattgtttgagctaagctgctcaatagtgcagtattactttcctgaaataaattactcactgaagctgaattccttgcaattagaccctgcagtttatgatgcaaaccagtctagattaaaaaaaaacaaaaaacaaaaaaacacttaagtctgatttttcatatgacaaatacagcttgtcattaggaaagttagcactaaaagtgtttatgttgctatttataaacattctaaatctgtgtcttttttttttctttttcttaccccatttttatttatttatatcagacttcaggttttgccctggctttaggaaacatagttcatggattgtctgtgtgtggacatggaaaagctgaagacttgggcagcaaactactccctgcctggatcagaattgttctaacagaggtagaggtcacctgttgtatgctatttcatatttttataatggaaaaagaactactttattggatcatttataggagttgctgagatatatacgttaatggtaaaagaataggcaattttaaatgaaagagatcacatacttttaaatcccttataaataatgcattctgccaactattataatttttttgaactggctattttgtctgagttttaattttaagacaacattttgttttttgaaaaataaaagcaagaatccacccatgatctaacaaccttaatctgttactttattttagtctgctgccatttttggttcagttatacaggttacgttgaccctataagtttggtaccaattcgaccatttatttctccgtgtcctcagaagttttatagaatctaaacccaaggactgattccctcttttcatattctgatgctttgttttcagggcactcccacaatgctttgtctggcagctcttcatggcatggtggccttggtaggctctgaaggggatgtaatgcaggtaaagaaaggaaccatggaggggaagacatctaaatatgtacatagccatagcgggagaagaatacccagtgttttagtatgctaagaacagaaggatttatgctcatggtaatagttacaccagactttttaatgccttgctgtatgaataattgcacttaaccaaggattatttctatagaggtttgttctttatttaatttggtttttagagattaaacctggccaacttaggtgctctccacaaatttccctgcctgagaaaagatgattgaaggataagaaatttcaaaagttatttgcaagaaactccattttgcatcttaatgtctgatatatgtctatgtggttgttctttaacttcaaaatattttcacagtggacatatatatgtgtaagtttataagtaattctaaaggagctctgtttttatgcattaaaagttgattgagtgattgcttacatgccacagtgaacaggtaccaggaaatcaatgatagataaagcatggggccctgcctttgaggagttcatagcttatgtatttgaaatagaaggacataatgataaactgttttataacttagaagatggatagctcatgcaccgggaatataactcttaacttttttatgggggtgggtgggatgggtatttcttcttattctttcagctgaaatcagaagccatccagacctctcattttcaaggcagacttaatgaagtcattagaaccttaactcaggtgagaaaatgaatttaaaatccttgggtggaaaacatatccccctttgttgtctttttttctattacatgatacaacatgttttacctggaaaatgggaaagtctctggttattcccgctgagttcaagaggcatttgggagtgatg

SEQ ID NO: 41604 - DNA, 2300 bp, Homo sapien
agaagaaagggctgaaaataatagtcaaaagttgtccacatggagataaagccatgtgtggttgtctatgctgagggataacatggtgacaaatggatggtgactaagggcagacttttgaggaaatacagcaggagaagaagacccatccagagagacagaagggacataaggcaagagacgtagaatatgtagaacttcaggggtaaatggcagacagacagaactggtaaaatgcagcagacctgtcaatgaggatgtggatgcaggggctgtgtttggtgacaaaggatcaattcttctgggcaggctttccaccttctccctcctgccccactgcaggccatctgggactttactttctctcttgctgcttaacctgatcagagatagcattgataatgggttagccaccagtttaccctttagatcaaatgttctgtaaaagcaaggaccgtggggcatcatcctgcaaggtgatacaggatagggattcggcgaaaaattaacatgctcgcggacggagcagtgtcaggagagtcaaactgtaaggtattatggaacaggaagatggtaggaaatgaaagaagcacctgatcagagaaggcaggcagggagttattagaagattccattgagagagaaacagaaagaatacaatgtttaattatatgctaagagagagttgtctatgtccctaaagtgcagtgaaagccaatggaaaggaggggatgacgatgcaagaagaggcgatggttaactactgatgcagtgagtctgagaagggactggtaaacacaaagttggggttaacctccgactgagggcagggtatgagagaaggtgcagagaaatgtagaggtgagaggtaggcatagtgaatggaatggactatgaaaaaaggaagccacggcctaatgggaaacaaacaagaaatcccaccaaccttgaagttctgatactgccattttatcaattgtgtgacctgtgccaagtgacttaacatttttttaatgcctcaacttcccttttggtaaaaatgggggcgctaacttccaactccaaaaccaggtgccattgtcccacttacttgcaagtgccttcttagatgtttctgtttttgttttaacgtttccctttctgggcagaggagcttgaagatgggctggatcttattagcaaagcaggagggtgggtcatctgtgtacggagacagtgatgtcataagcctgagagatcacgaaggggttgtagcagtgctgggcataggctagagaaattaacacaacgtgaataaagatttgcaggcaccagtgagaacccaagggagattagagagcagggaggcctgatagaagaggaatcaggcccctagctgaaaaagtgttggggaggtgtgctacaaacttcgttttatttttatttattttttgagacaggatctcgctctgttacccaggctggagtgtagccgcgtgatcttggctcattgcagcctcgacctcccaggctcaagcgatcctcccacctcagcctctggagtagctgggaccacaggcccgcgtcaccatgcccgactaatttttgtacatttagtagagacgcgttttcgctatgttgcccaggctggtctcgaactcctgggctcaaaagatcctcccgcctcggcctcccaaagtgctgggattataggcattagccactgcgcccggcacaagcttcgtgtctgaacctggctcaccggtgggcattgagcagagcccaccctggaatccactcatctcgggaggtttggggatgggcttcagcgagttcggaggccccggaaatcgcccagatgcattaatttccagaaggcttgcaagggggtctcaacacaaagattaggaagctgtaaccagagtttggtaaccccaccgggaacgcgagccgcctcccagccttgcgccctgacgcgctctagcagtgctgcagaaacttcgagaacttcgttttcatctcttccccaacgcacgacctcgggctttttctttttgtaaactgctgagtgtggagaggccccgcccttccgcgcccagccgcggggccgcccctgcctcctccccggtactccttcctggaccgcgctggaagccctggcggcggcggcccatggggcccttggcgctgcccgcctggctgcagcccaggtagggcgctcggccgaatcccgaggggagggggcgcgggtggagggcctggaggcgggagctcccctctgcggcgggcgggcgggcggcaccccccgcccgccagcaagg

SEQ ID NO: 41605 - DNA, 2300 bp, Homo sapien
aggaggaaaaaaatcactctttagtttcacaagccaaatcaagccactattaaaatggtggtttacttccttttattaattttctctacatatttttgcataatcatgttgtatgtacaattttatgttctatttttcaatattaactggtgtctttcaaatttcctaatgacaaaaataatatatgctcataatagaacattttaaatgcaaataaaacaaaataaatgttaaaatttagtaatatttattaaattttctccaagtgcacgaaattacaaatgtaacaacctaattccctagtggcctaataaccctatttcccagacctcttctcattacaaggaaaaactcatatgcagatagttctaaaggtatgaagtgaaaagataaagatttttcttccttgctgcatcctcaccccatcagcattattccccagggtaactactattaatagatagtaattctacccaaaggaaaaaatcatatgcatataacagcatcatatgtatacctttctagtaacttacaaaacaaatgataatatcatatcctttcttatgtgtattgctcttttcactaaatgtatctgtgatatgtgtctatatcagctgattgtcctttttgatggctgaataatattccatcttgtccacgtgatagtattacttgacaagctccctgctgatggacatttgtctttgttactatgatagtaatataatcaacatttatatatgttttgtatgtatctataatacacatgcacatacacatgcatatttctgcagggatagccatagtaaataactagtaacggtattgcaagttaaaggaacaatctcattgcttgaaattttaaattttgaaatacactgccaattttcatggtctctccttgtaagctagtttgggctttctcacagcatgacaggctcagggcagtcagaccatcctggccaaagagcagagtgccacagaccacaactgcttctaatcagccatcttcccaaagccttctcttttttctattaataactttgtatgagattccatcttaatacttttctgttgtttggtcttgtaagagcttatttttcctgaaccaggaagtggttcagggcggtttttctaacttcacagagctccctcttctgttagcttttgtgaaatggtcaaaaacatagcagcctgccttctgagttctccatcccaccctggttgggccttctctatccttgtctgtgttgtttatatcctgctgaagtgtgattccacttgtggcagtttctcctctgtgtaggatcaaaagggctgtgactggttggtttgaaaatttcttataccctagactattccagtgcctttcagaagtttccaaggccctctcacactaatctattatcatattgggcaaaactccttgcagtttcagctactattccctgattgacttttcagtaaatctatctctcagtctttcagtatccaaagaagattggttctaggaccaccatcccgctgcctccacagataccaaaatcagaggatgctcaattccctcttataaaacgttgcagtatttgcatataatctgcacatgtatttctgtatattttaaatcatccctagattacttataatacctgatacaatataaatgctaaatagctgtaacactgtatctttaaaatttacattattttttgttgttgtattattatttttattgtatttttaaaaaatattttccatctacagtcagtagaatccacggatacagaacctatggataggaaggaccaactgtatcttttagtgttttgaggttcttgaattctcaggtcgtttgctttcctttgctttctcccaagtcttgttttacaatttgctttagtcattcactgaaactttaaaaaacattagaaaacctcacagtttgtaaatctttttccctattatatatatcataagataggagcttaaataaagagttttagaaactactaaaatgtaaatgacataggaaaactgaaagggagaagtgaaagtgggaaattcctctgaatagagagaggaccatctcatataaataggccatacccatggagaaaggacattctaactgcaacctttcgaagcctttgctctggcacaacaggtagtaggcgacactgttcgtgttgtcaacatgaccaacaagtgtctcctccaaattgctctcctgttgtgcttctccactacagctctttccatgagctacaacttgcttggattcctacaaagaagcagcaatt

SEQ ID NO: 41606 - DNA, 2300 bp, Homo sapien
atttaacattaggtacatctcctaatgctatccctcccccctccccccaccctacaacaggccctggtgtgcttccttacaccttatactaaaattaattcaagatggattaaagacttaaatgttagacctaaaaccataaaaaccctagaagaaaacctaggcaataccattcaggacataggcaggggcaaggacttcatgtctaaaacaccaaaagcaatggcaacaaaagccaaaattgacaaatgggatctaattaaactaaagagcttctgcacagcaaaagaaactaccatcagagtgaacaggcaacctacagaatgggagaaaatttttgcaatctactcatatgacaaagggctaatatccagaatctacaatgaactcaaacaaagttacaagaaaaaaacaaacaaccccatcaaaaagtgggcgaaggatatgaacagacacttctcaaaagaagacatttatgcagccaaaagacacatgaaaaaatgctcatcatcactggccatcagagaaatgcaaatcaaaaccacaatgagataccatctcacaccagttagaatggcgatcatcaacaagtcaggaaacaacaggtgctggagaggatgtggagaaacaggaacacttttacactgttggtgggactgtaaactagttcgaccattgtggaagtcagcgtggcgattcctcagggatctagaactagaaataccatttgacccagccatcccattactgggtatatacccaaaggattacaaatcatgctgctataaagacacatgcacacgtatgtttattgcgggactattcacaatagcaaagacttggaaccaacccaaatgtccaacaacgatagactggatctagaaaatttggcacatataagcttctaatgaaagacaacatcatcattgatcccctgtgcccacctgagaaacactgaggataacaaatgttcaatagcttacgtaaaagaattgaacaataaaaaccgtgtcaggattccgagctgggatactgacacagccagtggagcactattgacctcagtaagcaaatggtggaaaattatttgactaatgaaggtaaaatgattataattgggtaatccttccaccttccttagacaaaagaaacctttgctatcagtacctgagggctgtcgaaacttttgatacctggacacatgggtcaggaggaaaggaggtcgccactgagagccagggtcctccagacaaacactctaggggcaccggcaagggtcttggagggttagttgctttgctcacaaagtaaccactaccctctcaccaaaagagttctgaagttatcaggatgttgtgagactgctccctgggagcgagtctggaagagtttgggttgagagtatttgttactctagaggaaaaggtattactagatgtgataactaccttgtgtgtgaggagacgctgggaaagtaaaatatctgcgaattagaatctctacatccatatgcgcttgtaaagaatcaggattccagctgggatattgacagataggggagcactattgacctcagtaagcaaatgatggaaagaaaaagcagtgtctatattaatcttcaccttgtggtcccagtgaagcgtaaccacatggacctgcatgaatgttttctagaaggaagaaaaatgtcagagaagctcattcgctaatcatcatcatcctctgttgtgaataaaacagcaaacaaaactgcgtttttggctcatatctgtaattccaactacttgggaggctgaggcaggaggcctcagcttcaggccaggagtttgagaccagcctgaacaacatagtgggacctcatctctaacaacaacaacaacaaaaaaattagccaggcatgatggtgcacacctgttgtcccaggtactcagggggctgaggcacagagattgcttgagcccaggagttaaaggctgcagtgacctctgatcatgccaccacactccaacctgggtgacggattaagaccccatctctaaaaaacaaacaaacaacagcaaaatgctgttcttggttctaaagagcttatttgctgcagatgatctggtaaacctgaagcaaatatagaaacctatagggcctgacttcctacataaagtaaggagggtaaaaatggaggctagaataagggttaaaattttgcttctagaacagagaaaatgatttttttcatatatatatgaatatatattatatatacacatatatacatatattcactatagtgtgtatacataaat

SEQ ID NO: 41607 - DNA, 2300 bp, Homo sapien
taataaaatgtgtttggttattttctaaaattggtccatttcataatctctacctttatataaacaggctgattttctaccagtgtcatctaaagattatcacgtgatttgaagctgaaatttatatatgatggaaaaatgatgtcacaagtatttacagttcacatacacattctcgggatttgatccagggaaggaaagctgtaggattatctggaggacagaggctattattccctaattttgggaatagtaaattttctgattcctataaaccgtgtgaattggagagtttgaattcagatatgtgactctgtatttgacaccaggctagttattttctattataacaaagtagaggacagattagagataaggtcataaatagttaatatagtgccaggcaaaggataatattatgctgctcttgcaacttgaatccccagaatcccactggttttagcagtaaacttaatgggcattattgattctgagtaaaagctgaatggaaatttttgtcattgtcttataattgcagcaaatatggccatgatgaagaaaaatagcctcattcttgaacactttccagtagaagaaaaaatgagaaactagaaaaactccacttactaaatagctgatttgctaaaacagacctcattccatttaaggactcagtatctatagggcagaggcaaactaacttcttatgcaaaaaaaaaaaaaaaaaagtagacccagagttcaggaccactctgaaagttaattctttacatgataatattcaatatttataaatttatgaatttagaacaaagatggtctcttttttcataagaattgacttggataggaacttctgaaaacctttagggaatgtgaacttcaatgaaaaatgccaaaaatgatttaattgataatattttctaagtcacatatatttattagaatgatacttcttctaagagtacaaaaattagttctcatagtataaacaaatctcacatattacaatagtttgtgattctccaacaactctatccaacaaaatttcattgcttaatatacatctttctcattgggttttcttgtgtatgatatgagaagcacggtattgagttcatgaagataaacaaaatattagcaagatcagtgttacaaacctatggcaaatagatgactgtgattggaggactttttgtccattttttttttgctggatcttaaagtcttatcacaatatgtggctttaacctgcatatctttgggctgtcattgactatcttatggttattgcttatgtttgatcctcagttcttcaggatgttttgtagactttgagaattcaatgcaaatagcttatattatgtgatttatttctactaaagttattcaacacatcaatatttatgtcaagtgctgaaaagaaaaatgtgttggcaatatctggatgaatgctggagctagttaagtttacaaattattttgtcatataaagcaaaattcaaagcttcatatatatactatgagaaaaattttaaaaaattattgattcatatttttagcagttttgaatgattaactatgtaattatattcatattattaatgtgtatttatatagatttttattttgcatatgtaatttcataaaacaaaatttacatgaacaaattacattaaaagttattccacaaatatacttatcaaattaagttaaatgtcaatagcttttaaacttagattttagtttaacatttctgtcattctttactttgaataaaaagagcaaactttatagtttttatctgtgaagtagagatatacatattatacataaatagataagccaaatctgtgttactaaaatttcatgaagatttcaattagaaaaaaataccataaaatgttttgagtgcaggggaaaaataggcaatgatgaaaaaaaatgaaaaacatctgtaaacacatgtagagagtgcataaagaaagcaaaaacagagatagaaagtaaaactagggcatttagaaaatggaaattagtatgttcactatttaagacctacgcacagagcaaagtcttcagaaaacctagaggccaaggttcaaggttacccatctcaagtagcctagcaatattggcaacatcccaatggccctgtccttttctttactgatggccgtgctggtgctcagctacaaatccatctgttctctgggctgtgatctgcctcagacccacagcctgggtaataggagggccttgatactcctggcacaaatgggaagaatctctcctttctc

SEQ ID NO: 41608 - DNA, 2300 bp, Homo sapien
gtagaatattttaattgttcaatgatataaagaatttaaatgaattatttaaaataatgaataataaaatgtgtttggttattttctaaaattgatccatttcataatttctaccttatataaaccggctcattttctacccgtgtcattaaaagattatcacatgatttaaagctgaaatttataaatgatggaaaaatgatgtcacaagtcttcacagttcacatacacattctcgggatttgatccagggaaggaaagctgtaggattatttggggaagagaggctattattccatacttttgggaatagcaaattgtctgactcctataaactgtgtgaattggagagtttgaatttagatatgtgactctgcatttgacaccaggctagttattttctattataacaaagtagaggacagattagagatgaagtcataaatagttaatatagtgctaggcaaaggatgatattatgctgctcttgcaacttgaatccccagatctacatgcacttaaaaaaaactagaatcccagtggttttagcagtaaactaaatgggcattactgactctcagtaaacactgaatggaaatttttgtgattgtctattacaatcccagcaaatatggccatgaggaagcaaaatagcttcattcttgaacactttccagtagaagaaaaaatgagaaactagtaaaaactccacttactaaatagctgatttgctaaaacagacctcattccatttaaggactcagtatctatagggcctacttatgcaaaaaaaaacttcttatgcaaaaaaaaaaaaaacaacaaaaaggtagagccagagttcaggatcactctgaaagttaattctttacatgataatattcaataattataaatttatgaatttacaacaaagatggtcttttttatttgataagaattgacttggataggaacttctgaaaacctttagggaatatgaacttcaatgaaaaatgccaaaaataatttaattcataatattttctaagtcacatatgtttattggaatgacacttcttctaagggtacgaaaattagttctcgtagtgtaaacaaatctgacatattacaatagtttgtgactctccaacaattctatccaacaaaatttcattgcttaatatatatctttctcattgggtttttttgtgtatgatatgagaagcactggtattgagttcatgaagataaacaaaatatttgtaagaccagtgttacaaacctatggcaaatagatgactgtgattggaggactttttgtccattttttgctggatcttaaggtcttatcacaatatgtggctttaacctgcatatctttgggctgccattgactatcttatggttcttacttatgtttgatcctcagttcttcaagatgttttgtagactttgagaattcaatgcaaatagcttatattatatgatttatttctagtaaagttattcaacacatcaatatttatgtcaagtgctgaaaagaaaaaagtgttggcaacatctggatgaatactgcagctggtgaagtttacaaattattttgtcatataaagcaaaattcaaagcttcatacactaagagaaaaattttaaaaaattattcattcatatttttaggagttttgaatgattggatatgtaattatattcatattattaatgtgtatctatatagatttttattttgcatatgtactttgatacaaaatttacatgaacaaattacactaaaagttattccacaaatatacttatcaaattaagttaaatgtcaatagcttttaaacttaaattttagtttaacttttctgtcattctttactttgaataaaaagagcaaactttgtagtttttatctgtgaagtagaggtatacgtaatatacataaatagatatgccaaatctgtgttattaaaatttcatgaagatttcaattagaaaaaaataccataaaagcctttgagtgcaggtgaaaaataggcaatgatgaaaaaaaatgaaaaactttttaaacacatgtagagagtgcataaagaaagcaaaaacagagatagaaagtacaactagggaatttagaaaatggaaattagtatgttcactatttaagacctatgcacagagcaaagtcttcagaaaacctagaggccgaagttcaaggttatccatctcaagtagcctagcaatatttgcaacatcccaatggccctgtccttttctttactgatggccgtgctggtgctcagctacaaatccatctgt

SEQ ID NO: 41609 - DNA, 2300 bp, Homo sapien
cttcatcaacagacttgcaaggactgagaagtaaggatgaagacctggggtctgctttagtctttcttattttcttcctcttcctagctgtgtgtttatttcttcttttctagttccttaacttgtaaagttagttcattggtttgaggtctttcttcttttttaatataagcttttacagctttcaatttcccctttagctctgttttcactgcatcacatacgtcttggtatgttgtgttttcattttcacctctctcaagatattttctaagttcccctctggtcatcttttttttttttgtactatactttaagttccaggttaaatgtgctcaacgtgcaagtttgttacataggtatacatgtgccatgttggtttgctgcacccattaacttgtcatttacattaggtatttctcctcttacatgtttatcacatttagacatacatttgttttctttttgttcccataaattaagatgaaaatcagaccacttttaccttctaggaaaagttaagtgagaaatataaatatatttgctgttgtgaatgccatatagaaccattgtatagtccatttaaaaatgagaataaatgagaaattagtaaaaactccacttactaaatagctgatttgctaaagcagacctcattccatttaaggactcagtatctatagggcctacttatacaaaaaaaaacttcttacacaaaaaaaaaaaaaaaaaagttagagccagagttcaggatcatgctgaaagttatttctttgcataataatattcaatatttataaatttatgaatttagaacaaagatggtcttttttatttgataagaattgacttggataggaacttctgaaaacctttagggaatatgaacttcaatgtaaaatgccaaaaatgatttaaatcatactattttctaagtcatatatgtttattggattgatacttcttttaagggtacaaaaattagttctcgtagtgtaaatgaatctaacatattacaatagtttctgactttccaacaactctatccaacaaaattttattgcttaatatacatatttctcattgggtttttttgtgtatgatatgagaagcactggtattgagttcatgaagataaacaaaatatttgtaagaccaatgttacaaacctatagcaaatagatgactgtgattggaggactttttgtccattttttgctggatcttaaagtcttatcacagtatgtggctttaacctgcatatctttgggctgccattgactatcttatagttattagttatgtttgatcctcagttcttcaggatgtttggtagactttgagaattcaatccaaatagcttacattatatgttttatttctactaaagttattcaatacatcagtacttgtgtcaagtgctgaaaagaaaaaagttttggcaatatctggatgaatactgcagctggtgaatttacaaattattttctcatataaagcaaaattcaaagcttcatacactaagagaaaaattttaaaaaattattgattcatatttttaggagttttgaatgattaggtaggtaactacattcatattattaatgtgtattatatagatttttattttgcatatgtactttgatacaaaatttgcatgaacaaattatactaaaagttattccacaaatatacttatcaaattaaaataaatgtcaatagcttttaaacttagattttagtttaacttttctgtaattcttaactttactttgaataaaaagagcaaactttgtagtttttatctgtgaagtagaggtatacgtaatatacataaatagatatgccaaatctgtgttactaaaatttcatgaagatttcaattaaaaaaaaaccataaaaggctttgagtgcaggtgaaaaataggcaatgatgaaaaaaaatgaaaaactttttaaacacatggagagagtacataaagaaagcaaaaacagagatagaaagtaaaactagggcatttagaaaatggaaattagtatgttcactatttaagacctatgcacagagcaaagtcttcagaaaacctagaggccgaagttcaaggttatccatctcaagtagcctagcaatatttgcaacatcccaatggccctgtccttttctttacttatggccgtgctggtgctcagctacaaatccatctgttctctaggctgtgatctgcctcagacccacagcctgggtaataggagggccttgatactcctgggacaaatgggaagaatctctcctttctcct

SEQ ID NO: 41610 - DNA, 2300 bp, Homo sapien
acctcctctattatggaaacccctgtgcacatttcaaaatgtagaatattttaattgttcaatgatataaagaatttaagtgaatcatttaaaataatgaataataaaatgtgtttggttattttctaaaattggtccatttcataatctctacctttatataaacaggctaattttctactagtgtcatctaaagattatcacgtgatttgaaactgaaatttataaatgatggaaaaatgatgtcacaagtatctaccgttcacatacacattctggggatttgatccagggaaggaaagctgtaggattatttgggggatagaggctattattccctacttttgggaatagtaaattgtctgattcctataaactgtgtgaattggagagtttgaaattagatatgtgactctgtatttgacaccaggctacttattttctattatcacaaaatagaggacagattagagatgaagccataaatagttaacatagtgctagcaaaggatgatattatgctgctcttgcaacttgtatccccagatctacatgaaccttaaaaaaactagaatcccagtggtttaagcagtaaactaaatgggcattattgactctcagtaaaagctgaatggaaacttttgtcattgtctattacaatcccagcaaatatggccatgaggaagcaaaatagcttcattcttgaacactttccagtagaagaaaaaatgagaaactagtaaaaactccacttactaaatagctgatttgctaaagcagacctcattccatttaaagactcagtatctatagggccaaggcaaactaacttcttaggcaaaagaaaaggtagagtcagagttcaggaccactctgaaaattaattctttacatgataatatattctaagtcacatatgtctatgtgatacttctcctaagggttctcgaagtataaactaacctaacacattacaatagttggtgattctctaacaactctgtccaacaaaatttcattgcttaatatacatctctctcattggattttctgctgtatcacatgagaagcactgatattgagttcctgaagatacacaaaatatttgcaagatcagtgttacaaacctatggcaaatagaagactgtgataggaggacattctgtccatttttgcttgatcttaaaatcttatcataatatgtggctttaacctgcacacctttgggctgccattgactatcttatggttattgcttatgtttgatcctcagttcttcaggatgttttgtagactttgagaattcaatgcaaatagcttgtatcatatgatttatttctagtacagttattcaacacatcaatatttatgtcaagtgctgaaaagaaaaaagtgttggcaatatctggatgaatactgcagctagtaaagtttacaaattattttctcatattaagcaaaattcaaagcttcatacactatgagaaaaattttaaaaaattattgattcatatatttagtagttttcaatgattcagtatgtaattacattcatattaacgtgtatttatatagcttttatattgcatatgtaatttgataaaatataatttacattaatgaattacactaaaagttattccagaaatatacttatcaaattaagttatatgtcaacagcttttaaacttagattttagtttaacttttctgtcattcttaactttacattgaataaaaagagcaaactttatagtttttatctgtgaagtagaggtatacgtagtatacataaatagatatgccaaatctgtgttattaaaatttcatgaagattccaattagtaaaaaataccataaaagtctttgagtgcaggggaaaaataggcaatgatgaacaaaatgaaaaacatatgtaaacacatgtagagagtgcataaagaaagcaaaaacagagatagaaagtaaaaccagggcatttagaaaatggaaattagtatgttcactatttaagaactatgcacagagcaaagtcttcagaaaacctagaggccaaggttcaagtttacccatctccagtagcctagcaatatttgcaacatcccaatggccctgtccttttctttactgatggccgtgctggtgctcagctacaaatccatctgttctctgggctgtgatctgcctcagactcacagcctgggtaataggagggccttgatactcctggcacaaatgggaagaatctctcatttctcctgcctgaaggacagatatgatttcggattcccccaggaggt

SEQ ID NO: 41611 - DNA, 2300 bp, Homo sapien
aaacccctgtgcacatttcgtaatgtagaatattttaattgttcaatgatataaagaatttaagtgaatcatttaaaataatgaataataaaatgtgtttggttattttctaaaattgatccatttcataatttctacctcatataaaccagctcattttctaccagtgtcatctaaagattatcacgagatttgaatctgaaatttataaatgatggaaaaatgatgtcacaagtctttacaattcacatacacattcttgggatttgatccagggaaggaaagctgtaggattatttgggggagagaggctattattccatacttttgggaatagtaaattgtctgattcctataaactgtgtgaattggagagtttgaatttagatatgtgactctgtatttgacaccaggctacttattttctattatcacaaagtagaggacagattagagatgaagtcataaatagttaatatagtgctaggcaaaggatgatattatgctgctcttgcaacttgaatccccagatctacatgcactttaaaaaaactggaatcccagtggttttagcagtaaactaaatgggcattattgactctcagtaaaagctgaatggaaatttttgtcattatctattataatcccagcaaatatgtgcatgaggaagcaaaatggcttcattcttgaaccctttccagtagaagaaaaaatgagaaactagtaaaaactccacttactaaatagctgatttgctaaagcagacttcattccatttaagggttcagtatctatagggcctacttatgcaaaaaaaaaaaaaaaagtagagccagagttcaggaccactctgaaagttaattctttgcataataatattcaatatttataaatttatgaatttagaacaaagatggtcttttttatttgataagaattgacttggataggaacttctgaaaatctttagggaatatgaacttcaatgaaaaatgccaaaaatgatttaacttataatatttcctaagtcacatatgtttattggaatgatacttcttcgaagagtacaaaaattagttcttgtagtttatgtaaacaaatctgacatattacaatagtttgtgactctccaacaactctatccaacaaaatttcattgcttaatatacatctttctcattggattttcttgtgtacgatatgagaagcactggtattgagttcatgaaggtaaacaaaatatttgtaagatcagtgttacaaacctatggcaaatagatgactgtgattgaaggactttttgtccattttttgctggatcttaaagtcttatcacagtatgtggctttaacctgcatatatttgggctgccattgactatcttatggttattacttatgtttgatcctcagttcttcaggatgtttggtagactttgagaattcaatgcaaatagcttatgttatatgatttatttctactaaagttattcaacacatatacatttatgtcaagtgctgaaaagaaacaagtgttggcaatatgtggatgaatactgcagctagtgaagtttacaaattattttctcatataaagcaaaattcaaagcttcatacactaagagaaaaattttaaaaaattattgattcttatttttaggagttttgaatgattaggtatgtaattatattcatattattaatgtgtatttatatagatttttattttgcataggtactttgatacaaaatttacatgaacaaattacactaaaagttatttcacaaatatacttatcaagttaagttaaatgtcaatagcttttaaacttagattttagtttaacttttctgtcattctttacgttaaataaaaaaagcaaactttatagtttttatctgtgaagtagaggtatacatagtatacataaatacatatgccaaatctgtgttattaaaacttcatgaagatttcgattacaaaaaaataccataaaagactttgagtgcaggggaaaaataggcaatgatgaaaaacaatgaaaaacattcttaaacacatgtagagagtgcaaaaagaaagcaaaaacagacatagaaagtaaaactagggcatttagaaaatggaaattagtatgttcactatttaaggcctatgcacagagcaaagtcttcagaaaacctagaggccaaagttcaaggttacccatctcaagtagcctagcaacatttgcaacatcccaatggccctgtccttttctttactgatggccgtgctggtgctcagctacaaatccatct

SEQ ID NO: 41612 - DNA, 2300 bp, Homo sapien
ttacccattatgtggataatatactgtagtctttaaaatttgccttttttgtgtataaactctagcggttggtgtgtgtcccatgactctctgtgaaggctgtattcagaaaagcagaaaacacacccttgttcaggaatgattacttttcttctagcccatgcccatttgctgcctttgatctacatccgttctactttcctgcttctgttcttccccattccttaatctccaacttggctgggctgaatgtacgtaagttgctttttgtccttgtttttttcccattaatatattgcttcctttttacatttttatcacatttagatatacatttgttttggggtttcttttgtcccagttctttaggatgcaaaaagtgacaacctttgttttcaataaaaatgaaaatgaaaatgagaaataaaggtttctggtgtcctgcatgtgaaacaattgtacaacacatttatgttatcacatttacatcccattatggacatttaggacaaaaagggtttcctttagtttgataaaaatcaactagaattggaacatctgcaggtcctttggaaatttgaattttagggccaaaaatttgtttaatcaaattaatggctttttcttaactacatatactccttcagtatgatattgctcccaaaagtgtaaaagttatttttgagtgtgttgacaaatcttgggtatttcggtgattggtagcactctaaaactcaactctatctgacaaaaccttattccttagtactttttttccattgggttatcttgtgtatcacatgaaaagtactgacattgagttcatggaagatacacacaaggtatataagatcagcgttacaaacctatgtcaaatgggtgctgtgattggaggaatttctaaggtttactagacatcaaagtcataacatctgaggtggcctctgtatacatatgggctgtcattagccatcttgtgaatgttgcttatgtttaatccttagcatttctgactgtgctgtgggctttcagaattaaatgcaaatactttatattttattatttaattctactaaaggtgctcaatacatcaataattatgtcaagcactgaagagaaaaaaatctatacaatatctggatgaatatctagcagctagtgaagttaaacattttctaacatgacagaaaattaagttagactaaaagtaaatgttaaaaaattaaattttagtagtctttagcagttttaaatgatttttaagtattttataatattaggtattattatgtgtttttataatttgttaatttgctgatggaattggacacattacaatttatataggtaaataaatcattttaaagacacaaacaaattgagttaaatgtccatgggttttaaatttaactattaacttttagcttaaaaatttcatttggtcttctttttttctttctttctttttttttttgagatggagactcgctctgtcacccaggctggagtgcaatgttgcaatcttggctcactgcaaccactgcctcccgggttcaagcaattctcctgctccagccacctgagtagctaggattacaggcacctgccaccatgcccgactaatttttgtatttttagcagagacggggtttcaccatgttggcaagtctggtcttgaactgctgacctcgtgatccatctgccttggtctcccaaagtgctggaattacaagtgtgagccaccgggcccagcccatttggtcattcttaacactatgttaaataaaaagattaaactttacactccttataaatagatatgtacagtatatcaacaaatatatggtatgtctgtgttattaaaatttaatgggactttgaattagaaagaaatttctaaaaagcccatggggcagggaaagatgaggtaatactgaaaataaaagtggttgagaaactgctctacacccatgtagacaggacataaaggaaagccaaaagagaagtagaaaaaaacatgaagacgttcagaaaatggaagctagtatgttccttatttaagacctatgcacagagcaaggtcttcagaaaacctacaacccaaggttcagtgttacccctcatcaaccagcccagcagcatcttcgggattcccaatggcattgccctttgctttaatgatggccctggtggtgctcagctgcaagtcaagctgctctctgggctgtaatctgtctcaaacccacagcctgaataacaggaggactttgatgctcatggcacaaatgaggagaatctct

SEQ ID NO: 41613 - DNA, 2300 bp, Homo sapien
gcttctcctcttccccattcctttatctccttctttactgggatgaatgtaggaaagttgcattttgtcatcctttttttcccagtgagatattgtctctctagaggatattgtcactctagagaaaagggtgttactgactgtgataactgccttgtgagtgagatggtgctggggaaaataaaactaacaaattaacttaggattagaatctcctagcccaagtgaccagaaaagaatcaggattcttttatcacatttagatacacatttgttttctttctatctccattctgtaggatttttaaaatcacatttagatatacatttttctttttgtctccattcttaaggattcaaaaagagacaacctttactttcaatgaaaatgaaaatgagaaagaaagatctctggtatcctgcatgctatgtaaacaattgtacaacccattcatgctatcacatttacattacactatggacatttaggacaaaaatggttttcttcagtttgaggagaatcaactagaattggaacctctgtgggttctttggaaatctgacctttcatgacaaataatatttttaaaatcaaattgatgacatttttctccattgcatatactcattaagtataatattgcttccaagaatgtaaaagttatttcttggggccctctaaagttcaactctgtctgacaaaactttattccttagtatttttttaattgagttcttgttgttgttgtttgtttgtttgcttgctttttgaggcggagtctcgctctgttgccaggctggagtgcagtggggtggtctcggctcactgcaacctccgactccctggttcaagcaattctcctgcctcagcctcccgagtagctgggattacaggcacgtgccaccacgcccagctaatttttgtatttttagtagagacgggctttcaccatgttgtccaggagggtcttgatctcctgaccttgtaatccacccacctcagcctcccaaagtgctgggattacagatgtgagccaccgcgcctggcctaatttggttttcttgtaacatcagaagcattgaccttgagttcatggaagatacacaaaaggtatacaagatcagtgctacaagcatatggcaaatgggtggctgttattggaggactttccaagatttattagatgtcaaagtcatatcatgtgaggtggcctctgtatacatatgagctgtcatttgctgtcttgtgtatgttgcttatatttgatcctgagcatttatgactgtgttttgagttttgaggtttcaataaaaatactttatcttttactatttaattctactaaagttgttcaacacatcaataattatgtcaagcactgaagagaaaaaggtttttgacaatatctagatcaatatctagaagctagtgaattttttaaatttccctatgaagcaaaattgaaagtaccctaaaaataaatgttacaaataatttcaattttaatagtctttagctattttgaatttttaaatatttcattatactaggcaatattatatattttcataatttgttaatttacttatttaatctgacacactacaatttatataagtaaataaatcacattgttacttaaacaaattgaactatgaagttaaatatccataaattgtaaatttaattattaacttttaccttagaattttcatttgctcattcttaatccgggactgaataaattctattttacattctattacgctgcttttaaagcattaaagaagtacaatattctctctcgataatgggtactgtaatgtatatacatcagccaacacatagtatatctgtgttattaaaatttaatgggatttttagttagaaaaaaaatttctaaaaagcatatgtggcagaggaagatgaggtaataatgtaaaaataaataaactgagaaacactcctgtacatctatgtagaaagagcataaaagaaagcaaaaagagaagtagaaagtaacacaaggcattcagaaaatggaaactcgtatgtgacctttttaagatctgtgcacaaaacaaggtcttcagagaagagcccaaggttcagggtcactcaatctcaacagcccagaagcatctgcaacctccccaatggccttgccctttgttttactgatggccctggtggtgctcaactgcaagtcaatctgttctctgggctgtgatctgcctcagacccacagcctgagtaacaggaggactttgatgataatggcacaaatgggaagaatctc

SEQ ID NO: 41614 - DNA, 2300 bp, Homo sapien
aaattagctgggcatggtggcgcgcacctgtagtcccagctactcgggacgctaaggcaggagaattgcttgaccctgggaggcggaggttgcagtgagccgagatcgcaccactgtactccagcctgggtgacagagcgagactccgtcaaaacaaaacaaaacaaaacaaacaaacaaaatatacataaagtgaacactttttaatgtaattagcacagtgttaaaagtgaacatttcatacaagcaaaaatactgaatacaataaatgtagtagaatcaataattaagtacatgggtaaattaataatatcatccatggtgagctaatgcccctaagaactggatgctttatcatacagttgcttgacattaccaacaagtattgtgacaaatttgattcaatcatttcattatgcaggcagaaaagatagtcttttaaaataactaaacatatgggaatataatgaagagtgtctatagtaatcatttcatgaagacacaagtctgttcctaagctattaatcttacttgcaagtttgatgaaaaaaagaaggatctcatgatttcttgctccaacttcccatgtacagaggctctcttctttcttttccagatagagactgattccttggaagtagctcttcacagcattagggagttgtcatggcctgagagagcccttccacccctaactcattcaacaagcagggctccaggacttcccaatgctgataaaaattcagtgaataatttctccaggccagtttcattccaaccaacctcttgtgttgaataaggtgacaatctgctggagcaccttgtggaggacagtggtagtctaagccttctgaattttgctgccatcccttggaaacaatagaaaacattcaaaacagatgaactgcccatcaacagggcactggttaaataacttatgatgtaacaactcagaaggcaacaacagaattgtttaaaaatataaataagccctctacactaattcaggaagatcttgaagtgaaaaaaaaagatgcagaacagtgtacatggtatgctatcttttacataaaaacgaggcgagtgtaagaaaaacatgactacattcttactttgcatatgcataaagaactagaaggatttaaaagacagaaacttcaaaatttggaaaatggaagaaattgtgtcaaagtatacatttatttgtatgtcaaaatttaaatttaccactaattaaagaaatgcaagttaataaaatactcacaaagggaaaagtcagaagaagggaaagacacaaacattgttggtgataatattttggaaatattgtcttggatcagtattttactaaatattatccataacagggctaaaattttgctaccagattgtataagtttactaccgagtctataaaacaatggaggataagaaggtacacattcaggaacaaaccaatgggcaaaggaaactatagtatgtatagttattggaaaattatgtagccatttttaaaattgtggaaaacaaaggcatttcaagccaaaaatttagaatatatcatttacataataaagtaacaatctagtaaagacaaatattttgcgtttgaaattgtaacaaatttgaaaatatgaaccaaaattgtaactgaagtatctactacataatgtgggataacaattattgttttgtagaggaaaaaaaaaattaagcatccaggtttcctctcaatttatacaaatgccgcatttcactgttattcaaaaaaacagaagctaggaagcgtaaagctttgaaaaattatgcatttggggaacgtaagagctcagatatgcgaaaaacttatatcaaacgtgcagcataacacacttgcttgcacacattctgtcctatttggtcccacatacaaggcagctctaagaggccgggctggcgcccaccccacacagctccgcttccccaaccctcgccctcccgcctcccgggtacttcctcccccttccccacccccaccctcccgctgactgacgaggtctggaggccgcgcagccgcagtagccgctaaggccgctcccaccccgtggtatcctgggactaggcttttccggaaggagcggctcggtgttggggctaggccggtattctaggcccaagcccaggcccaggcctgtgttcccggcccttgctcaaagacaggccggtggccgctgcgacactctaggtacagcggagggcgcagcgggccgttcgctgaggtgtccggacccgccgccgagcgggccgtggagccacagtac

SEQ ID NO: 41615 - DNA, 2300 bp, Homo sapien
agatctctgggtgatggaaaaatgaagtcccaacaatttatagttcacacacacattctgggaagttggccttattaaacaacggcaggaaagttagaagattgatgacttggggatcacaggggtactacccacaaaatgtagtgtaatttgttgtctgattgctgtaagctgtgtgaatcagggagagtttgagtttggacatttggctcgatattatgacaccaggctggttaatttatattataaaatgtagagggcaatttagacatgaggtcataatatagtttaatatagtgctacgcaaaggctgaaaattatgttgtgcttgcatttgaattcccagtgccgtatataccttaaaggaattagatatccagtgggtttggcaatacattctataatcattattgacacttagtaagagtagagtggaaatattagccattgtctgttataatcctaacaaatatggccatgatggaaacaaaatagcttggtcacccatgaatgccttctagtataaagagaaagtatgataaattgcttcagcaaaaactatttcttgaataagtacactaggcctggtactgaggataatgcagtcaacagaacagagtccagttactaaagagatgatttgccaaagatgattccatacttaccattttaagagagggaatctataggtctgaggcaacttaacttgctatgaaaaaaaaaaatcccagcgctcaggattggagttgtaagttaatgcttaacatgataatatttatccagttatgaatttaggacaaagatggtttctctttgtttaatagaattgacttggtttagaaactataaatatatgttgaggaatttgaactttaatgcaaaaatacaaaaaaaataaaattgatgatattttcaaagttgtgtatttctattggagatggtattgcccccaaggttgtagaaattagttcttgggggtgtgaacaactctcagatattacaatagtttgtggtcctccaaagctcaattcttacataatcttattctctagtgttcactttccttattgaattttcttgtgtatcgcacaagacatactgacattgaattcagtagaaacagacaaaatacatgcacaatcagtgttataaatctatggcgaatagatggcttactggaggactttctttccatcatttgctgtgattgcctttcttccagatgttgcttatgtttgagcttcagggattctgagtattaggtagactttgagaattaaatacaaatcatgtatatgttattatttaattctactaaatattttcaacacatcaacagttaatgtcaaatgctgaaaagaataaaatgctgacactctggatgaatatgtagcagctagtgaaattaaaaattagtttattttttaaagcaaaattaaaagttaagtacactaaaaatcaaacttaagaaaacaatttcattttttacctttaagaaacttatgcatgtcatcatgtttgtattattatgtatattactaatacattcttaatttgcaaatttgtttgagataatttatataaacaaatagagtgaattaaaagttgctgctcagagttaagttaaatgtcaaatttttaaaaatttaacttttagttaaattactttgccattcctaacagatcaagaaataataaaagtaaactttatgctttttcttttagtgtgcaaagtagacatacatacagtacataaggagatatacaatatatttgttattaaaatttaataaaaatttaatttcaattaagaaaaaaatttcttaaaagactctggaggcaggcaagagaagggagtgtcaataatgaccacatacacacacaaacacacacacaaaactggttgaaaaactactctatacccatgtagagagtaaataaatgaaagcaaaatcagacgtagaaagtaaattctgaaaatggaaactagtatgttccctatttaagacctacacataaagcaaggtcttcagagaacctagagctgaaggttcagagtcacccatctcaacaagtccaacagcatctgcaacatctacaatggctttgccttttgctttactgatggccctggtggtgctcagctgcaagtcaagctgctctctggactgtgatctgcctcagacccacagcctgggtcacaggaggaccatgatgctcctggcacaaatgaggagaatctctcttttctcctgtctgaaggacagacatgacttcagatttccccaggaggagtttga

SEQ ID NO: 41616 - DNA, 2300 bp, Homo sapien
accacaccagactaattttgtatttttagtagagacggtgtttcaaaatgttagtcaggctagtctcaaactcctgacctcaggtgatctgcccagctcggcctcccaaagtgctgggattacaggcgtaagccaccgcacccggcctgatatttcatttctcttattaacattatctttattatataactctattaaaagttagggaagtgtcctctgaaattatcaattctcttgtttcttactagaaatataagaagaaaaaaactgaccttctaagtttacttatccaatagtggagagcttggtgcaatgaacactgacccattttccagagagaatattgtactctcaaaaatttctctttcttgtgtataaactcttgcagttggtatatttgcaagatggggttcggtaaatctgaaaacacactgtggaccaggagtaattacttttcttccagcccatacttacgtgttaccttgacctacatcccttctactattttgcttctgttctttcccaccccttaacctccactatgttggtcaggctggtctcaaactcccaacctcagatgatccgtctgcctcggcctctcaaagtgctggcattacacatgtgagccacgacgcccggccacttgtgttatctttttgttcccattagttaggatgcaaaaagtgacaacttttgctttctatgaaaatgaaatgagaaagaaagatatctggtgtctggcatgctatgtaaaacaattgtctacttatttatgttattatatttacatcctattatgcgcatctaggacaaagatagtttcctttagtttgctaggaatcagcaaagaacctctgaaggcaccttggaaatttgaactttcatgcaaaaaatttttaatcaaatcgaggatgttttttcaattgtgtattctcattgcatatgatactactcccaaggatgtagaagttagttcttgggagtgggaacaaatcttacatatttaaatggtttgtggcccttcaaagctcaacctatttaacaaaatcttattccttagtttttttttttttctctccattgggttttcttgtgtatcacatgagaagcactgacattgagttcatggaagatacacaaaaggtataaaagttcagcattacaaacctatggcaaatgggtagctgtgattggagtactttccaagatgtattagatctcaaagtcatatcatgagaggtgtcctctgcatacatatggtttgtcactggccatcttatagatattgcttatgtttgatccttagcatttctgtctgtgttgtgggctttgaaatgaaatataaataatttatattttaacaattctactgaagttgttcaacacatctatatttaggtcaagaattgaagaaaaaattcttcacactctctaggtgagtatctagcagctagtgaagttaaaaattttctcacatgcaacaaaattaaaagttaagtataataaaaataaatgataaaaatattttaaattattaagtctttatcagtttcaaataattcataaacattcattacttagctgtataatgtttatctagaaacattagataatgtttataatttgttaaatttcttatgtaatttaatacattacaatttatatcagtaaataaactatattgaagcccacaagcaaatttagttataaagttaagttaaatttgaatagcgtttaaatttaacttttatcttaaaattttcatttggttatttttaaacttgcattgaataaaatgattaaactttgtactttttgagtatagagatatacatatagtacacaaatagatagatattatatctgtgttattaaattttcacggtgggttcaattaggaaaaaaaatctaaaaagtctctgggaacaagatgggggagacaataatgaaaaacaaaatggttgagaaacacggctctaaactcatgtaaagagttcaagaaggaaagcaaaaacagaaatggaaagtggtccagaagcattaagaaagtggaaatcagtatgttccctatttaaggcatctgcaggaagcaaagccttcagagaacctagagcccaaggttcagagtcacccatctcagcaagcccagaagcatctgcaatatctatgatggcctcgccctttgctttactgatggccctggtggtgctcagctgcaagtcaagctgctctctgggctgtgatctccctgagacccacagcctggataacaggaggaccttgatgctcctggcacaaat

SEQ ID NO: 41617 - DNA, 2300 bp, Homo sapien
gtcattatatagtgataaaggggtccatttagcaagagcatttaacaattctaaatatatattcacccaatactggagtactcaggtatataaagcaaatattattagagccaaagagagagatagacagacccccatacaataataactggagacttcaacaccccactttcagcattggacagatcatccagacagaaaattaacaaacatcaaatttcatctgcaccataggccaaatggacctagtagatatttacagaacatttgatccaacagctgtagaatacacattcttctcctcagcacatggataattctcaaggatataccaaatgctaggtcacaaaacaaatcttaaaatttagaaaaaaagtgaaataatatcaaacgttttctctcaccacagactaagaaaaaaagaagtcccaaataaatacaatctgagataaaaaaggagacatgacaaccaataccacaaaaaattaaaggatcattagaagatactatgaaactatatgctaataaattggaaaacctgaacaaaatagataattcctagaaacatacaacatactggtctgttcaggttttgtattttttcatagtaccatgaagaaatacaagaattgtttctagaaccattcttgtatttcttcatggtttttgtatttcttcatggaaccatgaagaaatacaaaatgtgaacaggccaataacaagtaatgagacagaagccatactaaaaagtatcccagaaaagaactcaggatctgatggcttcactgatgaattttgccaaatatttaaaaaactaataccaatccaactcaaattattaaaaaaatagaggtggacagaatctttccaaatgtattctatgaggccagtgttttttctgattgaatctcccattatattttaatcacatataaaaccagagaaagacacattaaaaagaaagaaaactgtaggccaatatctctgatgaacattgatgcagaaatcctcaacaacaaattagcaaactgaattcaagaacacattaaaacaatcattcatcatgaccaagtggaatttgtcctagagattcaagtgtggttaggtatgtgcagatcaatgggtttaatgttgtccaatgaacataatgtcctccagctccatccatgttcttgcaaatgacaggatctcattcttttttatggctaagtagtactccattgtgtataagtgccatattttctttatccattcatctgttagacacctaagttgcttccaaatcttagctattgtgaatagtgctgcaataaacatgggagtgtaaatattttgttgacatactgatttcatttcctttggataaatacccagtagtgggattgctggatcatatgggggaaaatggagatggctaacgggcacaaaaatatagttagaaaaaatgaatatgatttagtattcgatagcacaataggatgactactgttaatgataatttattatatattataaaataactaaaatagtataaatgggatgtatgtagcagagagaaatgataaatgtttgaagcattggatactccattcaccctgctgtgattattatgaattgtctgcctatataaaaatatttcacttattccataaacacagacgcctcttatgtacccacaaaaatctattttcaaaaaagttgctctaagaatatagttatcaagttaagtaaaatgtcaatagccttttaatttaatttttaattgttttatcattctttgcaataataaaacattaactttatactttttaatttaatgtatagaatagagatatacataggatatgtaaatagatacacagtgtatatgtgattaaaatataatgggagattcaatcagaaaaaagtttctaaaaaggctctggggtaaaagaggaaggaaacaataatgaaaaaaatgtggtgagaaaaacagctgaaaacccatgtaaagagtgcataaagaaagcaaaaagagaagtagaaagtaacacaggggcatttggaaaatgtaaacgagtatgttccctatttaaggctaggcacaaagcaaggtcttcagagaacctggagcctaaggtttaggctcacccatttcaaccagtctagcagcatctgcaacatctacaatggccttgacctttgctttactggtggccctcctggtgctcagctgcaagtcaagctgctctgtgggctgtgatctgcctcaaacccacagcctgggtagcaggaggaccttgatgctcctggcacagatg

SEQ ID NO: 41618 - DNA, 2300 bp, Homo sapien
cctcttccatcttctcctccctacttaattctagccatgctggcagctgattagatggtgcccacagtgactgagtgtgggtctgcctctcgcagttcactgactcaaattttaatctcctttggcaataccctcacagacacacctaggaacaacactttgcatccttcaattcaatcaggataacactcaatgttaaccatcacaacagataacatgcaatatactgatcttctgagtttatctgtctactagtggagaacttgagataattatacttgtccattctacagacagaatattgtgctcttacaaatttgcctttctggtgcacagtgtcttatgtttggttcatcaccctcaactgtctagtaaggctgaattcactaaagctgaaaacatccccttggaccagtaatgattacttttctttgagctcctgcccatttgctacctttgttctacatctcttgcaccattttgcttctgctcttcctcaccccttaatgtccatctaatctgggctgaatatccaagttatattttgttagttgtttttctcctttgggatgttacttccattcttatgtttttatcacatttagttatacatttgttttctttttgctctcatttattgggatacaaaaagcaacaacttttgctttctgtgaaaaaggaaatgagaaagatatctggtatcctgcatgctatgtacaacaattgcacacctcatttactttatcatacttagatattattatttaccttaggaaacagatggctttttttattttataagaatgaactagaattgggatgtccccaggttctttgggaaatctaaacattaatgcaaaaattgttttgaaaaatataattgatgttttctcaattgtgtattctcattggggatgatattgctcctaagggcacaaaccttagttcttgtggtgtgaacaaattgtagatattatattcgtttatggcccctcaatgcagaactctaagacaaccctatcctgtagtgtttattttctttcacttggttttcttatgtattacatgaaaagactgatattgagttcatggaagatacacaaaatgtatgtgagattagtgttgcaaaccaatgtgaaatagatggttgtcactggtggactttccactatgtgctcaatctcagagtcataccatgtgatgtggtctccatcggcatatgaatgggctgccattggctgtcttgggtatgtagcttatgtttgatcctcagtgctttcaagtgtattatactcttttatacaaatgtttttattttatgattaaattgtataaaactttttcaaacatcactacttataggaagtgctgaaaagaaaaatatgttgactatatctggatgaaaatctagcagttagtgaaggtaaaaatcattttctatatgaagcaaagctaaaagttaagtataataaattaaatgttacaggaataatttaattttaaatagccccttagcagttttgggagatttttaagtatttttatttttttgatattacatattttatataagtatttttattatattggtattatatattttcatatattataactttgcatgtttcacttgattcattaatatttatataagtatatatactagaagtcactcagcaaataacttttataaagttaaatgccaatagcttttaaatttaacttttgacataaaatttttacttattcttaatgctgcattgcataaaaaagtaaactgtccactttgttttctaaagcatggataggaatgtagtacattcaaatatgtgcataatatatctgtgttattaaattatcaggaggggtttacttagaaaaaaattatcaaacaggactctggaggttgagaaagggaatgcagtaatgaaaagaaaactggttgagaaacactttcctaagcccatgtagagagtacataaaggaaagcaaaaacagaagtagaaaaaaaaaatgcagtagcattcagaaaatggaaacaaatatgttccctatataaggcggtgtacaaaccaaagtcttcagagacccaggttaagggtcatccatctgaaccagctcagcagcatccacaacatctacaatggccttgactttttatttactggtggccctagtggtgctcagctacaagtcattcagctctctgggctgtgatctgcctcagactcacagcctgggtaacaggagggccttgatactcctggcacaaatgcgaagaatctctcctttctcctgcc

SEQ ID NO: 41619 - DNA, 2300 bp, Homo sapien
atgtctggtgtgacatttcactaacccatttaagtgcacaggcctccaaatatctacctaatgagtatgatggtttgggcattttacacttaaaatcactggcctcatgtcaactgaagcctgactggccagtgtctcaaagtcacagatgatgacctgatccctcaggaacagatggtgtttcagctttgtgggagtgactgtcaaggtatggagcacttaggtggtctttgaaacctgtcaggtttcacatctctgctttgagtgaaaagctcatcacccacagtagtgaggaatgtgcctatacttgctggggctgatctgttgaaactttatgtgtagacaatggaaacatccaggagcatttctgctttcatgtagcctcttaataattgatgtccctgaagtcctgtgtcctcagggacagttcctctgattcctggattgtaccagctttcatgatgttaaatctaatctgtaaaactctgagcattaatctccatgaaaataagaccttgttctttctcatttaaatgccccttttttttcttgtctaatattctgagtaggatttccagtactgtgttgaaagaagtagtgagagtgggcatccttatcttataataaatctcagaaaaaagattccaacatttcaccactgactatagtgttagctaatggcttatcttatagctaataaggaatgtgtctctttattctgaggtatattctttatatacctaatttgttataaattgtattagagatggattttaaattttgtcaaaataattttaggcatgcataaaaatagttatgatttttaatcttttattgtgtaaataaggagtatggcatttattgattccaacatattaaaatattcttgcatcccaggaataaatcaagcttgatcataataaatgatccttttatagtgcttttgaatttcatttgcaactactttgtggatgattttgcatctgtgttcatcaggaatattggctgtaatttttttttttcttgtaatgtccatctctggcttaggtatcaaggtaatgctggcttcataaaatgagtttgggagtattcctccttaattttttcaaagatttggttctgtttaaatgtttggtgaaattcaggagtaatcagatctaaaaaaacgtaagaacactaaaaataaatgataaaaatattttaaagttttaagtgtttatcactttcaaataatttttaagtattcattacttagaaaatgtttatctataaacattagaaaatgtttataatttgttaatttgcttatgtaatttgatacactacaatttatttgtttgtttgttttttgaaacagagtctcactctgacacccaggctggagtgcagtggcacaatctcggctcactgcaacctccacctcatgagttcaaggaattccctgcctcggcctcctgagtagctgggattacaggtgcacacaaccatgcctagctaattttttttttgttttttttttgtttttttcgttgagatggggtttcaccgtcttggccaggctggtcttgaactcctgacctcgtgatccacccacctcggactcccaaagtgctgggattacaggcgtgagccacctcgccaggcctacagtacaatttatatcagtaaataaattacgttgaagtccataagcaaatttagttataaagttaagaaaaatttgaatagattttaaatttaacttttagcttaaatttttcatttggttatttttaaacctgcattgaatacaaagattaaactttgtactttttgattatagagatatacatatagtatataaatagatacatattgtatctgtgttattaaattttcacggtgggttcaattaggaaaaagatatctaaaaagtctctgggaacaagatggggaagacaataatgaaaaacaaaacatttgagaaacacggctctaaactcatgtaaagagtgcatgaaggaaagcaaaaacagaaatggaaagtggcccagaagcattaagaaagtggaaatcagtatgttccctatttaaggcatttgcaggaagcaaggccttcagagaacctagagcccaaggttcagagtcacccatctcagcaagcccagaagtatctgcaatatctacgatggcctcgccctttgctttactgatggtcctggtggtgctcagctgcaagtcaagctgctctctgggctgtgatctccctgagacccacagcctggataacaggaggaccttgatgctcctggcacaaatga

SEQ ID NO: 41620 - DNA, 2300 bp, Homo sapien
taaaagttagtagtaaatgtaaaaacttaggaacgaagcatactccagttcagtttaattaatgcaaatgagtaatggctgctactttagacttggtttgaaagggaagagtaggaaccgaataggatcctgaaagtgagacagtcacctgcaatagtgaagaagggtaaggaagcagaggctgtcaatcagaagcaagtctttgctgacttcacattgcagccaggggttgatctgtttaccttcaaattcacacaaaggtagtgaagtggaggaaggagaaataccacaaggaactgcaaatataagttacttttcttctcatggtctagaaaattttttgttgttctttaaaccaggaagtttttggaaccaaatccttcatttaacacattatccaattttcaaattgaccttaccaagtgccttctgtaattatttttttctcaagtgagaacaagactgtaaaggtgaaataacatgctcaaagtaatgtagcaagccacagagcttgcagataccagagcaaagatcttatcccaagtcagcctgactcaaaagcctgcactgtgttgttgacaactcaaacctgaatagcattgtgaaatatcactgcaaaataataataacaataataataattttctcctagctttctttattcaagtttacaatggtctctgaagtcttgaattaaagaaaagatattttcctttctcttgacattgcttccttaagaactgagaacagaatggaggaactgtcaaatggaaacgtttagaaaataatactcatatttagaagtttaaactaatactttatatactaatgttttcccaaacatttaggtttattaagttgatatcctgttgtataaccacctcaatgcctagcacaaaataaaaaattgttacttctaaatatgtgtgcccttttaaaactccaaaaccagagttctaaacttgggaatattgggaaggagagacgtattaaaagattggactcctggcttagtagcacatggaaaggcttggagtatgggtaggttcatttgtatttgcaggctgagttatatttttgttacatctatatgtattgagctaaacaaatcattaaatccaaaagcaggttacaaaataataacagcatcatcatattttctacaaataaaacattcatgaaaagtatatgaaaagaaatgcatgaaaatgttcatagtactactgtctttgggatagaatttacattcacttaaactttttggattaaatatttctcccatgaataaggattccttttagaaccaggaaaaaaaaattattatatttttgaaatttaaaaaaagaacaggctgggtgcagtagctcatgcctgtaatcccagcacttcgggaggccaaggcaggcagattgcttgagcccaggagtgtgagatcagcctaagcaacatggtgagatcccatctctactttaaaaattaaaaacaactcttgtaaagggcacctgctgtaagttaagtcccacctctaacatgaatcagaatcacctggaggatttgttaaaaccctgattgcatggtcccatcccactgtttctgattcaataggtctgtggtatggcctgagtaattccatttctaacagttctcacatgatgctgttgctgctggtcttgtgactacacgtagtaagccgtacccctacttcttgatagccttggtaagtttttaagagatgaaggcatagtttttttaaggctactgatctcatatttcttatgacatctggagaaaagttagcaccctagataggagttagttgatgaagatatattttttttctatcactgccttttcacagcagcaaatcagacattttccttattaaagaagctgtatgtagcaactgtcatatcctaggtgcaccccatgacaatatctgccttttaaggaaaatggactaaagcaagttttgttttgttttgttttctctaaggtttctggtcctcataccgtgtggttgagtgaaatcaaaacttccacgatagcaatgctgattggacaaagaatgtgttgtggacacaaaaccaaactctggaggacagaggattcattccaaggtgaaaaatggcaaacttatccagtgatctcctctatagagaagtataaatgtttggtaaatagagttgggggccatttgtggaattgcctttggctaaagtcatttagcccaagttttctactcctccctagggtctgcttgtattcaatgactggtctacgtgggggtgtgaagtcccctt

SEQ ID NO: 41621 - DNA, 2300 bp, Homo sapien
aaaatgggcaatagaaaacaacaacaaaaattcaatccaaaagaaggaaggaaaagcttaaaagtgagaaaaagaacatatgggcagttagaaaacaaacaataaagtggtagatataaactgagccatactgacaattacattaaatttaatgacctaaacactctaataaagcaaagattgtcagacagaataaaatacaaggtccaactatacgctctgtacaagaaactcactttaatataataacatgaataagttaaattaaaagatgcaataaaagacatattatgctaacactaattaaaaaaacagaaatgattatcagagaaagttgatttaggagtaaggaataatgcaaaggatacagaggaacattttaaaataaaggggtcaattcatcaagacgacataataatcctaaatatgatgcacctaatactaaagttctaaaatatataaggcaaaaactgatagaactgaaatgggagataggcaaatctaaaattatactagggatttcagctcttctgtcttgatagttgatagaacaaatagaccatcagaaaggatacagaaaatttcaaacactttcaatcagcttaacctatttgacatttataaaacagtccaaccaacaaaagtagaacattattatttcaagttcacaaggaactgtcaccaagataaaccatattctaagccataaaataagtctcaataaatttaaactacattctttaaccacaacagattcaaatatgaaatcagtaacagaaaggcatctggaaaatccctgatcatttggaaattaaacaacatttagatcatttttgtcaattgaatgaaaatgatgagaaagccttatagatcagagctcgttgttattagatggagtaacttctgatattcttaatttatttttatattgttttcccgaagctcagcattaaatatttaaagattttttgagactagtcaaaattctactttccagatagattgagcataatgttatgaaacaagtgttattcctttcgtatattatatattatcatatgtcttttctctctctttctctttctctctctctctctctctctctctctctctcagatagggagggaaaagaccctctgtggagcatgctgactgagtttatttcaacttattaatactagactaagtgaccaaacatacagctgagctggtatataatgagaccatacatgtttacagagtgcctgtttttgacatttagggattcacccagctgcctgcagagaaatgattaaagataagactcaacatcttgtattactttgtgtagaacatattaatttattccaagtcaacacatatttattaagcaactactatagttgtatagacagcaaagaaatcagtaatcagtgtttatttcacactctgaagagacttttaatcatgtaagtacatagtcaagtataagacagaacaagaaaggtgtcttaaataaggtaggtacaaagtgttgtggggatccagaagattatggctccttgggggagatctgggccttaaaggacaagtagtctttagtccttgcacagaaaggttcttgaggtaaaggaggcaacagttgatgtttcagagaaagcatcatcaataaacacacacacacacaagtgctagctgtattaagggaatactaaatcacttactttatctggagttcagattccttcacactatatttagagcaacagtgggataagattggaaaggtatattgggggcttattcaagaggaacttagaatatggaactgggtatttgtaattcaaaggacattgttaatgtagagatgttcacattagtttaccagagctatcactattctagggaatatacgctaaccaaatgcccccaatctctcttcacatataattttgtcatctataatggatatatatcatttaattatatggctgtaccaacatatatgtaatcattcacctgtcgttgaacctataggttgtttctaatattctgctttgcaataatattataacactcttcttttgctaatttttttgcattgcttctataggctagaatcttagatattaaactgataggataagatataaaataatttaagattgctgatatatgttttaaaattaattatttgctcaagcatttgtgacaatttacagttctaattgaggttttaaatttagtagtttgtaggtattttaagttttgcccctgaattctttataggtgctgataagcctttggtaagttttactcca

SEQ ID NO: 41622 - DNA, 2300 bp, Homo sapien
ttttctataatattattttgggcttctgtataaaagcttaaaaatatgttccacgaatgagatgcttatgcttgtttattcaatatttttttctgttggactttggacaaagtcttgcctagtgggattcacatataaggaaagcttttttttcttgttactcacagaattacgatgtttaaaatagctatttgagttcaatgatactatactttccataataaatttagagtacttttttcacttcaaagaatgcttttgagttttccatgaataggtttcactaactacatttttaaaaagaccttagctctgaggtttatcctcttttacatcttaaggtacatttttcatgatttctaaaatatttgctttttaaaaatactaggactgttaattttaaaaattcatttttcaaaattttcagaaattttaatattaagaatctgtttaattttttttatttcttggtcaaggcagtcatatggtttgagatttctcagttctttaaaatgggagttcataaattcaacctgttctaagctaactgtagtgattcctagctgtcgtttacttaacactattaaccattaaacactactgacatctcaactcaaaacatacacttaggtataggaaatagtatacaaacattttatttaaccatatcgtatgcagaaaatttaaaatttgaatctttcttatagtccttggactcaaatcttcatgcaaatacaatttatataatcaattatatttgacttgtgttttttaaagtggctaaggaaatgagtaccaacttattagggaatatttgatgaatatttttcgttttggttgaacaaatgactacgtagagttatatttacttcaaaatcaataaaataccactattaaccttgctctgacgctcccacccccacccttcaactcgtagaatattttttggtggtaactagactgacctttgccaaaatgtaattacattcagagagaaatacaattttccccttcaaatccaggtgaaaggctaccatgctgggcttgcggagggcatagttgagtaggacagccagaacttctggctaggtcatcgggtcggattaccctgccatgtacccctcagtatttacttccagagatgggcaacttactatagtcttcatgtttaaggaattcaaacccaaatgaaaagtgttgtgaaagcataaatatctctgcttgtatactacagtactgaatatgaaaccacatattgcaataaaaataactaacgatggcccatgcatttcacaaggcgctctcatacacctgaaggggcagtggaaaggttcagagcacccaggctgtcccaaagagggcggaatcaaatctgggcgcaggtgggtacccggaaaaaattcttggtggagatggcatctgagagaggcgtcgaaggacacggagggttgaggataggagagaggccactccagatggaaaaacaccctcgttttccaaatgccagttataccacggggcctgtgatagccgccacgtttctagaagacccctagaagagcaggggtccgaccaaggaagtacttccgctgttcaatttgctaagtttgcattcggagagtacaagggcgagctctggctcttgcaggtggactccctctcccttagctctgactgcgagaagctcccacccgcaaagggctactgtgccaaaagcgagcgtagtggccgccgcttcccccacaaaattccgtcactcgggagctgcgttgcagtggagaaacctgggtcccgtccgggcccaagggaggaggctcagcacggccgctcccgcagccccgtccaggcgcctcttccctccccctcctttccgcggcggtcgcggcggcggctggagcgggagccgggggcggcgaggggcggagccggggcggagccacggcgctggcggccccggcggcggcggcaggtgtggatggggcgaaggtgcgggaacgtccactcccgcgcgcccctctcggggaccagggcggcctcccaggaggagcttggtgagcagctgcgacctgtgcataacttggggcgccgccaggggctcgcaggttccacgtccggcgcctggagaaggaagacgcgcgtccccggccgcggcgccgaagccggctgggggaccgcctggtcccgggccagagctgggaggcggtgttccgtgagccgcctggtctggggtgcggggggcgggaagcggccccttcgtgtgcgcttgggcgaggccgggcggcgcttctgtcctcctactc

SEQ ID NO: 41623 - DNA, 2300 bp, Homo sapien
agttgaagtctaaaagatactatgggcttaagacactttttgtttatttgctatttgaggtgaattattccttctttgcttctttgctattcataatattatgatatataattttggctatgcaattgtgtaatcttttctataatattattttgggcttctgtataaaagcttaaaaatatgttccacgaatgagatgcttatgcttgtttattcaatatttttttctgttggactttggacaaagtcttgcctagtgggattcacatataaggaaagcttttttttcttgttactcacagaattacgatgtttaaaatagctatttgagttcaatgatactatactttccataataaatttagagtacttttttcacttcaaagaatgcttttgagttttccatgaataggtttcactaactacatttttaaaaagaccttagctctgaggtttatcctcttttacatcttaaggtacatttttcatgatttctaaaatatttgctttttaaaaatactaggactgttaattttaaaaattcatttttcaaaattttcagaaattttaatattaagaatctgtttaattttttttatttcttggtcaaggcagtcatatggtttgagatttctcagttctttaaaatgggagttcataaattcaacctgttctaagctaactgtagtgattcctagctgtcgtttacttaacactattaaccattaaacactactgacatctcaactcaaaacatacacttaggtataggaaatagtatacaaacattttatttaaccatatcgtatgcagaaaatttaaaatttgaatctttcttatagtccttggactcaaatcttcatgcaaatacaatttatataatcaattatatttgacttgtgttttttaaagtggctaaggaaatgagtaccaacttattagggaatatttgatgaatatttttcgttttggttgaacaaatgactacgtagagttatatttacttcaaaatcaataaaataccactattaaccttgctctgacgctcccacccccacccttcaactcgtagaatattttttggtggtaactagactgacctttgccaaaatgtaattacattcagagagaaatacaattttccccttcaaatccaggtgaaaggctaccatgctgggcttgcggagggcatagttgagtaggacagccagaacttctggctaggtcatcgggtcggattaccctgccatgtacccctcagtatttacttccagagatgggcaacttactatagtcttcatgtttaaggaattcaaacccaaatgaaaagtgttgtgaaagcataaatatctctgcttgtatactacagtactgaatatgaaaccacatattgcaataaaaataactaacgatggcccatgcatttcacaaggcgctctcatacacctgaaggggcagtggaaaggttcagagcacccaggctgtcccaaagagggcggaatcaaatctgggcgcaggtgggtacccggaaaaaattcttggtggagatggcatctgagagaggcgtcgaaggacacggagggttgaggataggagagaggccactccagatggaaaaacaccctcgttttccaaatgccagttataccacggggcctgtgatagccgccacgtttctagaagacccctagaagagcaggggtccgaccaaggaagtacttccgctgttcaatttgctaagtttgcattcggagagtacaagggcgagctctggctcttgcaggtggactccctctcccttagctctgactgcgagaagctcccacccgcaaagggctactgtgccaaaagcgagcgtagtggccgccgcttcccccacaaaattccgtcactcgggagctgcgttgcagtggagaaacctgggtcccgtccgggcccaagggaggaggctcagcacggccgctcccgcagccccgtccaggcgcctcttccctccccctcctttccgcggcggtcgcggcggcggctggagcgggagccgggggcggcgaggggcggagccggggcggagccacggcgctggcggccccggcggcggcggcaggtgtggatggggcgaaggtgcgggaacgtccactcccgcgcgcccctctcggggaccagggcggcctcccaggaggagcttggtgagcagctgcgacctgtgcataacttggggcgccgccaggggctcgcaggttccacgtccggcgcctggagaaggaagacgcgcgtccccggccgcggcgccgaagccggct

SEQ ID NO: 41624 - DNA, 2300 bp, Homo sapien
aaaagggagaccactgaaaatttttgcgtattcaaaattattgaaaattttgtcttccttttattttagggcttgttaagaaaaaacatgacccaaaatttggaaataaggcaaaaatattactgcctaccttttcaaagatactgcactaaagaaagcactgtcccacaggactgcccaagggttatccaagtctgggtagcaaggggtcgtctgattcaggcactaccctgagcggaaaacaatggcccaagacctcgaccaaacccagctctccacctgtttttgtacagctttgaactgagaatgcttttttacaatcttaagtggttgagaaaatatcaaaagtagaataatattttgtcacatgtaagtttacatgaaattcaaactttagaagaatttcctcttcacagacatcacatcttcaagagcaaatgcttgagccctaacctgcaagttatagtagaaaagtccagaagtccagcctggtcctcgccaagtttccaactcctatgcctaggggtattttatgcttacaggatctaacttggttacaacgtctaacttttagcagagaggcagtgctgagtagaaactggacttgttaaccatatcaagtcacttaagttggctaggatcccctacttaggtagcggccataaagcctagggcatccctgtgccctcaatggttcacttctgagtggtgggcttcctgctcctcaatagagcaatcggcagaaaggcccctagaaagctacattgtcttcatccgcgaaggattccctgtctcctattcctcaaaggagcacccggattctactttcattcttcttttgccattgcattttataacttaaaagaaatagatgattgtaacagaagaaagaaaactttacattgtgagaaaatttagacctaaagcttatagtaatgtgaggacgaaagtctatactgtttaagtaaataggttctatgagcagcatccaggctaacatcacacagtggtattttgaattaaattgtacttgtgttttgtttccgtgttttgctgctgtaaggaaagaggaaagcatcccctttctcggccctcctcccacgtccaggctaatttgcagcatttctacatctcagagtccacccttaagatccttgccacccattattttgtttcagaacgcttaatccatcaaggaaggttaaattggattaccccagtagggaagggacgggggctgtaagcatgagggattatccctgtaaagggctcgtggtgtgtgtgtgtgtgcgtcctgctagtgttgaatgacggagacctgagtttggattctgaatccaggtgtattcgatgccgctccggcgtagaacgggttaaagatgcccccagccaggtagagccagactgggagttgtgcaaggtctcaaccccctaaaagcggcccctcaaattgaagatgagtaaatcatagttcgtaaatcagaaagattatccagtactacgttactctgtttatttccctttcgtcatccctgagtcttgggtcaagtccatcccagctctgtcctccaggaatcaagggaaatacgcaaacccgcggtgggttcgcagccgcaggaaggacaaatcttgcccccgccgcggcggccgccccgcgttagctgcctaagagaatctccgtggccggccagtacccgccttggtgaggattctccctcccgcgagaacttctggaatgccgccgggccagattttgcagctgaggcctccgacgccactaatattgggccaagcagggagtgctgctcttccttataaggttttagcgaaagttaagtaagccaattaaagtgcaaaacacacagtctggaacaatacagcgctctataaatggtctccattattatcattatccgttagttataactggggataaaaaaaaaaaaaaaacgacaaaaacctggagaaccggaaaggtctgcaaaaggggcggaacgcgggaacttcgatttggggaaggggtggcgggggagatcccacacaagcagccaatccagctgtcccggggaggaagaggaggagtcaaggcccgcccctggtctccgcactgctcactcccgcgcagtgaggttggcacagccaccgctctgtggctcgcttggttcccttagtcccgagcgctcgcccactgcagattcctttcccgtgcagacatggcctctggcaccaccaccaccgccgtgaaggtgagatgagccctcccagccgcagcggttcgccctgccggatgccttctcgcc

SEQ ID NO: 41625 - DNA, 2300 bp, Homo sapien
tttaataacatacttgacatcccaaattgttttcattggcttcattttaaaaactacatgttttaaaatcaagcagacactaaaagtacaagatatactgggtctacaaggtttaagtcaaccagggattgaaatataacttttaaacagagctggattatccagtaggcagattaagcatgtgcttaaggcatcagcaaagtctgagcaatccattttttaaaacgtagtacatgtttttgataagcttaaaaagtagtagtcacaggaaaaattagaacttttacctccttgcgcttgttatactctttagtgctgtttaacttttctttgtaagtgagggtggtggagggtgcccataatcttttcagggagtaagttcttcttggtctttctttctttctttctttctttttttcttgagaccaagtttcgctcttgtctcccaggctggagtgcaatggcgcgatctcggctcactgcaacctccgccttctcctgggttcaagcgattctcctacatcagcctccgagtagctgggattacaggcatgcgccaccaagccccgctaattttgtattttttagtagagacagggtttcgccatgttggtcaggcttgtctcgaactcctggcctcaggtgatccgcctgtctcggcctcccagaatgctgggattatagacgtgagccaccgcatccggactttccttttatgtaatagtgataattctatccaaagcatttttttttttttttttgagtcggagtctcattctgtcacccaggctggagggtggtggcgcgatctcggcttactgcaacctctgcctcccgggttcaagcgattctcctgcctcagcctcctgagtagctggaattacacacgtgcgccaccatggccagctaatttttgtatttttagtagagacggggtgtcaccattttggccaagctggcctcgaactcctgacctcaggtgatctgcccgcctcggcttcccaaagtgctgggattacaggtgtgagccaccgcgtcctgctccaaagcattttctttctatgcctcaaaacaagattgcaagccagtcctcaaagcggataattcaagagctaacaggtattagcttaggatgtgtggcactgttcttaaggcttatatgtattaatacatcatttaaactcacaacaacccctataaagcagggggcactcatattcccttccccctttataattacgaaaaatgcaaggtattttcagtaggaaagagaaatgtgagaagtgtgaaggagacaggacagtatttgaagctggtctttggatcactgtgcaactctgcttctagaacactgagcactttttctggtctaggaattatgactttgagaatggagtccgtccttccaatgactccctccccattttcctatctgcctacaggcagaattctcccccgtccgtattaaataaacctcatcttttcagagtctgctcttataccaggcaatgtacacgtctgagaaacccttgccccagacagccgttttacacgcaggaggggaaggggaggggaaggagagagcagtccgactctccaaaaggaatcctttgaactagggtttctgacttagtgaaccccgcgctcctgaaaatcaagggttgagggggtagggggacactttctagtcgtacaggtgatttcgattctcggtggggctctcacaactaggaaagaatagttttgctttttcttatgattaaaagaagaagccatactttccctatgacaccaaacaccccgattcaatttggcagttaggaaggttgtatcgcggaggaaggaaacggggcgggggcggatttctttttaacagagtgaacgcactcaaacacgcctttgctggcaggcgggggagcgcggctgggagcagggaggccggagggcggtgtggggggcaggtggggaggagcccagtcctccttccttgccaacgctggctctggcgagggctgcttccggctggtgcccccgggggagacccaacctggggcgacttcaggggtgccacattcgctaagtgctcggagttaatagcacctcctccgagcactcgctcacggcgtccccttgcctggaaagataccgcggtccctccagaggatttgagggacagggtcggagggggctcttccgccagcaccggaggaagaaagaggaggggctggctggtcaccagagggtggggcggaccgcgtgcgctcggcggctgcggagagggggagagcaggcagcgggcg

SEQ ID NO: 41626 - DNA, 2300 bp, Homo sapien
aaaacctaatgcccccctacagaggcggaggccggctgaaggtggtggtaggaggggaatgctgggggcgtggcataggtgcagaggaagacccataaaaggatctggttcccatagagctgacattctacacaacaaacaagtaaacaagtacataagtaaaataatctcttcgtcctaagtgctataaagaaaaaaatcacggtggtatgagggtgcctgaaaagggaagcatttctgaggaagggctacttacttcagaagagacctgaaggaaaaagagctatatttgcgaagagggagaaagagcagccatactagacagaaaggtggcatgtggccccagcacaaagcacggtgttgggtaaattctgagtgaaatctacctaccggggaggtgcatttgtaaatatctagatagatatttagagtggctacgtaagagtgatcgctaaatctcactttttccaaagggccccgttttgtcttgggtttgtaccgaggtccggcagcaacgtcaagtgatggggcgggggatggggaaagagaagtctgccgctcctctaggctaccgcaccgccttaagtgggtggctcggccagtgcaggcctcactttcctcccctgtaaggtctggggggcttgacgtctgatctgtaaggccctgtcggctcacgctgtggttccacttcttcaactaggccactaggcccaagcgcatgaacaggaagccactgagaagcgggccacatttccaggttcccggagctgggcctagtcccgaatcctctggcacacacccacccactcaggccgcgggtccagcccgcgaggtttaggacggatccaggcagaccgcaggctccgggtcggggcaccgggtcagcgcgccggcctgaaggcggcgtcctgggctcgacttcccgcgcgcggagagccggcgagcccgcgtccgagttcctggacgagagccgagcctcgcttagaccgcgctcaggacccggctcctccgcattctccggctgcccctgtgtcctcgactcacccctcctttctgccgctccttcctttccttgccctgcttttactgttcccaaacaggaccgcttttcctgtctcccagctggaaaggaggaagggagagagtccagaaaggatcggtgatgtggaagaaaaggggaggaggggacatggagggggagaccggagagagaacgtacgccgaggagtcaggcggcgggatcaaggggagtcggggtgtctgggcgcggggcagagcgtggaggcggcagcggccaacggtcgccaagacaaccattctacgcgaggacgcggcgacaggaggggagcggccagcaggggaggggagcgcgggggaagaggaaagaggaagaagcgctcagatgctccgcggctgtcgtgaaggttaaaaccgaaaataaaaatgggctagacacaaaggactcggtgcttgtcccagccaggcgccctcggcgacgcgggcagctgggaggggaatgggcgcccggacccagctgggacccccgggtgcgactccacctacctagtccggcgccaggccgggtcgacagctccggcagcgccagcgccgcgccgtgtccagatgtcgcgtcagaggcgtgcagcggtttagtttaatttcgcttgttttccaaatctagaagaggagcggagcggcttttagttcaaaactgacattcagcctcctgattggcggatagagcaatgagatgacctcgctttcctttcttcctttttcatttttaaataatctagtttgaagaatggaagactttcgacgaggggagccaggaataaaataaggggaataggggagcggggacgcgagcagcaccagaatccgcgggagcgcggctgttcctggtagggccgtgtcaggtgacggatgtagctagggggcgagctgcctggagttgcgttccaggcgtccggcccctgggccgtcaccgcggggcgcccgcgctgagggtgggaagatggtggtgggggtgggggcgcacacagggcgggaaagtggcggtaggcgggagggagaggaacgcgggccctgagccgcccgcgcgcgcgcctccctacgggcgcctccggcagcccttcccgcgtgcgcagggctcagagccgttccgagatcttggaggtccgggtgggagtgggggtggggtgggggtgggggtgaaggtggggggcgggcgcgctcagggaaggcgggtgcgcgcctgcggggcggagatgggcagggggcggtgcgtgggtcccagt

SEQ ID NO: 41627 - DNA, 2300 bp, Homo sapien
tattaaatgaaacaacagctgtaaagcacttcgtacagagtacacaataagtttgatttctcttctcgtcttctaaatatagactatataatattctttatacagagaatattagataaaatccaatcatatttgaaaaccaggttgagcaggttggtttttcaaagaaattcattgagcttccataatgtcctttctatttgacgggagaaaaggggctttggaagatcaagtgtgaagctttagaattctgtctggagctggttaggaccacccaggcctgagtataagcaaagcgctgtccgtggtgctagtaagcgcgaatgcccccggcaacgttttccctacccaaagttgtttttcattcagtcaacttgcttcgcgaagctcacacatctgcctcgtgcaagattctcagtcattttacttagtcattggttctttccctatcaccattctttatgtccccctcaaagaaaaacattatcttccatttccttatcaactccaaacagctttcatttttctgacatatttactacctaagaaaatggctcaagaattgggtcagactatcttgtcctaacttttctgataagtttcagagaaactcaaaggtcaaaacaagagcataagagtaaaaggtagagaaattaagaaactgaagactaggaaatgggggttggatgggaaagaaaaagaaattgttattaatgctacccggttcccttccctgtccaggtggatttcagctctgttgaggctctgtcagtagattttcagccctaaccagcacttccatggtggtggcacttccactgcctttaaaagaaagagctttttttaattctacagggatttgggggatgaggagtcagagctaaggtatcctaaaaaaaacatgtgaagactctcattttgcaatacacaagcaattgccctcctgttaagactttgtcttcctcagcactccgaaccaaaatgattctgtaaacaaaaattgttcacttttaggagaggtccacttatgcagttcctcaccaaagtttttaggcaacaaatccataacttgcggttctcttcctatccaatgtagcatccgctgaaatgttttaaatattttaagtaataaatgttgattcaaactcacctaggaagattaggaaggggaaaaaaagcacttggcatttaaatcttcagaagagaatttaatgacaggttcagcctgtttaatgacaagcccagcaccacacccctctcttatgatgtttcattattactgcataaatttcctttattactcatgataaataaaaataagatacctgacaaagtgggtttaaataggtaagagtgcaaacaaagatttactgtacaaatatgatgaaactgggatctcagattcttaaagtataatttttttttgtcttatgtgtgccaggttgccactctcaatctcgaactagtttttttctcttttaagggttgtatccataatgcaaaaatggaaagaattaaaaagcacacgcaaaacatgattctcgggatttttctctatttttatggttgactaattcaaacagaaagacacatccaagagaaaattgctaagtttgatacaagttatgaaacttgtgaagcccaagtactgcctggggatgaatttaacttgtatgacaggtgcagagctgtcgctttcagacatcttaagaaacacggagttattttgaatgactttctctcggtcacaagggagccaccaacgtctccacagtgaaaccaactggctggctgaaggaacagaaatcctctgctccgcctactggggattaggagctgagggcagtggtgaacattcccaaaatattagccttggctttactggacatccagcgagcagtgcagccagcattcctggcggctccctggcccagtctctggcgcatgcgtcctagcatctttgggcaggcttccccgccctcgtgacgcgtcggcccgggcctggcctcccggcgatcacagcggacagggggcggagcctaagggggtggggagacgccggccccttggcccagctgaaaacggaattctttgccggctggctccccactctgccagagcgaggcggggcagtgaggactccgcgacgcgtccgcaccctgcggccagagcggctttgagctcggctgcgtccgcgctaggcgctttttcccagaagcaatccaggcgcgcccgctggttcttgagcgccaggaaaagcccggagctaacgaccggccgctcggccactgcacggggcc

SEQ ID NO: 41628 - DNA, 2300 bp, Homo sapien
ccatatatatgtgacatttttcctttaggaatatgagtagaaatagaaagacaggtttttacagtgaaatagattttttttctctctctttagcctaccaaatctctttcgcaatacctaacacttataaatgcatttaatttcagtgccaattaaagaaattcgaaagtagataataagtgagacaagcacccagtaaatgtttatgatgtgacactgacaaattatgggctgctataatcaagatagcattaaaaattttaaagtgtttgtatgaacaaaccattttggaaggagtgtttggtgtggcagtgagcaaaacaacccagtaactatggcagttagtgttaaagctctgattttgacatgaaaggaataaaaatggaagtccagctaaatcacaagtgtcctggagaaacttggatgagtttcttggctagaggtttttcccaccacagtaagtattttcaaaggaaaacaaagtaaaatttttctcttgtatgagtcacatctctgttggttgtaagtggctgaaactcatcttgaactaccaaggtaagagaagaaacatactggttaatggaattccagaaaggactgaacaatcaaaccattttgaaggacagcatagagctggactctagaacagccaaaacaaggggttaaaccactgcgagggatctctctccaactcttgctcaggcttttctccctggcttgactttcttctctttcactgtagattggcttctctcacatggcaagaaacattgctgctagcacttcccgagttctacgttctacaacatccaccactggtgagagattaacttatggtttttctgttgaaaagtcaaaaattacctgggaaaagtctgattgtctcagattggagatgttgcccatctctggaccaatacactattatgtgtggctgactatataaaaacatggatattttcttggaatcacttggtttgactgggagaagaccattctcaaaacaaaggaagtgcaatttatagaaggtagtagaataggcagataaaacaataattcttcactatattgctcaaataatccccatgacatttttagtatattataaagagagttctaaagtgtttccaaactattatagcaaaatttaatcttataataatttcttcttgaactatgtataatttacctgaaatattttccaaaaagcaatcaatgtgagaaaatgagagccctgtcttcttaaaaaaatgagtaaaagtccacaagttcagaacaaaagaaaatgaggtaaggcctaaaataaattgtgctaagaaagctaaaattctagacaaagtcacatcggcaaaactagaaggttggtactgtgcttcagtttactgcttgctgtttggttaagaggaggggtgatgtgataaaaatagtgacgaagtgagaaaactgacgtattagttttctattgcattataacaagtcaccacaaacttagaggtttgaaataacgcccatgtattatctcgcagttcctgtgtgtcagacctccaggcactgcgtggctcggctgggttctctgcttagaatctcacaggtcaaaatcaaagtatcaatgggagctgcagttctcccaagctggagcctgtgtcccttttaaactctcaggctgctggcataatttatttccttatcaagccatccatatgatcccctccatcttcaggccagcaatggcctgtcaaatccttctcattctttgaaaatctctgacttccctttctgtcacagctctgtaacttcttttctcttctgccaccagcagaagaggcttttaagagtttatgggattagattacatccgtctggataatcttttacttaaaggtcaactatgctatataacatagccaatcacattcgcacattgcagagactagggtataaaatcttcggggtcattcctagaaattctgcctgctgcagcctggtttcttgcttggactctagtatatatttgctaaatctcccaagcctcagtctcactatttgcaaaagtgagttttaatgctctttgccctgcttgcctcacaggatcttaacatagacgtaagatcaaatgcaatagcatgtcaaacaatgtgtaactccagttatacaaacattactgtatctcattggggatacgaagctctacacacttgaagatggtgaaggaatataaaaatgtaagtattgcttttataataaatgtgttcctattggctgaaaatttcaatatctgatacaaatagtcaactttctat

SEQ ID NO: 41629 - DNA, 2300 bp, Homo sapien
tttttgagttcatttaagacaaagaagttcttctaaaatataataaaattctcatttagcacttgaaatatcattcctaaatattaatatttaaaactcttttattaagaaaagtaatatatatcgagaacctaggtgttaggaacagtaaaatatgcattttattatatacattatgatttaggtaagttatctcgtttaatcctcaagtaaccatatgattattctcattttacaaatgagaaaattgaggacagagtgagataaagtaacttactaaaagtggatccagaatttgagagcaacactttttgactccaaaaccaccaagacaatgttttccagacctcaattttttggcgatgtatgcattatctgcataattcttcatttaaattgacaaatatttaacttaaatacatttatttaaaaactatttttacttccttggaggaaaaccaatatcactttccataattataagataactttaaaaatcaaataaaaacagaaaaatatcgctaaactctaggtaaacattttacttgctgctctttgttgttgttattgaaaaacacaattaaaaggtattttaaaaatttaaaagacatatttgcattaagctgaacattcccattatgtaacctgaagctcctaaaaagaatagaaaagaaaattgctttctcgttaggtaattcattgtattttaatgatccatttagaactaaaaactcatctctcaaaggacggatgtgagtccacagttagggcatcagtacattttaggcaggagtagcttgaacaaagataaagagttgtgagaaaggttggatatcatagaacccccagaggttaggaattccttgagtggtagttctaaacattgtatgtaattttcaccttcagagtttaagacacagacaaaaagaatcagaatacattacgtagattggagtgtccatctcttttaaaagttccctaggtagttccagttcttaggaagggtggaaaacttctacgataggatgtttgtatgagaggatggtagtggtggtgatggtgttgagtaggttggtaggagaaaggccagatagatcagcaatatctgctctgaatgtgaacaggtggaatggtaaaaatatcattattaattgctatcttagggatggaaaatgaataacttgtccaaggtagttggataccatcttgaagagctggcagagtgctgacgctaccttccattaagaataaacattcatgaattttctatctcagatgctcttttgacttaaacgccttatggtcttttcttataattaaaggcattaaattcatatgtgaagaatgcattcatgacagcatatttaaataatgatctaaacgactttccccaatactttacaatagacataagtatttttgaaacagctttaacacaatcgctgcctataaataggcgcagagaagagtttgataacttttttaaagtagcagtattttaaaatagagtacacacaacccaaattcgcatgtgtaaataaatagaatgcatgaaaagaatctgaatgtgaatcacttcccttagttatttatccattgttttgatgctgtcctaagacccatttaaaataaggcatctttctggtgggtaacaaattcgtagtctatcaagctgggatcccactaacattggccaaactgctgcagacatgaagacttcatctgggaacccgaaaggagaactcaaaatccaaatcttcagactttcttaggagaagcgtggaagtgggaaaaggagaaattcaaactctgcttaatttcaaaagggcagtaaaaggggaggctgcaaaggctagtttacaaaaatagacgtcgagaactcctagggaagcaagtagaaacgggctttttttgggggaggagacatttgcagcccattggacggattccccgccgccctcctcccagaaggtccccactccccgccccgggccctcccccggcttccgcgctgggccgggagcctgggtgggcggggtagcctctctagccttgccttcttggctggaggcacaaaggcattaacttagcgcccggggtctctgccaggctcacgggacagctgcacctctcagcgtctccagctccaggacgcggtcgtcccaactccttccgagtggaaagagtgtaaaacttttgtccgtgcgcgggtggagctcagtaggaccacggcgcgtcctgccccggcttccccagcctcccagcagggttagctgcggtcagcgcactttccacttggg

SEQ ID NO: 41630 - DNA, 2300 bp, Homo sapien
aaagacatatttgcattaagctgaacattcccattatgtaacctgaagctcctaaaaagaatagaaaagaaaattgctttctcgttaggtaattcattgtattttaatgatccatttagaactaaaaactcatctctcaaaggacggatgtgagtccacagttagggcatcagtacattttaggcaggagtagcttgaacaaagataaagagttgtgagaaaggttggatatcatagaacccccagaggttaggaattccttgagtggtagttctaaacattgtatgtaattttcaccttcagagtttaagacacagacaaaaagaatcagaatacattacgtagattggagtgtccatctcttttaaaagttccctaggtagttccagttcttaggaagggtggaaaacttctacgataggatgtttgtatgagaggatggtagtggtggtgatggtgttgagtaggttggtaggagaaaggccagatagatcagcaatatctgctctgaatgtgaacaggtggaatggtaaaaatatcattattaattgctatcttagggatggaaaatgaataacttgtccaaggtagttggataccatcttgaagagctggcagagtgctgacgctaccttccattaagaataaacattcatgaattttctatctcagatgctcttttgacttaaacgccttatggtcttttcttataattaaaggcattaaattcatatgtgaagaatgcattcatgacagcatatttaaataatgatctaaacgactttccccaatactttacaatagacataagtatttttgaaacagctttaacacaatcgctgcctataaataggcgcagagaagagtttgataacttttttaaagtagcagtattttaaaatagagtacacacaacccaaattcgcatgtgtaaataaatagaatgcatgaaaagaatctgaatgtgaatcacttcccttagttatttatccattgttttgatgctgtcctaagacccatttaaaataaggcatctttctggtgggtaacaaattcgtagtctatcaagctgggatcccactaacattggccaaactgctgcagacatgaagacttcatctgggaacccgaaaggagaactcaaaatccaaatcttcagactttcttaggagaagcgtggaagtgggaaaaggagaaattcaaactctgcttaatttcaaaagggcagtaaaaggggaggctgcaaaggctagtttacaaaaatagacgtcgagaactcctagggaagcaagtagaaacgggctttttttgggggaggagacatttgcagcccattggacggattccccgccgccctcctcccagaaggtccccactccccgccccgggccctcccccggcttccgcgctgggccgggagcctgggtgggcggggtagcctctctagccttgccttcttggctggaggcacaaaggcattaacttagcgcccggggtctctgccaggctcacgggacagctgcacctctcagcgtctccagctccaggacgcggtcgtcccaactccttccgagtggaaagagtgtaaaacttttgtccgtgcgcgggtggagctcagtaggaccacggcgcgtcctgccccggcttccccagcctcccagcagggttagctgcggtcagcgcactttccacttgggactcccggccagaaatttctcgggaatggagcggtcacagtgtggcagcagagaccgaggcgttagcggccgacctcacttggcccctgggctagtggtggctgcccctccgcccccgtccccggcgttgccggtaccatcggggatgcaggttcccccagcgttcctgcggccgcccagcctctttctgcgagcagcggccgcggccgccgccgccgctgccgccacctcgggaagcggaggctgcccgccggctcccgggctggagagcggggtaggcgcggtgggctgcggctacccgcggacgcccaagtgcgcccgctgtcgtaaccatggtgtggtgtcagcgctcaagggccacaagcgcttctgccgctggcgggactgcgcgtgtgccaagtgcaccctgatcgccgagcgccagcgcgtcatggccgcccaggtggcgctgcgcaggcagcaggcgcaggaggagagcgaagcccgggggctacagaggctcctgtgctcggggctctcctggccccccggtggtcgggcatccgggggcggcggcagagccgagaatccacagtccacgggcggccctgcggcgggggctgc

SEQ ID NO: 41631 - DNA, 2300 bp, Homo sapien
aatgatccagcaatagatggggatagaaaaaatataagcatatagttatatagtttgtgtcagtttcctcatgattgtcaagggttggtggagggttagagaagaggaggtcgcaggatgctatggattgaatatctgcatacccttacccccaaatcaagttagtatgttgaagtttaatcattaaaatgatggtatttataggtggagcctttgggaggtaattaggacatgagggtggaaccctaggaatgagattcatgcccttataaaaagagatatgagagggcttgtgtcctgtccgctttcctccatgtgtgttagattgagcagctaaaacagatacaccatacattgggtagcttatgtgaccacacagttctggaggctgggaagtccaagatgaaggtgtcagtagatctagtgtctggtgaaggctggcttcctggtttgcagatggctgcttttcccttatattcccacatggaggaaagccaaaagaagcaagccctctcatatctctttttataagggcactaatctcagatgagacagagcaacatagaatgaaaaaataaaaagaacaaaatagggagcatgaaattttagtgacttgacaaacaatagacatttttctttctctgctcatacatcgacagaaactgggaatatttttgtcatattctgccacacttgaacaaatttcagtggaggcatcataactgagcctgtgttaagaccaaacctttacttgacttacaaaactttctgtgagtttttttcttagtatggttgatttcttcaagaaaaaggatgtaagtttaccaataaggtatttaaagtacaagttacttaattctttattagcaaatagttggctgctaatttttgcttctgaaaacacttaataattaaaggctacaatatttatatctcaagaaacgtctcaggttttttctcgtcactaagcttaaatcttactcttaagcaaaaatattttaaatttgaaaacatacattgtatttgactattagctttttttttaaagagaagtcattaaacttaaagctaaaaataaattttatatttatgtgtagcagttaccatattgatgtgctaaaaagtttatagatttagctaccgcaataacaactttctaatcaaaagttgagactgttgtgaacaactcttttgtgaatataacctagcattgtacagtatagattgactatcgcatatgcaaaatgcttggaaccaaaagtgtttcagatttcagattttttttttttcagatttgggaatatttatttgcatatgcataatgagacatcttaaggatgggacacaagtctaaacacaaaattcatttatgtttaatatacactgtatacacaaaactgaagataattttatataatattttacgtaactttgtacctgaaacaaagttctgtctgtgttttgactgagatttgtcatatgaaatcaagtgtggaattttccacttgtggcatcatgtcagcaatcaaaaagtttagattttggagcatttccagttttgaacttttggattagagatgctcaacctgtatttcctacaaactgtcattaggaaaaatcagaagactaattattgtctaaattttaccgtctagaatttctaatatcattcagcattttcaacttttttcttaatagtttcatattggactgcttgcttcaaattcacacattaacctaataattaaaagctagtggaaagaattatcagattaaagccttaatttctacaaagcataagttaatagagaaaaacaagtgcaaagagaggcaccaggtggttcataggaccttcaggtaaaacaaatgagattttattaggcttacagatagaatttttgcctgtgtgtcaagggataacaggagtgttgatttgagtggcttatgaaacaggcatgtttagctcagcaatattactcatcacttggctttttaatctgccaagagatgggtacgatttgcacttatgaactgtgtgtaattatggtgattcaggttttggcttataatgaatcctccatcacagtctgttttctcggtcttttattttctgttcctctaagggaagagagaccaaagagaattctactttgaccctggcttaagagtggaacatagatgtctataaaactatgtggtatgtacatttataaaaattttaatttgcattttctctaggttttatgtttttggtgataacagaataaagtgtgcatgccatccaagataaatggatgaag

SEQ ID NO: 41632 - DNA, 2300 bp, Homo sapien
gtttaaagatgaaactgatgaaagaaaagcaaactgctattattaatatttagtttattgtgcttcagtttatctactttaaggattaatctctctcatctccttgaactcaccaagactgagacagactggggttttgccatcagccattcctttatagatattatcgaacaaagtcgctcatagcattggggactatgacccaaacaagccaaaatagctatacatctgaatagttcaaatagacctaaacaagccaaaatagctacgtatctgaggagttcaaatattattattttaaaagattatttattattttaaaagattaattattatataacattttataccctcatataccaccatatttgtggaacaggtggggcaataatataaaataggcaggataaacatatttaattagataaagaagctattattcatataaagcaagaatagaaatcatacaaataacagaaattttcatttagtgaaaatgtcaagtgtgaaaaaagttgctatctaaagaaagaaatcaatatcttgaaaatcaagcatatatggaaaacagcaggattgataaacgtttggagtaaataataaattaatgacatattaaaattgagaaaattttccatagggcaataggaagtcataaaatagattaaaatagtaaataaaattaagatatacagatagtatctttatttaatatatctgtattctattgttttatataattgcacttagaaataatattttctttttgggattttctattcttttttattagaagctttagctttcaataaatatgtacaattaaattttcaataaagatatacaatttcacacattttaatatggtaataccataaatactataaatcatttgagctatgttttgttctaaacaatttaaattatgtttattatttaactacctatctgggaaaaacttccaaaaatcttataacatttgtgtgtgtgtgtgtgtgtgtgtgtgtgtgtgtgtgtgtgtgtattttcgttcatttacaaaagagtcaagagcaactactgattttcagtcggatacctagaagactacactgtggaagcagggtgaatccaattcagactcttacccccgaaatgtagccaaatgttgagtaatctcagtttctgaacatcataaaaaaaaaccatgtaagacactttggacaacaaatactgagaaaacgttttgctaaaatatatgaataaaaagaaatactaatagagagaaggaaatgatgacagatataaaagtagaaaattgtaagaatgcatagagagcaataagaaaactgtacatatgtgggtaaatataagtaaatgtttgcataaaaacaacaacaatcccttatgaggtttcaactcatgtagaatgaaattcaggacaacaataacataaaaggtagaaggagttaaatagaaaagttttggattactgacattgtcagtaaatgaaaaaagtcatctttacgtttaagactagaataattgaaagatgcatcttttgaataactaaaaagtaagagaagctctacataaaatgttagagataaaaaatggtagattaaaacagcttgttgatcaatcaaagactctggcaaatgaagagaaaaaagcatatgtaataataaagtcaaacagaaagaaatacaagacgtaatactttttaaaaagttggtgtatttttattaagattaaagtagaaattgaagcaatcaacatgtctagatagatagtaagtaagtaagtcatgccagtaatgatcatggtttactccaaaagaatgacaccacaattctacatttgtatgcaggaaataatacaacttcaaaatgcataaggtaaaaaaagaacaaaactgaaagaacaactcaagaaattcacaattgaagtggacatctttaacacatattcctggatacttgatagaacaaatagaaaaatgaccagtaagaatacagaaaacataaaaaacatcatggatgaatttaactgatatataaaaaagttaattgtttttcttttctttttttttttttttggtagttgaaagatttaatagagtgaaaacagagctcccataaaatgggaggggacccaaagtgggtagccattgctggcttgaatgcctgagtttatatcctgatcattgtcccgccccttgtgctgtcaggcgatagatgactggctatttctttacctcctgtttttgcctaattagcattttagcaagctctctttactacctgattggtcgggtgtga

SEQ ID NO: 41633 - DNA, 2300 bp, Homo sapien
atttttaacctctttgctctagagacatttggagttcgatggaagtatcctgtgtgaatacctgtggttttgatagtgattgtcgcagggtgggttttcttctttctggaggccaactttgcttttatgatgacctattatccctgcgtgtctggctctgtctagtcatatgtatggatctgttcttcctgtctggtccacccaggcttgggaagtaacttgtcaaccctgccctcagagcctgcttgagagggttggcaaactctactggtcctgctgtgaatctctcaggcttgcgagggacgacagatggttgagctaaactgggagccacccctctacgtaatgatgaaaaatgaccagcctcctggtaagtggaaatcaggaccatgcaccttttaattctaataaacaggactttgaaacaaacagagtgaagaaggaagaggaaacccttccataagtaacctgtctttgttagtactctttgtacttattagtaggaaagatcttcacgtatgtatatactattgtatccatgtagtcactacacatagactgctgggactgaaaagtaatcccgtgtgcccttttggatataaacaatctctgtaaaagccaaaaaatgtgaggcagattacaaacatggatgcagaattgctttctgtactacatgagcagcatggggcccactgttcttatggctccttccataggtatctgcctttcccataacttcagctgaagttggggccctcagcagcccttgaggcccctgctcttgtacctggcctcagttaattgaaccattgctacctaactcagccgacaaccaatctgtagcctagacaatgagtgacttggaccagttacagagaacagaaacaagttaatagaagggaaagcaggtaggcagagtagctgtgtcagtaatagtgatacacaggagtgaagacccatgaacttgtgctgcctggcatccttctagttactttggctccacttattgtctccctgaagcatgtttttgggctcttatccttgtcttccactttaccactcatatccttatgatgacactcccttgtgtgagcggccttacatgaatctcagtccatggtcaatatagtttcatagttacaagtgaaattagtccctggagtcagcagctaagcttcaataacagctttatccgttccaaactgatgagctcttgtaagttctttaatttctgaaagcatctttattcttcctctataatatgagacaacagtacctacctgagaatgctggaagacttaataaataacagatgtaaccattaacataatgcttggtacatgctcgaaagatgttagctgctgctgttattattattaatatgtgattctgttggggcctttcaacacattaaatgatgcaaggctttcttttgttttccctaagcccgttggaactctaaccattgacttgatcactgtctacacacctgaggctcttttcagctgctctgtttctgagagaaacatctaacctacaaagggaatccccaaatctcacaagtctcagattactaagggattgtcatacctggataaaatcatatttatatgctgtcttccttaagtgtatgcccactttaaatgtctctctgccaactaattataaaagggaaaaggagtttaagacgttccattctgttttcccaaatgactgttgttgctcactgaaatgcacaaacatgctacagtcttttgaccgtatctcttctcttttgatgaccagcatgctctaggttctctcctgctggcacgtggaccaggagaagttagcagatacggtcttctttctctggacggttcacctttggctcagtgccctacagcttgtatacaggaaagagaagtaagaagtagttatttaagagaacttccccactgtctgtgctgtgacctccttctctgacagccaactttttaaacaagcatcttaatatttcagcagatggtgctaaggtttgctgaaacagcctacagtattcccagtttgttcccacatttctggattctttgtaattagctcgcaacatgcgtgaaagtgagctcagatgtaacctaaacccatggaacttggaaaaagaagcatctgccgagaggagcggggttgatcttgatttgctttcagggagttgccacggaggtgagctttatgagattatcagtggctggaagtcatcgcagctgtgttgtgttgtctgtcctgggtgcccatttgcttctagttacaaatcaagtattggt

SEQ ID NO: 41634 - DNA, 2300 bp, Homo sapien
cgcccttacttattgctgtcattgcctgaatgtgtcttacagcaggcacttcttccccgttccctcttttaaccaagtgcttgggcaccccgcttcataaagctaacctgttctggagctcttcacaaaaaacgctacggttgtaggaagaagtggtttggaagacttggggaactcttctgagagctctcccataatttagtcagcgtcaggaagtagggcgtagggcattctaagagttttaggtttggattgacaaattaagtaggcccattttcgcctaacgttttggaaataggcatttttagcaatcccgcgtgcctgggatgagaatattataattaactatttactgagaggtcaaagaggcgcaggcgctttgagcagttttcccaggaacccacacaaagtcaattaaggtcatttaattgcaaatcggatttggggtgacacggaaatgctgatatagaatcagttagctgtatccggtgtccccagactgggtcgcacaaattaagggatggcctatctcgcttttgaccttggttgagccccctacttcactatgctgattagacttcgcccaagagggcaaatttgcctctcccacacccgccctgggttagacgagtcccctcccttccccccaaccccgctccgcccgtcgcatgggggcggggagcgctggacgcccttagcggaccttgctgcatcaaacctgcatcatgcccttgaagctgtaacctcggtcacgttcttgcggcgactgggtcgcccactgctcggttcctttctcttacctcctacaatttcaggtaggtatgacaggtgattttttaaatgtagtattttaggagaagggctaaaatcgatgcctttgcaatgaaaaaaatcccaactacaggtgctctcgtaattaagcggccgagcaggtgtaaaaacgtgctccagccgcgtggctccggggtgggttttgacttccagccgtggggccgggtctgaggacaggcacaggtttttctggggaaaagggattgagcttggcgaaggggcgggccaaggcaaggcagcgatgggacgccccctcggtgaagagttggccatttcgggtcttgagttggggggcgatagaaggatgcggctagcggcaagcgtttgcatagtcgagtgcaggatttcctactttgcgtttgaagcagagtacagcaccccgcacaggtactctgggcttatttaaacgtcaggttctctctagagaggcagggaggggcagcagggggctaagcctttattttctgtccagggacaggaccccttggctgcgaagtagggggaaaaagagaatttttaaaagagacacacatatgtgtgtatacttatatatatttataaatacatttatgaacacataaagtaacccccacgttagctgctctgactccccgttagcgccccgggcctcgggatttgcaaacttgcacctggaatcagcctcctctgggcgctcaacgctctccaccgagtccagagaaaccttgtcggggaagcctggtgagactcggaagtccggagggacggagctgagctgctgaagcccggcatctccctgccggcacggacccgaagggcggtcgggcagggcacgcgccggcggcggccgcggcgccgcgaactcgccgccggccccgcctcctggcgctcttccaagcaagcccctccttcccgccccgctacaaacggcgggaccgcggcgcctgggcgtcactgaggcagtagccggccgggtgaggagggcggttgccggcgcggcgcggcgcggcgcgggtggggcgggggttccgccggcttccagtcccctttcccgccgccgccgccgccaccgcctctccgcggagctcgccccgagcgactcctccgcggcagtgctgacggccagcggcacgagccgtagtagctgcagcttcgagtcacagcaggcaagtgctgggggcgtgggggcggggacggcgtccgcgccttgcccctggtccattttggacgccgaggctaaggtctgtgcgcgcccccgctgcgtctagcagggtaggggtggtgcgccctagtccgaactctgggcgggaacactggtgggggcggcggaggttgtgcccgcgaagttcctagagctcagcccgttgcggcgggagtagagagaattgggcgcctcgggaggtggcaccgcccctcccgtgggcacaagcaggttgggggcggcgggagccgagcggggacagtcgcgcctggcagcgtgcacgggcgtg

SEQ ID NO: 41635 - DNA, 2300 bp, Homo sapien
attatacccatcctctgggggtgggagggagattaatgttttatttcccaggcctacactattaactgcaacctataaaacgtagacttacaatgaaaatttttagaaagtacacagcagacaatagtaactaaagaaattattttccaaattgaaaatcagtttctaaaggtcagaaaaagggtgttcgtgttttggggaacagaagggtaggaaatgtgtttgggccttaagacttccttgtaaaatggcttcttaaatgggacatctgaaagatttgtcagactatgaacagataagcccgcaaaaaaatatgttgagagtttcgaagttgttatggggttaacattttattttttaactctcgcccttacttattgctgtcattgcctgaatgtgtcttacagcaggcacttcttccccgttccctcttttaaccaagtgcttgggcaccccgcttcataaagctaacctgttctggagctcttcacaaaaaacgctacggttgtaggaagaagtggtttggaagacttggggaactcttctgagagctctcccataatttagtcagcgtcaggaagtagggcgtagggcattctaagagttttaggtttggattgacaaattaagtaggcccattttcgcctaacgttttggaaataggcatttttagcaatcccgcgtgcctgggatgagaatattataattaactatttactgagaggtcaaagaggcgcaggcgctttgagcagttttcccaggaacccacacaaagtcaattaaggtcatttaattgcaaatcggatttggggtgacacggaaatgctgatatagaatcagttagctgtatccggtgtccccagactgggtcgcacaaattaagggatggcctatctcgcttttgaccttggttgagccccctacttcactatgctgattagacttcgcccaagagggcaaatttgcctctcccacacccgccctgggttagacgagtcccctcccttccccccaaccccgctccgcccgtcgcatgggggcggggagcgctggacgcccttagcggaccttgctgcatcaaacctgcatcatgcccttgaagctgtaacctcggtcacgttcttgcggcgactgggtcgcccactgctcggttcctttctcttacctcctacaatttcaggtaggtatgacaggtgattttttaaatgtagtattttaggagaagggctaaaatcgatgcctttgcaatgaaaaaaatcccaactacaggtgctctcgtaattaagcggccgagcaggtgtaaaaacgtgctccagccgcgtggctccggggtgggttttgacttccagccgtggggccgggtctgaggacaggcacaggtttttctggggaaaagggattgagcttggcgaaggggcgggccaaggcaaggcagcgatgggacgccccctcggtgaagagttggccatttcgggtcttgagttggggggcgatagaaggatgcggctagcggcaagcgtttgcatagtcgagtgcaggatttcctactttgcgtttgaagcagagtacagcaccccgcacaggtactctgggcttatttaaacgtcaggttctctctagagaggcagggaggggcagcagggggctaagcctttattttctgtccagggacaggaccccttggctgcgaagtagggggaaaaagagaatttttaaaagagacacacatatgtgtgtatacttatatatatttataaatacatttatgaacacataaagtaacccccacgttagctgctctgactccccgttagcgccccgggcctcgggatttgcaaacttgcacctggaatcagcctcctctgggcgctcaacgctctccaccgagtccagagaaaccttgtcggggaagcctggtgagactcggaagtccggagggacggagctgagctgctgaagcccggcatctccctgccggcacggacccgaagggcggtcgggcagggcacgcgccggcggcggccgcggcgccgcgaactcgccgccggccccgcctcctggcgctcttccaagcaagcccctccttcccgccccgctacaaacggcgggaccgcggcgcctgggcgtcactgaggcagtagccggccgggtgaggagggcggttgccggcgcggcgcggcgcggcgcgggtggggcgggggttccgccggcttccagtcccctttcccgccgccgccgccgccaccgcctctccgcggagctcgccccgagcgactcctccgcggcagtgctgacggcca

SEQ ID NO: 41636 - DNA, 2300 bp, Homo sapien
ttagtttccacctagttagaaggcacttatataattataatggtaaagatttacttcaatgtactgaaattatatgggcatatgcaactaattcaatattaacctacgagcatggtaaaaaggaggaaagacaattcactgcctaggtaagtctgatgaaatcaaacagtattatactttccccaaattgtattcatttaaaggttatttctctgtatggagctggggacaaggggaggggttgaaggaagatgactacaaacccaatcttctgttattcatacatctagtctagatggggtggagtcttccttttcccccttgactccatttcttcaaagtgcttttctttcttcttgctgtgagtttcacccaggtctagagaatagttttaagttgaaattaagactccagaggttgttatacaaaaactgggggtggaggttaaggcatgattttataaacactaattataagataacatagattcaggccttctttctcaagccccaggtattgtcatgcaaagtaacagaactcgtatattgttatacaggctacacgggagataaacaggtctgtttttcaccattaatcatttatcaacactcaaggacactctcaaagaacactgatttactgtattcctcacttcaaagtcattttgctttgggatcttctgtcccattcccctccatgacaccctacccttttgcaatctctaactcttacctgtgtcttctttttccggcattctcaaagatagcgactagttgtaaatatgtaaaggaatccctttcaaaaaggcatgtgcctctggttaagacacattacatgtgtaatgtaatgtgtacattacatttacacattctggtaagaatggtaaaaactgtctaggaagttggtgctatctttcaagattgaaaagagaaatgctggctggaaaagaacgtaggtcaaatgaatattgtgtctacttatacatccagacgatcctgaggacctcactttcacttagaggaagaaacaattatcatgcataaaactgtattttggtctcctgaatgctgttaaaatatggggttgtaataaagtagtcttcctctatgaagcagaagcattgatagcacttggtcttctggttaaacttcttaaatcctcacagaaagagccctgataaaggttcaactatctttgctgtcagcaatacatgtgtggtccaaggactgtacctgtctgcaaatgcagaggagtggcttgttccagttttatatacagctgctctttttgagaatcattagacacctcgaagtgaaggaccttagctctactcaatacctctttttctggataggatatttatcctacacttttctattctaacatgaagtgaaagccaattcaaaccgtgcagctttatttgagagcatttctgacttcatctttatcttaaaaggatgctttaaaaaggggttcatggggacacataaatctgaaatatgcgtatattaaaataaagacatacaattacctaacatctaatacaaaatacagtactgaacacaaatcgaaaaaaggcatgcgggcaaataatggatgtacattcatccctttcactcagatcaaagagagggagctctcaatgactcatacataccggacagagttaaatgttataaagaaatatgccacagatgcagcagtgatggcaaaggaaatgaatctttctgaagcagaaagatttaagaggaaaggagatcgtgccatatcgcaaactctgatagtacagttccaaccctcccacgttgctctctccacatttctttttgcttcttgcatttcccttcgccgccagtgttaagagtgtacctccccgcacaacttaccttgaaacgggactccattgagctctcgagagtgacacaagcccatagccaatcgtctcacgcggccccgcctgggcggcctcaatggaagcgtgtggaccaatcaggatcctggggcgatgagcaagttacgttgtggcgcgattcggcgtatacttccgcgcgtgctgcccgggataggagcctggcagagcagctgcacacacggcagtgcggaggcagagaaggggttggtgatacggtgctataaatctgtggtccagtccacctcccttttaagacgtcctcccccctatttctgttcttagttagagatgcagcagcttactcctgtagcgacctactaaaaagcaacaaggagaaagacatcgtctttttgaaaaaacgttctttcgtctcttttctttgttcctt

SEQ ID NO: 41637 - DNA, 2300 bp, Homo sapien
gataatattgttatgtgtgaatttgatcctgtcattatgatgttagctagttattttgctcgttagttgatgcggtttcttcctagccgtgatggtctttacaatctggcatgtttttgcagtggctggtactggttgttcctttccatgtttagtgcttccttcaggagctcttgtagggcaggcctggtggtgacaaaatctctcagcatttgcttgtctgtaaagtattttatttctccttcacttatgaagcttagtttggctggataggaaattctgggttgaaaattattttctttaagaacgttgaatattggcccccactctcttctggcttgtatggtttctgctgagagatcagctgttagtctgatgggcttccctttgtgggtaacctgacctttctctctggccgtccttaacattttttctgtcatttcaactttggtgaatctgacagttatgtgtcttggagttgctcttcttgaggagtatccttgtggcgttctctgtatttcctgaatttgaatgttggcctgccttgctagattggggaagttctccttgataatatcctgcagagtgtttttcaacttggtcccattctccccgtcactttcaggtacaccaattagatgtagatttggtcctttcacatagtcccctgtttcttggaggctttgtttgtttcttgttattctttcttctctaatcttctcttctcccttcatttcatttatttgaacttccatcacttataccctttcttcccattgatcgaatcagctactgaggtttgtgcattcatcacgtagttctcatgccatggttttcagctccatcaggcctttaaggacttctctgcattggttattctagctagccattcatctaatcttttttcaaggtttttaacttctttgccgtgggttggaacttcctcctttaggtcggagtagtttgatcgtctgaagccttcttctctcaacttgtcaaagtcattctccctccagctttgttcagttgctggtgaggagctgtgttcctttggaggaggagaggcactctgatttttagatttttcagtgtttctgctctgttttttccccatcttctttgtgttttttatctacctttggtctttgatgatggtgacgtacagatggggtttttgtgtcaatgtcccttctgtttgttagttttccttctaacagtcagggttagaagggaacagctgcaggtctgttggagttttccggaggtcctctcctaccctgtttgcctggatatcagcagtggaggctgcagaacagcagatattggtgaacagcaagtgttgctgcctgatcgttcctctggaagttttgtctcagaggagtacccggccatgtgaggtgtcagtctgcccctacttgggggtgcctcccagttaggttacttgaggaggcagtctgtccattctcagatctcaagctgcatgctgggagaaccactactctcttcaaagctgtcagacagggacatttaagtctgcagacgtttctgctgccttttgtttggctatgccctgcccctagaggtggagtctacagaggcaggcaggcctccttcagctgtggtgggctccacccagttcgagcttcccagccactttgtttacctactcacaccctggcaatggcgggcgcctgtctccagcctggttgctgccttgcagtttgatctcagactgctgtgctagcactgagtgaggctctgtgggcgtaggatcctctgagccaggcacgggatataatcttctggtgtgccgtttgctaagactgttggaaaagcgcagtattagtgtgggagtgacccaattatccaggtgccatctgtcacccctttccttggctaggaaagggaattccccgaccccttgtgcttcctgggtgaggcaatgcctcaccctgcttcagctcaggctgggtgcactgcacccactgttctgcacccacttccgacagtccccagtgagatgcacctggtacctcagttggaaatgcagaaatcattcatcttctgcatcactcatgctgggagctgtagactggagctgttcctattcggccatcttggctccacctcttcctattgttggttcttaagagacaaaccaggcctgttacgttccctccctccttaattcaatggaagaacatcaaatccaattcgttatcaagacagacatattttaaaagatataatttttgttcttttaaagacactattaagaaaatgaaaaactcatccactca

SEQ ID NO: 41638 - DNA, 2300 bp, Homo sapien
tttttttccatctgttaaaaaaattgctaggttgtttggaacactaaaataaataaaattttctaaatacttaaaaaaatttgcttaaattgtgttaaatatttctgctcattagaagaataaaataaacttttcggtgactcatcatctctgtttcagtttcattcttgtctaaagaaaaaatagaatgaacaagaataattgttttgtacaatcgctataaattctaaatatgtttgaaatgtcactgcacactgcttactaacatggtggtactaagtgaagtcagaaatattaatgagagacctttggcaacaaatgctagggatagtgaacaataccttttcataagtacaactcatgtaagatgacaaatgtcttacaatgctgggacaaacggtgacaataaggaatatggtggtaaagaactctgcttcagcacatttgaaagatagaattctgggaaaggaagaaaaagataaaaaatagagaagacagattgaggagagaaaacacgattacaaaattaaatggtaaagtaggaaaaatacaaaaaaaataggattagttcaaggaaaacaacttacaggttaagaaacaactaaagagggccagacacggtggctcatgcctgtaatcccagcattttgggaggccgaggtgggcagatcacctgaggtcaggagttcaaaaccaccctggccaacatggtgaaaccccgtctctactaaaaatacaaaaaaattagctggacgtggtggcaggtgcctgtaatcccagctactcaggaggccaagggaggagaaccgcttgaacctaggaggcggaggttgcagtgagccgagatcgtgctactgcactccagcttgggtgacattccatctcaaaaaaaaaaaaaaaattcaattattctcatagctttctacaccctctctacccctgcatgtccttgtaaccctccaccccagcttgaatttgttgaccatcattaaaccatgccgtgatacacacatgcaacttctttaccaccctctcactttacatacttgacaaaacatcaaccctggaaaagtataactgttattatttagttattttgagatggagtctcactcattctgtcacccaggctggagtgcagtggcacaatctcggcttgcaacctccgcctcccaggttcaagggattctcctgcttcagcctcctgagtagctgggcatagggccaccatgcccatctaattttttttttttttgtatttttagtatagatggggttttatcattttggccaggttggtctcgatctcctgacctcaaattatccacccgcctcagcatctcagagtgctgggattataggtgtgagccaccgtgcctggcctgtactgtttcctgcacacatttgcattcatgcagttgactatggctagagaaatatctagaaacatgctgattattctcatctaaaattactatccactaactttaaatgaatctaaatacttctagcatcatacaatttccagcttatttattatcccaatgtcttattaaacatttccctttcttaaatttatgcctattcttagtcaatgactgtacttcccaattcacttagaaaattgaaagttgcaagaaaaatactacaaactttcttcataaatcctccatctgcatctgtttgcatgtgtcctctctctctgttgttcccagggatgaactcaccatgcctgtatctaaggcccacctgtttactgatataatagattcatcttttcttgcctactcaaaaacatcactctctgtcctctatcaccaaatttcccttttctactctatcagtctcatcacagtgctgttccccaaaattgtatgcttctatttttaaaaaaattattcatctctactaccctccaggtatcacaccatttttttgctcatccttgtagcaaaattcctcaaaacagttgtttacgctttctgcctccaattcttttccccattctctcagcaaccttcgcctctctactaaaactacttctggcatggttaccaatgacatcacaatgctaaatctaatggtcaagttttgattctcatgacttgatttatcattcacataggacatagctgaagattcctttctccttaaattgctttcttcacttgactttttgacaccacatttcttctgattttcttttttctttgtcatcttcactatattaatctttttaatggttttatcctcatcttcttgatctcttaatgttggactttgtcagttgctttgacctt

SEQ ID NO: 41639 - DNA, 2300 bp, Homo sapien
atgtatccctacaaataagaggggctgctgtacttgcatttttctgttcttttacttcaaacttcgtaaccttagtcaggaaataatctttggtcttagagtttcctaaatgcaaagtgcaagtagtccttttctttttagttttaaaactgtttaaacagaattctttttatagcagaattctttttcttgagcaagagtagcttaaggaacaatgatgaaccagttgtcagaaaagagtgacctatgtcctttaagactttcttctatttagcaagcaagcaattttactgttcagaagcccccagtcttaaaaagcagcacaggtatctatctaccttttatttttctaatcaagcacttatatacttattctatatgttttaagtattattgtagtcttgcatttcttttaaatttgatcagttccgtatattttccaaattttttccattttattttcatatataggtacatattatttgcccagtaatatttttatatgtagaccattaacaaactacagtgtggagaagcatttttactctttgtgctaccatcctcagaaaagctgtaattttcatcttcgagtatatgattcttgacatattattctaggtaaattaaaataaatacaagtatatacttttagtactaatcattttaatcactctgttgtctcaactccactttcaacttagaaatgacattgtctctatgtcgtatttgaaagattggtggactctccattaacaaatcataagacaaatgttcactgctacataagacagtctttatgagtcttaatacctttttgttggatcgattttttccacatttttttctttccttttcttccaaacttccctttctccctctcttcatcccttcccccttccttattttttgagataggtctccttttgtcgcccaggatggagtacaatggtgtgatcatagctcacagcagtcttgcagcctcaaccttaatgtaaattaagaatgatacagtccttcttgagtctcttgaacccggaaggtggtggtggcagtgagcagagatggcgccattgcactccagcctaggcaacaagagcgaaactcccatctcaagaatgatatgctcctttttttttttttttttttttttgaaaaggagccttgctctgtcgcccaggctggagtgcaatgacgcaatctcagctcactgcaaactctgcctcccgggttcaagtgattctcctgcctcagcctcccgagtagctgagactacaggcccgtgccaccacgcccggctaatttttgtatttttagtagagacggggtttcattgtgttagccaggatggtcttgatctcctgaccttgtgatcctcccgcctcggcctcccaaagtgctaggattacaggcgtgagccaccacgcccggcctggaatgtggtccttcttaaaactaaatttatattttttgaaattccaaaattatatctttcatgtgataaaatgagataattgagaacacatttggtgttgtggtctcttaagatcttgcctaacaaaataaaagtacaaaaaaattgagcaaatattttccccttatttgtacttgtcaatgaagaccccatgtatgtacttatatgtttttcttgttcgttacttgctccagtggtttggaaattttggttatcctgagaattctctgggaccctgttagacatgtagattcttgctagggcatacttgcttaagagattctggcgtcagtacctaatccttaaattactttgcaatcatccagttactatgtaggttgagaccctacaagaaggaatgattcattcaatgagatgtacatccttgatcccagaaactttggaactaagtattcagtttcttcaataaacagagcacttcttgtttcatagcttttgggggttggcctgaacaaatcaactaagtatgacctagtttctatagcgttctgaacaatttacagagtgaattcctggctgttcacaaattgggaattgactgcattctttggagagccaggtgtttccaccgggaaaccccatgacaggtactcagcccaattctgtttaatgttttattaaacataggggtgggttaaaccactgggttttaaatgaagcacttagagcttttcaacttgccccatagctttgtctcagaaccgatcattctattatcattagttttgagaatgccgtgtaaagagcaaagtaaccactggtggttgcactccggagcgggcgaggacggctagttcctgcagtgccc

SEQ ID NO: 41640 - DNA, 2300 bp, Homo sapien
tactactaaataaaaataaaattctgaaatgttgtttcaaacattcactgaagtccatgttatttctgttaatgcctttgtctttttaatgcagcccttagatttcccaatcaattttcaccgactttctaatttggacttcagtaatatgcagcaatctcatcagaaaatacatttagcacatggctaaattactgggttggtatttgattttctttggcattttaagatagtctgagtaaactgatagtaaatgctttggggacaatagacctcttttatcagtgtacagctttccactcagtgttaaattatttcttgaaatgggtagttggagagaataatactgagaagagaaacattaaatatgtttgactaagctaagagccccagaatatattttaaattagtaggttcagtattatcacccttaatttagttcagtcacaaatatactgtgttgtgggatagcacatttttcaaataaacagggaccagagtagcagaattagctgacactaactgaatggcaattttaaggatttatttttctgttgaaatgagctcctagcgataaatgtagaagagtctggaaatggactggtacaattcagaaatctacagaagctccttcacttatgatgagggtgcatcctgataaacacatcataacttgaaaagaccctaagttaaaaatgcgtgtaatgcccctaacctattgaacatcatagcttagcctagcctaccttaaaagtgatcagaacagttactgtagcccacagttgggcaaaataatctaacacagagcctattttacaatacagtgttgaatatctcttgtaatttattggacggtgagctgaaagtgaaaagcagaatggttgtatgggtactccaagtgtggcttctaatgaatgggtattgcttccacactattgcagtaaaaaaattgtgagccaaataatagtaagttggaggtcatctgcatttttctatattttggtgacaaattcttggtttaaaaataaaaacatctaggtgcagaattagagtgaaatatcagggttggaagggcagtagggcatgggggtgacatacacccaaggacacatctttgaaacctcacattctactttaatctagcctttcctttttattcctcttcttctcctatgtgaaagatgaaacagtccctaaagccaatttcagcccctcctcatgttagttctcagtacttcatgattgtttaaaatgtgtgatcttttcccatcatttctaaaacctcctagatatctcgccttttcactgttattgcaatctctccagaacattgctgctgacttgcaacccattcttcccctttttttttgtctttccattggcaaagtcacatggtatagttgtgagtcaataccataaaggaactttaacatacatatgcatatcaggatatcagagaaaatatgaagaataaagcaactgtacaaatttgcagcaccatccaaaaagtggtaaaatttccaccactgctgtcttacataaatatatttttaaagattaaaagcatgtgggaagataaactaaaccaatctgtttcatctaaatcagtatgatttactttgtctacatatttatagccaattttttgtcaaagttatttatacatacacaaacacacacacatatatatataaaatacacacacacacacacaaacgaattcctcagctaagcatattgctatatagatatagtgtaatgggttttgaaggataaacagttgttcctttaggaaacagaagaaatagcccaattttcaatctactgcatatattttaagtgaaattagtgggatgtcttcgtgcaagaaagatccactaagaagggcgatggttgatatttggtcttcattcaaaaaagttgctttgacctcaagtgaaagtactgagaagaacagaaaacaatactgtatgttatattgaggagctgaagcacatttattgtgacacttgatgataatataataatatgccttggtaccatattatttggtgtgccattcttagatcttatgttgccataacgacagaatatgtgtgtgtgtttagtagaaagacaatccttttttcttccagtcaattttttctttgatctacagaacttgcttcttttctctgaagttttcacaatacagcatgatagaaggagcacaggtaataattacagaaacttcaagagaaaaagaatacatgttttaaatgaaagcgttaagccccttgccttatgtcctaagacactta

SEQ ID NO: 41641 - DNA, 2300 bp, Homo sapien
aaattacctcatagtaaataagtttatcacctcactccccttgaccctagaccttattctgggagtgacttggcaaaagccaggtcaaatgttctatgctagcagctggatattccataggtgagaaacagacatttttttctccatttatgttcagaaaaaaggcagccatcacattcctcctgaaagaagagaaaaaaattttgtggatggaataatgatccctttgagattagatagaaaagatcctgacttctcactctaaccttttgaaatgtaaatacatccttctgggtgctagacaaatcactgggtatcttttaaacttctaagacacaaagatgtcttcgaggtctgggcttcatctttcctaaaatggaaatactttaaggagatattgttctagtctccctgacaccttgagtcttaatgtaaaaacctagtccaaactataaccatttggcactctcagatcagagcaatcaagcagataaatggccacagatctaattctcataagtgaagagtaaaatattcctagggaaagggaaaacattgtatatactgtaaaatgtctatgagtcaggaagctaggacattatataagagtactgaggaatacagagagcttttatttctccacaacaggctacatctagacatctaccagaaaatgtttaagccattgtaatcacatatcttttattagcatgaaaatataactccaagttcataaaatgtttgactttaaagtaacaaaaatttagataaaatctagcttccagctcaaaggactagtgactatcacagcgctagaaacatatgaaacaatcaatacaggattactgaatgcatggagaaattaatgtgttcataaaaagcaaatagaagccacccaaaataacccacattacacagccagcaaaggtagaagcacaggactcaatataatggttgcctgaataaatgcttccacttttactgtcctgtttggattgcccctactgtcttggttttatttcaatactaatcccacacatttgcatttctctttgaaaacattcaatattaccatcctcaatattcacctaatgcaggaatcagcttaaatatagcttattcagggacaaattgcaaggtcatcttaactaagttaaattattttactatttattgctttaatactgtttatttaactttcagcagcaattatcacattaaaattgcctattaaaatcaactaacattacagctgggttgaaagcttggtaagaaccagggacacattcgtgttacaactgactgaattcccagcatttagctcagtcagtgcctaacttctttattttttaaaaaattaattcctctgtctcttttatttttctttcacaaaatgttattcattatttcccaacaacagtcagaaaatgatctgctgtaactttggtggcatttttaaaattgcattattttctagccatgaatcattgtcctatggttgtctactttgcgacatagcagtggacaaaattacactccacaaaaaaaagagacgaaagcagatgatatagccctagagaactgatttcctgcttcaaatacgtttcctgattgaagattgcacacctaggaggtgagatgagagagctattctataaaagtgtccagcagatgtactgcagtaattcccactgtattcatcatttactgaattgctcacacaccagaggtataatccaatgtaaatgatctcatcacccatcagtatgagggctcaaaaattcagcttggcctcaagctaaaacttgacatttcaaggttttcaaatccacagtaagtaagcagtatgttgatgacttccaaacgtctcttctgaaacagcaccagcttttgagaaatgcaggtgtttgggatctagaaatagaagtggccagctgcccttgaggtgcttggggcacagttccatatttcctacccctgatttggccctgagcaaggaacattttgtgcagaaaataatagagttgacaccatttgcattctgctcatacaaatactaaagaattaaatttaaaaggttcattttaaaagtatcccttcttgcagtttcactggcattgctctatgtggaagacataaggcattctcatgctgtgaaatcagaagaacacagagactctccagattggcagagaatttgagagaccactcatgcatgaacacactccaaataaaggggtattggacctgaggtaagttcactagcccttctgagttgtgtttcttgaactatgaaagga

SEQ ID NO: 41642 - DNA, 2300 bp, Homo sapien
ggacaagaagaagaggggaatcgccatactgagtaaacccagtttctaacggcctgcatttgcatatcatagcttgccagcccagcttttttgctagacaagaaacatttctggagctgctttaaaagaaaaaaaacttcccaaagacccctttacctctctatctgcctaaaataatttcttaacttctgtaacaccattggagtacagaatctggtaaatatctcaaaatggaaaacttgagatttcttaaccgagtcaaagatatctataaagcaataagcagctataaggaagtgggctataggaaaagttggttaacgtttagctatgcttctactaaaagcttatcttttgtcacaaatccagcaatttggcagggcacgatggctcacgcctgtaatcccagcactttgggaggctgaggcgggtggatcacctgaggtcgggagttcgagaccagcctgaccaacatggagaaaccccttgtctactaaaaatacaaaattagccctgcatggtggcgcatgcctgtagtcccagctactcaggaggctgaggcaggagaaatgcttgaacccgggaggcggaggttgcagtgagccgagattgtgccattgcactccagcctgggcaacgagagtgaaactccgtctcaaaaaaaaaaaaaagaaaaaagaaaaaatctagcaatttagttttattaaaattatgatggtttcagggacacaattcataacaggtttataaatgtaacatgttattaattttatgtgtttttcctatctgtgaacacaacactctcaatcctttcaggtatgactccaatgagtgtgatacttaacggaactcctgggaacacagtgggctcagccccaggatttaccttacaaggccaatttaagagtggggcctgggggaagacagttttcctagggctggaagtgtccctatttattaaccctaggctggttttaggcatttaagtagttgttgaatgactgagacaaataggagacaaagagaagggaagcttctttaattgcttcttaccccagggaaaggcacagaattactaccacccagctagctttgccccaggctctacctttttccctcagtggctaaaggcccctgctgaaacgacaaagaccttggttcacgttttaagtgttctagctcccttgtcttaaaatctgccttctatttagattacatccacccataaaatctcataaagctttgacccattctcaattttcaaaaacgaactcaagctctacttgtccatgtcagactctacgcaagaaatacctaatttgcccaggtgatgaggaaaatgagatggaacaacttttccctattctctttattgtcatagcgttgttaatatcttaagatttggaggtaaacggaaatggagaatcagcaactatacttcaaccttattgtaaacagacaaaacactaacaataaaaagttttgaagttaaaaggacgtaagttccaccttctatcctttgtagagatataaaaacaaaacaaaacaaactctgactagacaggctacccgctacacactcaaatcgacctccgcgaccggagggggaagcgcaactggttatggcaacccccctgccaccccggcccataacgcttcaccacgttctgtgccacggccggaagtgacgcataacctgcgacgccagtgcctgccgcccacggccgcaggagtcgggcttcggtcgcaccagagacagcggactttcctccgatggttgcagcagagggatcatgacggggaaaaagtcctcccgggagaaacggcgcaaacgtagcagtcaggaggcggccgcagcgctcgcggccccggacatcgtacccgcgttggccagcggcagcagtggaagcactagcggctgcgggagcgccgggggctgcgggagcgtcagctgctgtgggaacgccaattttagtggaagtgtcaccggcggtgggagcggcggcagctgttggggcgggagcagcgtggagcgcagcgagcgccggaagcggaggagtaccgactcttccagcgtctcgggctccttgcagcaggtgcgtgcgcgcccctctggccgcttcctggagctgctgctttttcggaagaagtcgggcttccagagggatggggcgcaggctggagctcactgctagcgcggcaatctcaaggtcgtccgtccttgaggttcatgttcctacctaagtcctggtgagccccacactcccatccgtgtcttgaatcttgaacttcaagtttct

SEQ ID NO: 41643 - DNA, 2300 bp, Homo sapien
atggttccaatgactggaggaacaccacagtcttttgtctcgtgctggtttaaataaaacgatacagacacaagtggaattgttttaaggagcggagaatttaataggcaagaaagaagaggctccctcatacagaaccagagggaagagggctcccagatgaaagagggaaccttgggtgcagcagacaagagccagttatattatgaggctggaggaggtggtgactaatttgcatatgacccagggaattggtttgaccaggtatgtcattcacgtagcctgcaaaaaaagtggccctcccaccctagccttttaatatgcgaatgtagggtgccacaatgttctacacatgtggggatatgtggggatggccatgttgctaggcacatgtggggacaagaagaagaggggaatcgccatactgagtaaacccagtttctaacggcctgcatttgcatatcatagcttgccagcccagcttttttgctagacaagaaacatttctggagctgctttaaaagaaaaaaaacttcccaaagacccctttacctctctatctgcctaaaataatttcttaacttctgtaacaccattggagtacagaatctggtaaatatctcaaaatggaaaacttgagatttcttaaccgagtcaaagatatctataaagcaataagcagctataaggaagtgggctataggaaaagttggttaacgtttagctatgcttctactaaaagcttatcttttgtcacaaatccagcaatttggcagggcacgatggctcacgcctgtaatcccagcactttgggaggctgaggcgggtggatcacctgaggtcgggagttcgagaccagcctgaccaacatggagaaaccccttgtctactaaaaatacaaaattagccctgcatggtggcgcatgcctgtagtcccagctactcaggaggctgaggcaggagaaatgcttgaacccgggaggcggaggttgcagtgagccgagattgtgccattgcactccagcctgggcaacgagagtgaaactccgtctcaaaaaaaaaaaaaagaaaaaagaaaaaatctagcaatttagttttattaaaattatgatggtttcagggacacaattcataacaggtttataaatgtaacatgttattaattttatgtgtttttcctatctgtgaacacaacactctcaatcctttcaggtatgactccaatgagtgtgatacttaacggaactcctgggaacacagtgggctcagccccaggatttaccttacaaggccaatttaagagtggggcctgggggaagacagttttcctagggctggaagtgtccctatttattaaccctaggctggttttaggcatttaagtagttgttgaatgactgagacaaataggagacaaagagaagggaagcttctttaattgcttcttaccccagggaaaggcacagaattactaccacccagctagctttgccccaggctctacctttttccctcagtggctaaaggcccctgctgaaacgacaaagaccttggttcacgttttaagtgttctagctcccttgtcttaaaatctgccttctatttagattacatccacccataaaatctcataaagctttgacccattctcaattttcaaaaacgaactcaagctctacttgtccatgtcagactctacgcaagaaatacctaatttgcccaggtgatgaggaaaatgagatggaacaacttttccctattctctttattgtcatagcgttgttaatatcttaagatttggaggtaaacggaaatggagaatcagcaactatacttcaaccttattgtaaacagacaaaacactaacaataaaaagttttgaagttaaaaggacgtaagttccaccttctatcctttgtagagatataaaaacaaaacaaaacaaactctgactagacaggctacccgctacacactcaaatcgacctccgcgaccggagggggaagcgcaactggttatggcaacccccctgccaccccggcccataacgcttcaccacgttctgtgccacggccggaagtgacgcataacctgcgacgccagtgcctgccgcccacggccgcaggagtcgggcttcggtcgcaccagagacagcggactttcctccgatggttgcagcagagggatcatgacggggaaaaagtcctcccgggagaaacggcgcaaacgtagcagtcaggaggcggccgcagcgctcgcggccccggacatcgtacccgcgttggccagcggcagcagt

SEQ ID NO: 41644 - DNA, 2300 bp, Homo sapien
tcagtcttttctgagcctgtgcttttccctgggcatgcactttcactttctaattttttccatatatgtagttccttttgaatatcttagtctttattatcttgctcccagaagaggaaaatgaaggtgttaggggaatggacatcagcctttttttttctttttttgagagaaagtcttgctgttgtccccccaggctggagtgcgatggcgcaatcttggctcactgcaaccttctcctcccgggttcaagcgattctcttgcctcggcctcccaagtagctggaattacaggcacctgccactacgcccagctaatttttgtatttttagtagagacggggtttcaccatgttggcaaggctggtctccaactcctgacctcaggtgatctacccacctcggcctcccaaagtgctaggattacacgcatgagccactgtgcccggccgggcatcagccttttaaatcctcttggaagtcacttcagctcaagtggtagaggcttgcatcaaccgggggaggtgcaacaacaatggctgcctgcctctttgttgttgctctgtgatcaaagcagcaatcagtgatcagagaacagatctctgatatttggaggacaggatcctttttgccaaccctagttcctacagctgtgagcaaggttctctgggaacagatgcatgactgcctgccatggggctagaagggtgaggtgtgggtaactgctactgtgccaagagcaggcattgatcaaaattaacctcaatttacaatccaagccttcccctagaagttgcaagctttcaaatgactgcaaagtttcataatagttacatcagacagattctgccagtgccatcgttgtctaggtgggaaaacagatgcctggtgcttccgactctgccgacttcccagaatattctctagttcttaagccctttgttggtaaattggttcttcggttgtcctgctgcctgctaggactcaggtctcctaaggcccttactacttttctgtaagctttaaatattcaaagttgtattcatgtattttttttttcattctccttggccttgtgggtttaattaagcctttattaaaaaacataagtatttattgtttttagtggaatttgggaaggaagtgaaaatagatgagtttgtttagtctttatctgggagtcttacctctttatgtacacttatcttcttcaactagactgcaaactctttgatttagctgagtcagggatataattctttttatccctctcagcaggtaatttattgctttccacatagtaaatcataatctgctggttgaacttgttaagtaaggcagtgatgctaagtgattgatacatgtcacaaactggtaatcattttaatcccagtgcaattattaatgtactgtgttcattgatatatataattatatataacattatatattatataatattactctagccatttatatatttctgtattaggtggggtttttttgtttatttgttttagcttatcagttatcattagtgttagtatattttatgcgtggctcaagacaattcttcttcttcagtgtggcccagggaaggcaaaagatttgacacccctgttctagctatgtagaaacacatgctgtactatactactgggctctaagtcaatgcttcataatgtgaaaaagtcctcagtatatttaggtcttcttaataataaatttcattatcttaattgcatgtatgtttcgtttaaccagggatttcttagggtaacagtcactaatgtgtagaagtgaagatggagattgagaaaaaacccagtcatgattatttattgccctttcttttttccttgttctctatgttaacgtattcttatcaaagaaacactaaacaaacttctctttatctcatgtaattctctatagtagttcatatgaattatgtaaggttcaattttaaaacaatagattcttaagatagtatatactctaaagtttgtctagacactaaatgaaaatgagtgctttgacagtttatgtcctaggctaagtcagggtacgaatatgtatctattaattatcttgtctttccagtccaaacaggagctttacagaaatgcactgtatgagtggccattccaattttgtatcttgtgtatgcatcataccctcaagtgacatctaccctcatggcctaattgccaccggtggaaatgaccacaatatatgcattttctcactggacagtccaatgccactttatattctaaaaggccacaaaaatactggtg

SEQ ID NO: 41645 - DNA, 2300 bp, Homo sapien
tgaaattacacatttccctgtgtaaaagaacacaggggcaattacagcacgaggggaaaacttttataaggggttggtggaagcaagactaagaaaatatacttacttgattggttaaagtggaaagtccttagttagaggtttgtctgtttctgttagttaagcttaagtttcattttactgtttacattgagttgggctccagagctggaactatctcaacctaatggcctccaaattaacattttttaaacaaggcaaattcttcatgtgtgaaatgggaataatactatctaccttgcagggttattgtgagaactaaatgagagactgtgaaaattggtaaactgaatactataccaagttgaaaaacatttcctattatataggaggcagtaaattagatggttaagattcatgtaaaataaaggtcttgataataataaaatgtagtccggtagaaaagacagacataaaagaacatattagaatgcagtaaatactatattgacaacagacaaaactgcattggttccccagaggaactagaaaaaaacagaagataaactggtgttgaactatgacagatggagaaagtggaattctaagtttaaaaaaaaaatgcatgtacaaagagcatagagacatggagagcatacagcataatgtgttcagggaattgtgacaaattcgaaatgtctagagtaagagagataacagagggagatgaatctagtaaaacagattagggagattgtgtgaaaggccctatgtaatgctgtactataagaatggaaagccggccaggcgtggtggctcacgcttataatccagcactttggaaggcagaggagggcagattatgaggtcaagagattgagactatcctggccaacatggtgaaactcgtttctactaaaaacacaaaatttagctgggcatggtggcgcgctcctgtagtcccagctactcgggaggctgaggcaggaatcgcttgaacccgggaggcgagggttgcagtgagccgagatcgcgccactgcactcagcctggcagcagagcgacactccgtctcaaaaaaaaaaaaaaaaaaaaaaaaaaaaaaaaaaaaaaaataatggaaagccatcacaggttgtcaaacagagaaaaaacaattaagtgtatatttcagaaagataattatattttaatgtgtaggattggctggagagaaggggtagaaaggccagagaaatgttgaaataatttaagtaggactaattggtacagatttctaacagatagctagaaatacagatctagagtttggagaagacaatatgggaatacagctctagaaataagccaagtagtaaataatccacccagggaggggatatgatagcaaagaagtatcaaaagtcagcatttcaagaatgatctcccaaaccaggggaaaagtgattccaaacctagagtaggagttttaggaagggagaagtcagaaaagtgtgaattgggcttagcaatttagaaaggtttgtggaaaagtgtagttggatgcgagagaatagcggatgggaagaaaacaaagtaaggagacaggtcatgtttaccctggcactcaataaggtctgataatgactagcaagtagcaccacgggtgggtgggcggcggggttgttaaaaatacgtatctcagctctaactcagacctactgaatcagaatctacattttaacaagccgccagagaaaagtagttatacctttaaaaaattgacttggaccaccgtatttgctaaatttgacaacagagagtaggagattcagataacttgaaacggaggaatagttcaatgattaatagttcccaatttggcctcaagctttctcgttttaattgaaaaacaaggttaacttgcaaaaacctcgagattctcagggaaaagcagtgaggatgacctaacagtagacaccaaacaacctcactcagccattccgccatgcccagcgcgaaagactcaggtttaaaatatccggattcggcgcgccggatgtccacgccagctggcgcggcattatgggaattgtagtcccggcccgcttcccgatttaccacaaactgttgggcccggagtcggaagagacccgggtttgggaaggaccccagggtcaggcgtcctggtggaagggcgggcctctttctctcttgctcagcagggagtccagagccctggaggaaagccagctcagctccgcatcggcgtcggcggttgggacgcacacactctgcgtcatggagggctgaggccgatg

SEQ ID NO: 41646 - DNA, 2300 bp, Homo sapien
tcttgaacttcccacaagaacagtccaaataaggcaactgctcaaactttaaccagtcaaataatttctttgctgtgctctgcatttactctctgaaagctttcaactacctctgggggagccccaaaccacttatgatttggagctgcctaattcatgaattgctgtctgttcaaataagctctttaaaattttaatgtgccaaagtttaccttttaacagataggaatagtacagggtgcactgaggacatataatgaggtggggggccagaaggagttggagcactaatctagtatggactggcagagaagacctctctaataaaagacatttgggttaagacctgaatgatgaacaggactttggacagtgaaaagcagagggacaaagattccaggaagagagaattgcagtgaaaaggactagagacagaaaggaacttgaaacacaagtagtcttacaataaacttaaaatttgacataacctaattactaaccaaattacaacttgatataacctaattccaatttgatataaccttaaaagcaacagaacctaatacataatgatccaaagtcaaataagatatggtgcctactctaaggaagctcagaggcaaataagtgagatgtattcctattctctattcctttttcatcatgaaaaagaaatggggacagggatcaatacttactacctaaatgagcttaagcaaattatttaatctctttaaaacttggataatagtatctgtcctgccaatttcaactgttaatatctgtcagggtccttaagtgcaaggaacagaaatcatctataaatgatataaaagctgaaaatgaatttattaaaggacattaagcagctcacagactctcccagaagctgaagaaacaagctagaggttctcctcccaataaagcctctgagtacctaacactgcagcttgcaacaacacactgatgctggacactggttgctggtgatagaacattgcagtctcggaaacgatgtagttactgcggctgtcacccttacttcaacagactctctgaagtcctgcttctggttgtcattcaagtttgagttgagtccaccaaattagattggagagtctagcaagcaataatactcatgtcccagtaataaggaagactaggaaagccagtatctgtcactttcagttcctgtaagggtgttggggggcagggtaagggagaaactctgccaaaaggatgacaaatggccactgcaaatagggtgagctcaaatgagataattacatgaaaatgtttcacaaactaagggagaattcagccacataacattatctcattttgtgttgtattgatttttaactcctcgaaggcaggcaagttggaaataatgtgtaaaataatgttaaaatcccaatacatatgcaatcacatttaagctgttatcaatgaagattggaaggaaacatacagtaaaagttattttattagagaagtgggatttaaggtgaagtagttcttaaattaaaaaaaaaaaaaaaaaggacactttccattgaattcacagtcttccccacaaacttggatccaaattctaatgaaaggaagcttaaagacgcaaagcttctggtgaaagcaggaacggaacagttggtgccagaatcgcatccatacttcatgatgcgttgtgtacgctatgccgtcctaataggaaggaaaactaccacaaattaggagtttagaaaattgcacaatgctgcctaccacttaacttcaaatgtaacctgttaacaacgttagccgacgtgaggttacctagggacatagcaaaactcgctagagttacttcaagtaaggcacacggaggttgctctgattatcaagaaaaccaaacgttcacataaaatgtttgtcttccagccgccccgctgttttccactttttccaaaaagcactgaagcgtggtgaagaaacaaacatatcctcaattctcgcgagagctccgtgtgtaaccaagggctgaggcggaggattggtcactcaggatgaggagcctccgctatcccgcccccgttgccgggatacgccgcggcgcacggcagttagtgggtaggcctgagagccgaggaaaactgagcgtgggcctcagaaagaagttaaggcacccgcgagccgggcaactgccctccttccgcgccggcggaggtgagaatccccgggtcccatctcttcctccctccctcccacgtctgttctcttgccttggagatgctgatccgctccaaacaaaacaaattcaa

SEQ ID NO: 41647 - DNA, 2300 bp, Homo sapien
ttcttgtaccgtttttcaccttggtctgtgcacagagttacttggtcgccgcggtgttgtaagcctctcctttccccattgctgagagcttggatttgtttgtcacaatgggtgggtctcagtctcccatccctgaggccactgcaatgcgacagtgggacacgtctccccctgggtggggtgactgaagacctcttcttgaaggagaatgggaatccccgacaagcccccagaattgttagaaagaaagcttgaagtcgtaaagaaagacgagtactcaaacaaaggatttctcagcaaagcaaatttacttttgcgcagtagggtgcttcttacagggctgcttgtcatgagagcacactgaagaaagtagagtagaagcttttattcctaatgtgactcctgccctcgtgccctttccccattggctggggtcggactgcacaatctaaactagacccaattggctaaacatttaaactttcttagataaggtgggcgcatgatgggagagaggggagaggaggaaggggtcatctacagaggactagagagccagtcttttcctaaataaggaaaggaatgtgagctggggctgtggcatgcctgggcatgtagtaaaatcagaaagaagaaaaaaggagaagaaaggcagggggtacctggaattagagaataagtagctgagcaggctatttgaagagaaaccttgccatatctcacatcttttatatcttctcatgcctgtatgtattatatgaactgacataaagggagtcttttggcctttcctgaggtcgtatagtgttatgttggattttgcatacctgaagtagagaatcttgttgagtaataatatgaatgcttgtttaacaatgtaagccctttagtacttacatggtcatcttaggatggatttatatccatttgtttttacaagattaaagttttcttattttttcctgatttttaagggtaatagatactcattgcaataaggcggaaaataccaaattgtataaaggagaaaataaaaatcaactataatatcattatcgatcatcattactattttttcacatagtttttaaaatttttatttttgtctatattttttgtttttttaaaagacggtctctctatgttctccaggctggcctcgaactcctgggttttaaataatcttctcatctcagactgccaagtagctgggcctgttggtgcatgccaccatgcccaaacttccagcctttttttgttttaaaaaagtagagttttgaaccaggcacagtgattctcacctgtaatcccagctacttggatagctgaggcagaaggatctcttcaggccagtagttcaagaccagcctgaataacatagtgagcccttgtctctaaaacaaacaaaaacggaattataaataccatcttgtaaactgccttttaatttttattttatttacttattttgagactgagtctcactctatcgcccaagctagagtgcagtggcatgatctcggctcactgcggccttgacctcccagattcaagcgactctcatggcttagcctctcaagtagccgggattacagacgtgtgccaccacgcctggataacttttgtatttttagtagtgatggggttttgccatgttgtccaggctggttttgaactcctgacctcacatgatccacctgccttggcctcacaaagtgctgggattacaggcgtgagccaccacacccaacttaaactgccctttttatatactgcagcttatttaaccattttctgctgtggacatttaactcctttccagttttgaggtattataaataatgtctacatatagaatttaaaattttcctgaaatgtatttttaaatagtcatagaacattaaatgttaaagaaatatgttaataaattgaacaacagtatttaataattcagacatttaaaaaataaggaaatttttacaaatcaagtagaattttgtttttttaaaaaattgtctttgcagttttacaataaaagatgtacagtgttttttctggtttactaaaaatgaaatcttgtttgtcatttagatgccacctgggacagcaagaccaggttctcgtggttgtcccatagggactggtggagttctgtcttctcaaatcaaagttgcccatcgccctgtaacacaacaaggtttgactggaatgaaaactgggacgaaaggtacctattttaagataagtatgacacttgggcctgtgttttgtaagaaataaataactgtgaacaatttaaa

SEQ ID NO: 41648 - DNA, 2300 bp, Homo sapien
attaacctatcactatttactctctttcgctcatagataccaacttctatagttttcacaatcaccagctaagcttgtggatccacatatcccctacacaccttctacacattcatatcctactactagaataaacaacctaaactcagaaatttccctaccaaaaaaaatctcaaaataaccaaataaaagatgaacatagtaaagcaacctggaatttcaatttatttttgtttcactgttggagaagaagtggtatcttcacttggagcttcaattacaacagtaaaacaaatgtgtttcctgctgctacaatttgtataggtatatgagctcaaagaaattgaaaggaaagtatctattttcataaattaaggatactgaagcccagtggaattaatcttttggaaggaattcattctaaatttgattactgactaccaacagtgtttcttctttcaatgtaggaagatgagaactaatgttataaagtattccattttacagaggagaaattacagcataagaaaagtaactgactttctaaaggccatatgatgtccaggtgtaaggtctttttgatgctttgagtactttgctcctgttataacttggcagtaaaaccactgatgatggtgtcataaaagtaagtaaacaggctgggcatggtggctcatgcctgtaatcccagcactttaggaggccgaggcgggcagatcacgaggtcaggagatcgagaccatccttgctaacatggtgaaaccccgtctctactaaaaatacaaaaaaattagctgggcgtgatggtgggcgcctgtagtcccagctacttgggaggctgaggcaggagaatggcgtcaacccgggaggcagagcttgcagtgagccgagactgcgccactacactccagcctgggtgacagagcgagactccatctcaaaaaaaaaaaaaaaaaaaaaaacacacaataataagtaaacaaaaacgttgaaactcaatagaatacaaaacttggtggtatctttacaatttgaatccctccctacctcctttcttttctctctctctcctttccttccttccttttcctccctccctgcctccttcccttcctcctcctcctccttcccctccccctcctctctcttctcttctctctctctctctctttccctctccctctttctgtctttctttcttgacaggtaccacttgtcacccagactagactgtggtagcacaatcatggctcactgcatgctcaaactcaagccatccccccacctcagccacccaggtaactgggactaaaggcacacaacaccatgccctgctaatgtttttactttttattttgagtagagacaaggtcttgctaagttggccgggctggtctcaaattcctgagttcaaattattctctcatcttagcttctcaaagtgctgggattacaggtgtcagactctgcacctgacctcagtttgaatgcttctaagcacaaaataccatcaggacaaacataaattaatttagcaacagtatatctttcaaaagtatgcattttcaatattgtaaactctaaatcagtaagtaaaattgttaatactttaataaaattttcaaagagtaattaagaaacacaaaggtaggctgggtgcagtggctcacacttgtaatcccagcactttgggaggctgaggcaggggtatcacctgaggtcaggagtttgagaccagcctggccaacatggtgaaaccgcatctctactaaaaatacaaaaattagccaggtgcagtgccgggagcctgtaatcccagctactcaggaggctgaggcagggaggagaactgcttgaacccaggaggtggaggttgcattgagccgagatcatgccactgcactccagcctgaatgacagagcgagacttcatctcaaaaaaagaaaaaaaagaaagaaacacaaaggttaggcaaacagccttacttgttatactaaaaaaggaaaagatgactttaagaaattattcttctagtcaatcttttgctaaggaagtctagtttttttttttaaatcacctgttcactgggtacaaaggttaaaacaaagtgaaatgtaatcatacgatgtactttttttaatgccgttgaaacagagttaatttcctttagcacacaagtcttagagacaaaagaaaaaaaggtaagatatgtatatttatagctttggttattgttgtattttttttaatcatatttaagtttgttaagtctgtacaaccatctttgcctttaagaagt

SEQ ID NO: 41649 - DNA, 2300 bp, Homo sapien
ccaaagtgctgagattacaggcgtgagctatcacgcccagcccagatttcttttatttatttgtttaggacttgttcttcaagaaaatacctgtcagatagtggtcaatcaactagtattttttgaatactttatgttcactgctgtacaacgtattaggtcatgcttattcagttcacaagagtggaaaaaatcaggtgaaggattaacatgagcttaagtcttccagaacaattttatcaagatgaaattcaaacaaatctataggattgttaggcaaaaaggagacgatactatgaaaaaggatagcataaaatatctgcatttcttctatgtctttttagcatggctttttttaatcttatctgatgcctaatctgttacttgaactgtatatataatccattgcttatggactttgaaaaattatctcgtctactcgttccttttttggaggttccttctttcatacttttagaagagaagaggttggccaggcacagtggctcacacctgtaatcccagcactttgggaggctgagatgggcggatcacgaggtcaggagttttgagaccagcatggccaacatggtgaaaccccatctctactaaaaatacaaaaattagctgggcgtggtggcaggcgcctataatcccagctacttgggaggctgaggcaggagaatcgcttgaacctgggaggcggagtttgcagtgagccaagatcgcaccactgcactccagcctgggtgaaagagcgaaattccatctcaaaaaagaaaaaaaaatgaggtcttcccttctaagaattttattttgttcaagttgtaggtccggtttcaaatgtcactgttaactcttatgtctttgttaactttgaaaagttatttacatgtcagatccttagttttctcatctgtaaaatagagatgatagtactatcttgtagagtatcactttggatagtagagatagcatataaataacatgtagtatagtgcctggcacagaacagatgctcagtaaacaagagtctcaaatgtcattttaatcatcaccaacaccattcctaccttttttttggtgttgttagctaataacatttttgtcacatccttatttttttctttgtgaaaggtgggatagtggtgagtacacagtaactgttatttcatgtgttcatttcctagtgctgctataatagaatatcacaaactgggtggcttaaaagaaacacaaattttctcacagttccagagcctggaagtctgaaatcacggtgtcagcagagccatgcttcctctgagactctagacagaatcttgctctgcttcttcctagcttctagtggtatccattagctcttgatattgcttgacttgcagctgcatcactccagtctttgcctgagtcataacatggtattctccctgtgtgtctctgttgtgtctgtactcttcttataaagggcaccatcatattggattagggcccacccctaatgaccatatcttaacttgactaaatatgcaaagagcttatttccaaataaaggtcaaattgacaggtttatgatgttaagactccagcttacctttttgagcagacacaattcaacccacaaaattgtgggaaaatatatgttatgacctatttagggaaaaatatcttctctccaaagatcacttctatggactttgaatcagacattgtgtttaaagttgtacatatgttttgacattgtctttatcctcccattggtagagttgtcctatacttattcaggtcttatatgtagaaaataaaataaactaaggctatcaacttcttgtgaatcttagactgaaaatagcaggatttatttttattcttccaatttaggaatgtgctttgtagcattattgagtactaatgatatttgctgtctgtatttaaagatgctagtagtttaaatttacccccattcttataaactgaaacctattttagaataattattgataaaatactaattaaaactttcccttcttattttcctttaggaaatagctcactcccaggtgaaacaggaggcggtattgctgcatgaaaaactttatgagttggagtcccatcgagatcaaatgattgcagaagacaaaagcataggatctccaatggaagagagagagaaattacttaagcaggtgggcaaaacaaacatacttattttaagatgtctggttttggtacatgtattgatttgttttttttaaagggatattaatgcaagtagtaaagctagtaagtgtattgtctaa

SEQ ID NO: 41650 - DNA, 2300 bp, Homo sapien
acagcacccaccgatcctgacattagttatttcagaagcacactaagaactgaccgcacttctcagtgtcaccaaactattcttatctgtcaaagtttcatttcaaatacttctgtaaggtctaggtgtaccctgctggtgtttgtgatgtcctacattactcttgatctacttttcaactatgaaacaagggaaaaattggaggtccagagctcaggattcagatattattacctctgctactcacagcagagcaagtaacttagcctgtgtggaacttcatttttctttcttttttttcttttttttttttttttttttagacagagtcttgctctgtcacccaggctggagtgcagtggcacgatctcggctcactgcaacctctgcctcccaggttcaaacaattctcctgcctcagcctccagagtagctggggttacaggtgcacgccagcaagcacagctaaattttgtatttttagtagagatggggttttgccatgttggccaggctggtctcaaactcctgacctcaggtgatccactcccaaagtgctgggattataggcgtgagccactgtgccaggcccactgtttttgtttttttttttcgtgatgacaaatttaaagtcatctcataggaatagaaaatagctttttagtagaagctcttggaatttaaattgagactgaatggaaagatgaaagaaaataaacttattaacatttaatgagaaccttcaaagaactaggcatagtaccaaatggttttatatttttaaacctcatttattcctctcaaaacacctgggaaggagatatttttgccatttcacagctgttgaaactgaggctcaaaaagactaagtaacttttctcagctacacatgtggctgagccagtatttgaacccagttctgtttgcagacagaacctgggctttttcacacctgcaaactggaaacattaattggttcttaagatcatcatcgatgtgataaaacctgggacagaaattagtcaagactagctgcatctgccttttcctctggtgggtaggaaaaggaggagtataatgatttcctcaggcatgaaggtcgatgatgagcaaagtgtatactctctaatctaatgtcataattcatattgtggagtaattatctggataagtgtagggtctctgacctcattctagatattgtacattccatggctattttcattttggtccatgaactctctttgctctcatgagcaccatttttatcccaatctaatcctgtatgtttgtgtttttacacagattagtttttaaatgttatatataatttgcttctgaaacaccattgctcaatgactaccaaatctttctcattaccaaaatccttctatgccaacttcttcaagaaatttgatcacctttagatgaattgttaatgaaaattaaagctatagccggcaacatgggtatctttgggctaatggccaaccaacaggccatctgtgtgaaagaaaacaggctaacaattttggactctggtctcttggggctacattgagcattgacctcaccggtgctcactgaaattaattgcttttcaggttgtattttctcatcacggaaaccttcttctcccaattcaaaccatgtgggttaaaatgagaaaacaaaagccaaaacggcttcccacacccaaaagctccttctgtcagagatcccagtagccccgggagagctgttagaagtctgagaaggattggtcatcatcgcataccatacataggtggagggcttgttattctcagtttcccgcctatgagaggatacccctattgtttctgaaaatgctgaccgggacccacacttccaacaaaaattcctctgcccctacagcagcagcaaaagcagcagcagaagcaacagcaacagataagtgttttgatgaattgcgagatggatagggcttgagtgcccccagccctgctgataccaaatgcctttaagatacagcctttcccatcctaatctacaaaggaaacaggaaaaaggaacttaaaactccctgtgctcagacagaaatgagactgttacagcctgcttctgtgctgttccttcttgcctctaacttgtaaacaagacgtagtaggacgatgctaatggaaagtcacaaaccgctgggtttttgaaaggatccttgggacctcatgcacatttgtggaaactggatggagagatttggggaagcatggactctttagccagcttagttctctgtggagtcagcttgctcctttctg

SEQ ID NO: 41651 - DNA, 2300 bp, Homo sapien
tcagatacatccttttccaagagtgcagagagcagcacatttttgggtaccacttcttcagatatgagaagatcaggcacaagaacatcagaatctaagataatgacggatatcatttccataggctcagataatgagatgcatgaaaacgatgagtcggttacccggtgaagaaatcaaggaacccggtgaagaaatcttattgatgaataaataactttaattattttgtcatcaaaagacctttctttatgtcttctgttaatgtcatgagtttgaaactgccgagacaaacattctggtgtcttaaaaggaggacagactcaatacaaattatctctcggttataaaatttaatggaaaatacacaagaagataatttaaggtgtgagaaactcatcaagtaaaaacattcctggagagtgactttgaaagatattttctctaggctggttcactttaaaacaaggacatttagatatttaccttccccaggggcattttgagaacatcagggaactcaccactgcctatgcgccccctcaccaccgctgaagcaaaaagaacacacctgttcatgttttattgacaaaacagttgtgccatcaagagatgaaactaaattaatggtaggaactcttagcattcttgaactgtttaaaagtcgtcaggggttgctctcacatgacaaaaggtaagaaagaaaagatacttttccatttcttttcttttcttttttttttttttttttttgagagggagtctcgttctgtcgccaggctggagtgcagtggcgcgatctcggctcactgcaacctctgcctcccgggctcaagcgattctcctgcctcagcctcctgagtagctgggattacaggcacacgttaccacgcccggctacttttcgtatttttagtagagatggggtttcaccatgttggccaggatggtcttgatctcttgacctcatgatccgcctgccttggcctcctgaagtgctgggattacaggtgtgagccaccgcacccggccatatttttccatttctaaagtatccataatcgtttgagacaacacagtgttccagaagaagagagaggaagaggggaattccagaaggtaatttcctagctggggactcatggaccttgagtcttttagagctgaagtgcccttctttctctcttcccccaggcatccaggattattatgtttcactgaaagaaaagcaatgcttttcaaagacttattcaagtttattagtgacttttgtggctatccataccaaaagtatttcaatttacaaagacagaaaatagggataaagtttcctttttagaaattagtttcggctgggcgcggtggctcatgcctgtaatcccagcactttgggaggcccaggtgagcagatcacgaggtcaggagtttgagaccagcctggccaacatggtgaaaccctgtctctactaaaaaaataaaaaaaattagccacgtgtagtggcacacgcctgtaatcctagctactcaggctgaggcaggagaattgcttgaactcgggaggcagaggttgcagagagctgagatcacaccactgtactacagcctgggcgagagagcaaaactccatctcagaaagaaaaaaaaagaagaaattagtttcaagtggagggatttagcgacatgcatcatgtcttttctggatatgtatggatatgggagaagaacttagggcatgtttcattgccctcttcaattcttaccataccaatagctttcatttactgagtacctactttataataggcactttagaacattgtatcacattaaattctactatcttatgaaaggtgagtttattttacagatcagaaaacagaagttcaggtaaatcagataaattgcctaagagcacctgctgtgatgtgcttccaatctgaggttctctccatgatccatgaaggtgaatagtcagacttgcagcaaaagtctttaggatcaacacaggcccagcacccaagacacataaggttccttaactcaggtgttctttcagctcttgggaaactgttttcctttcctttagcttgggtatctataattcttcttcctcacgagaataaacacacattttactctcacctgccacttcccctactatccattgttagagtccttcactcccaaatttcgccgcagactcccgcccagtctcactcaccattggttgggaaagctacgaagctccgcctttgaatagtgatgggctataaaagacggcacctttgagggaaaaggca

SEQ ID NO: 41652 - DNA, 2300 bp, Homo sapien
tttatggccaaaaaccatgaaaaaatgctcaacatcactaatcatcagggaactgcaaattaaagccacatgagataccaccttatcccagccagaatggccattactaaaaatttaaaaaaaaaatagatgttgccatggatattggtgaaaagggaatgcttatacactgttggtgggaataaaaattagtacaacacctatagaaagcagtatggagatttcttaaagaattaaaagtagatctaccctttgcaatcccactactgggtatctacccaaaggaaaaaaagtaattatatcaaaaagacacctacacacatatgtttatcccagcacaattcacaattgcaaagatatggaaccaacttaagtgcccattaactgatgggtggagaaagaaaatatggtatatatacaccatggaatactattcagccataaaaaagaaaaaaataatgtcttttgcagcaaattggatggagttggaggccattcttttaagtgaaataactcagggatggaaaaacaaataccacatgctctcacttataagtgcgagctaagctatgggtacacaaaagcatacagagtggtataatggacattggagactcagaaggggggaagaagggagctgggtgagggataaaaaactatatgttgggttcaatatacactaccgggtgatgggcagactaaaatctcagctttcaccactatacaattcatcaatgcaaccaagaaccacttggaccccaaaagccatatgaaatataaatacatataagacctatattttatatattatataattatatattttataaaatatataatatatttatataactaatatataatatgttattattaattatttatataatataggccttaaaatctaaaaatgaccagttttagagaacttttctaaagaattatagttaagataatccattaaccagaacttgtagacttgtagggcatttggcatcagaacttggtttttctgcctagttgttttttttgttttgttttttgttttttgtttttttttttggagacagagactcacttcttcacccaggctggagtgcagtggtgtgatctcggctcgctgcaaactctgcctcccatgttcaagcacgtgggccaccacgcctggctaacttttgtatttttagtagagatgaggtttcaccatgttgcccagggtggtcttgaactcctgacctcaagtgatctgcccacctcagcctcccaaagtgctgggattacaggtgtgagccactgcgtccagcctctgactagtttttaaaagatatttttattgcatttatccaagaaaacacatcatattgcaatgctttgagaaacaaaaagatctgttctcattttactcttaacaatattaatggttgcagggagccgaaggctcgtgggacgtgagccactcagcattccactggaggctatatgatcaaacagcaaactgtttattatgaatgcaggatgtgggcaaactcacgactgctcctgcccacagaaggtttgctggaggcaatcactccctggcaccgaggttatctactgcgacatctagagaatgcagtgttgcatgcctactctggaccgggcagctgaccccttcttccatcctccttctcactatctctcttgcctaataaatacagagggctgtgtaaagctcagggcccttgcccactagaggcaaggtgcccccgaccccttcttccaaatatactcttttgtctttgtcttttattcccgcattcgtccccctttgttcagtcccctaggtccgtgcgggttacaagtggcaccctgactagccacagaatcgagtgctctacaaatggttctttaaaatccagagccgagtaattaacattcttttatgaaaacacacttattaactttcaaagaaaatcttgtaatggtttatttaaaaaataactaaaaaccattatagtacctgagataaagcagtcttcagactgagtcacaaagctgttgggaacccccacccccaccaacattctgatgcccatctgacagtgatgtcataatgtcctagttagacacaggacctgctgggccacagaaaggaggctctgggtagacgcactagattactggataaatcacttcaatttcccaatgaattttatattgtttatttttatacctggagttttttccttaaaaagtagcactttgaagcctactattgaaggtgagagagcatttaaaacttttataaaaatagtaggtaa

SEQ ID NO: 41653 - DNA, 2300 bp, Homo sapien
gagaggttaaacaagttcctccaaagctcacccagatcatgagcccagtgagaggtagtgaactgatgttccccagatgatttctagatctgaaaaggtggagttggctctgcctcatcccacccccaggttaaattgaacttccttaggcagtgtggaaagccccagacatcttctttgaatggttgatgccatttaggctgtctcaattcccttttataagttttaactaatctcttatgaggggttaggaactatgagggggtggtgggcaggtgggggatggatcctgaaatagcttgaatagcttaagagccctggactacagcaagaacaagggtgatttacaagggtgggggtggggaggggccagaagctggaccacctccactcctcccaccatttggcccagagtcatcgttaatgagagttagttgaataaggcatttattcaacctggaaaatgcccagtggcttcagcccttatagtatggaattcctatctcttggcggggcgtggtggctcacacctgtgatcccagcactttgggaggccgaggcgggtggatcacgaggtcaagagatcgagaccatcctggccaacatggtgaaaacctgtctctactaaaaatacaaaaattagctgggtgtcatggcgggcgtctgtagtcccagctactcgggaggctgaggcggaggttgcagtgagccaagatcatgccactgcactccagcctggcgacagagtgagattctgtctaaaaaaaaaaaaaaaaaaaaaatcctatctctttttctgcacttggcccctccccagaactttgtgattggtcccaagagggaaaataaaacatatttggtggagaatgggtatgcactaaagttgcactgctagtgggggcccatagacctcgtggtgggtgaggatttagacacaacttgcaagatacaggggttgatccagcttttcccagaaaggcgtgggtgggttctgctgaactggcacatcaggagtttcactggggttaatgttttaaccgttgtgtcaatatacttaatgacactttgtttgaatattctataactgaatggaagcacttttaacgaacaagttttgttttatttttaggtgagcgaatagcagtaagatttacctaggtacactttgtactatattgaaaagtttacattttgaaaaaccaaatatgatatatttagaccaaagaaatagttagactttatgccttgagagctttgcaactctttcagtgcttataatcttttcaagatctgagggtctgtttcactctcctggtgcttcctggactgtgtagtttttatttgggagattaaccactgggggcttttgttcagaacctgccttggactgaatggctttggaccaggtctcacttggtgccttctgctcctatggtaaggagaaaagatctgcagccctcacagcccggctcctccaacactttggggtgtgaccttgggcaggaaacttcatcttcctctgtcgtttcctcatctgtgaacaggggatgatggtagtacctgcctcctgtggttgtggtgaggactcagtgaggtaatgactggtcctggttcagagtaaaccctcagtaattatcgaatattgttgtcaccagcactgtcaccccacagctagctgtctcttatgccaaaaactcaagtcatagaatttcagagttgaaggaaaccccagtaattcctaaaggtgcgttagaatccccaagggtgctttaaaagtcacctattcctgagatgcacccaagagccagtaaatcacaagggggtctgggaatccactctgctgagaagcaatgcaggagatggtaacatgcaaccagagatgaaaaccatcttcccttgcctgaatccccgctccaacaacccttgcaagtggtctccgggcttcttcttgaacacctccagcctggggagctcactatcacctgagacaatgcatcccattttggacaccttaggcaatgtaaatttgtcttcatgctgacctaaaggaaggggttccttctgaccctgaggaggcagaacagagcagtggaaagagagcaagctttgagctttgagctcagaagacgtgggctagaattccactctagcacttgttagctttgtggccctggataagtggtttgcaattttcttttccctttcctcttccaaatgaccttctttcaaatatttgagccctatccttccagtcttctcctagcctccctgtgtgataagaccttcatttcctttatcac

SEQ ID NO: 41654 - DNA, 2300 bp, Homo sapien
cctggagacagagcaagaccccgtctcacaaaaaaaaaaaaaaaaaaaaaaaagaaaagaaagaaagaaagaaaaagaaatacttgctcaccacagaaaacttaaaaaatccaggtaaataaaaatataaaaataaaaaccacccattattcttccagttagagatagtgactcaaaatttttgcatatatatcaagacattttttcatatatatatatatatatatatatatgcatatgtctatatttaacaaaagtggtatcagcctctatatgcaaatataagcttgttttttaaactacaaagtgtatctatccaagtgaccaaatatattcccacacataatttttagtgcttacatatatgttttctactgatggcttacttaactaagtatttattgctgaacattaaaattgttttccattttttgctgtgacaaacttccttacagctaagtctttaagggcatcatcattatttctggggaatcagttcctagaggatcaatcgctgagtcaaatattatgtacatttttaaggcttttgatccatatcaccactttcctctctaggaaggttgtgtcaatttataacgctatataaaagggcttgttttcttaatgttttccaaatttggtcagcccaagaaatctgcccatgaaataagaatttatgtagatggaacaaatagaataatatatatatatatatttttttccgtaagaaacctttcctaaaagccaggattttaagaaatcccacttacccacaattagcctttggtgcagtcaactgatttagacaagaactttttaagccaacttttcaatcaaagtctgccatgtttgtggaactgtggctatttaccattttacaatgacttaattgcaaattaatgtatatcttttttttcttgagaagatataataagctacctttttaaaatgacaatccattttattttcctggagaaaagaatccatttgctttaaccataatcagaggaaggttatttggtcaaacaaagtaaaaaccataaacaatagatagccatcattaccacagtaacattggtccagctaggaattcacttagctaaatgggtgacttcctactcacatacctcctcagtgcacaacaaacacaggagcaaacaaaagcctttacagaatccagaaccaccaggcaagaagatataataatcaagcaatcaagcaaaagtttaaaaatactgcctaaactgcaccaaaaaaaaaaaagaaaagaaaagaaaagaaaatgatactacaagagagaagttaatgaggcagaaagatattctcaaatataaaaccccctccaggacttttaagaaaggtatcagaggcatatggaaggctaagtccaggatggatttaactgaagaaaaggatatttagagattatcaacattttctaatgcaacagaaaaccaagccaacttagtctcctacttagtaagtgccagctctattcttcatctttttggagatccagaaaaatcaaaaagagaaaatatccaaatatagaagcttaatttaacaaaattggaaaaacctaaactatactgtgctctggtgacctagcaatcaaataatcacagtcatttggtcaatgtctatgattaactcaatgagacaggatgtttggctatagcaccaggtacaaaaaatatattttcatgaaggatcactccctcttatgtaatagatttgggtgagtgagtgagtgagtgagtgcatggactcacagcttttggctttctgaaataccctgcatcagtcttgttatgatgattccttagtgctgggatggatcatccaggcatttaaggtaacacgatggtaattctttgctcatttttcagggaaaaaaaaaagttatcacttccaaagtcggcatagtcacccgaagtaaaaaaaaaaaaaaaaaaaaagcctcagaggcaaaggaaaggggccgcaaccttggttaactgtgaaatgacgaatgagaaaactcctcctgctgaagatattcaggtatataaaggcacatgaaggaaaactcaaaacatcattgtcatatacacatcttctggattttttagcttgcaaaaaaaatgagcaccaaacctgatatgattcaaaagtgtttgtggcttgagatccttatgggtatattcattgctggcaccctatccctggactgtaacttactgaacgttcacctgagaagagtcacctggcaaaatctgagacatctgagtagtatgagcaattcatttcctgtagaatgt

SEQ ID NO: 41655 - DNA, 2300 bp, Homo sapien
ttgaattgccattacctcagtgcttaggggaagccatgcacgtttgtttcttttcagtacccagagttaattaacataagttatcacagaagctcccataagcattgagacaatttctctatacctgtgactatttaaggttttgaaaacaaaacagaagcaggtaaggaggaagtacgctttactattgaagatttattaggtacacatttagatttgtgaactcacattgcttaggatgaaagggactcttgaggatgtctgctgtttgttagtgaactgcctgtaacaattacaattagcacacacatgagcacaatgaactgggtagtcagactcagccaaaatgaatagaaatagcctcttaccaaatttactttgagtagcccttggactctgagcactgctgcccagagcaatatgactgtaggtccaagtttgtcaatgactatgcaaatgtgctttcttcgcttttactctattgtcatctgtctattacaatgttgctatggtgacacctttccaatatccctgtgcttctttggtatcctctaaggggaagctgtaatgaagtggcttggcaaaagaatcctcttggaattttttttttttcatatgctactgaaaaccagcatgattttcctcttatgggaaatgtataaagtatgagttggaaatgatggaaattaatctgtactgacttgggcaaggaatgtgaatgttattcattctgttccaaactacctgaaaatattctctttctgttcctactttccaggagataacatcttaagggacactgaagcttgtgcgtgtgtgagtagaacacgtgctgggggctcttgagctcatgagggaggggctacatgtcggtggggtgataactgtatgctggaaacaatgataggtggtgaccctggagcacttaccatgtgacaggtgttatgctaagcatgttgtatgcattccttcattgaatgacagctacctatattatcctcattttataagatgaggtaacagagcttcagaaaggttagactcagctgctatgggtctgtctgactctggtgttcttcctcttaaaaactggggcactttggaaatgagattcctcggtgatgaacagaaatattgcttagcggctgtatttttgtatctggcagttttcccatatttgagtcttatattcacaatcggtatctttacattacacaaaagtgacacagaattagagtcatttaatccagggttgatatcattaagtcatgactatttattaaatgtttcttacaatatctgagatgatattgcaaaagatgtaagtgattttagaagttctcacttcgtagttagttgcagaaacctcttttggaggagggatgttttctctatatatcctaatttctacttaatatatttccacacctctttgaagtgtgtagtaagaatggtaaaatgcagtacttcgtcatttggtacagttcaatcaatatgcattaagatgtgatcatatgggtaatagaaaaatgtgaaagatccaattctttttctccagaaggcaggaagctcatatttgatttctgttactataaactataaaaacgtttcaaatgtagtttacccgtaaccatcaccctgcaagggtgatattgctccccgccaatttacggaggagaatactgaggctttaaggttgtagatagaccaagaccacacaagtagagagtggcgggctgtgggttgagctttaaaatccaggttcatccatgactcccagtgtgttctagtaaatccactagaatctgagtattttccaatgatttatgctccgctctgtgtcaggcagttcatggtatttttcaacaatcagaaaatcctggggaaggcaaactgtttccccctctctaggtgccttggaagtggccgttgtggacccagagatcatcctttctgatctgacaccttcttcactgccctggcccagtgtcttttctgcaaggctggaagcccccttagactggtcatgtcccatctctttccggagggaagatgatcccaaagacgacttttctctccacggtgctgccataccgcaggcggccgccaggggtccccgctcggcgtccccgcgagacagtcgagccccggccggctgcgcggcgcgctgggtgcatgagggggctgctccggagcgacggcggctgcagctggagccaggcgctcgcccgtccgccggttggctcgccgggacctcgcgcaccggcggcagagtcccttgcgtggattggcaagcgacg

SEQ ID NO: 41656 - DNA, 2300 bp, Homo sapien
aaatttatttgaccacagaatccctattttaagcaacaactgttacatcccatggattccaggtgactaaagaatacttatttcttaggatatgttttattgataataacaattaaaatttcagatatctttcataagcaaatcagtggtctttttacttcatgttttaatgctaaaatattttcttttatagatagtcagaacattatgcctttttctgactccagcagagagaaaatgctccaggttatgtgaagcagaatcatcatttaaatatgagtcagggctctttgtacaaggcctgctaaaggtatagtttctagttatcacaagtgaaaccacttttctaaaatcatttttgagactctttatagacaaatcttaaatattagcatttaatgtatctcatattgacatgcccagagactgacttcctttacacagttctgcacatagactatatgtcttatggatttatagttagtatcatcagtgaaacaccatagaataccctttgtgttccaggtgggtccctgttcctacatgtctagcctcaggacttttttttttttaacacatgcttaaatcaggttgcacatcaaaaataagatcatttctttttaactaaatagatttgaattttattgaaaaaaaattttaaacatctttaagaagcttataggatttaagcaattcctatgtatgtgtactaaaatatatatatttctatatataatatatattagaaaaaaattgtatttttcttttatttgagtctactgtcaaggagcaaaacagagaaatgtaaattagcaattatttataatacttaaagggaagaaagttgttcaccttgttgaatctattattgttatttcaattatagtcccaagacgtgaagaaatagctttcctaatggttatgtgattgtctcatagtgactactttcttgaggatgtagccacggcaaaatgaaataaaaaaatttaaaaattgttgcaaatacaagttatattaggcttttgtgcattttcaataatgtgctgctatgaactcagaatgatagtatttaaatatagaaactagttaaaggaaacgtagtttctatttgagttatacatatctgtaaattagaacttctcctgttaaaggcataataaagtgcttaatacttttgtttcctcagcaccctctcatttaattatataattttagttctgaaagggacctataccagatgcctagaggaaatttcaaaactatgatctaatgaaaaaatatttaatagttctccatgcaaatacaaatcatatagttttccagaaaatacctttgacattatacaaagatgattatcacagcattataatagtaaaaaaatggaaatagcctctttcttctgttctgttcatagcacagtgcctcatacgcagtaggttattattacatggtaactggctaccccaactgattaggaaagaagtaaatttgttttataaaaatacatactcattgaggtgcatagaataattaagaaattaaaagacacttgtaattttgaatccagtgaatacccactgttaatatttggtatatctctttctagtctttttttcccttttgcatgtattttctttaagactcccacccccactggatcatctctgcatgttctaatctgcttttttcacagcagattctaagcctctttgaatatcaacacaaacttcaacaacttcatctatagatgccaaataataaattcatttttatttacttaaccacttcctttggatgcttaggtcattctgatgttttgctattgaaaccaatgctatactgaacacttctgtcactaaaactttgcacacactcatgaatagcttcttaggataaatttttagagatggatttgctaaatcagagaccattttttaaaattaaaaaacaattattcatatcgtttggcatgtaagacagtaaattttccttttattttgacaggattcaactggaagctttgtgctgcctttccggcaagtcatgtatgctccatatcccaccacacacatagatgtggatgtcaatactgtgaagcagatgccaccctgtcatgaacatatttataatcagcgtagatacatgagatccgagctgacagccttctggagagccacttcagaagaagacatggctcaggatacgatcatctacactgacgaaagctttactcctgatttgtacgtaatgctctgcctgctggtactgtagtcaagcaatatgaaattgtgtcttttacg

SEQ ID NO: 41657 - DNA, 2300 bp, Homo sapien
ttaacagtttttcttcaataaaaaattataactttttaactttgtaaactttttaattttttaacttttaaaatacttagcttgaaacacaaatacattgtatagctatacaaaaatattttttctttgtatccttattctagaagcttttttctattttctattttaaatttttttttttacttgttagtcgtttttgttaaaaactaaaacacacacactttcacctaggcatagacaggattaggatcatcagtatcactcccttccacctcactgccttccacctccacatcttgtcccactggaaggtttttaggggcaataacacacatgtagctgtcacctatgataacagtgctttctgttgaatacctcctgaaggacttgcctgaggctgttttacatttaacttaaaaaaaaaaaaagtagaaggagtgcactctaaaataacaataaaaggcatagtatagtgaatacataaaccagcaatgtagtagtttattatcaagtgttgtacactgtaataattgtatgtgctatactttaaataacttgcaaaatagtactaagaccttatgatggttacagtgtcactaaggcaatagcatattttcaggtccattgtaatctaatgggactaccatcatatatgcagtctaccattgactgaaacgttacatggcacataactgtatttgcaagaatgatttgttttacattaatatcacataggatgtacctttttagagtggtatgtttatgtggattaagatgtacaagttgagcaaggggaccaagagccctgggttctgtcttggatgtgagcgtttatgttcttctcctcatgtctgttttctcattaaattcaaaggcttgaacgggccctatttagcccttctgttttctacgtgttctaaataactaaagcttttaaattctagccatttagtgtagaactctctttgcagtgatgaaatgctgtattggtttcttggctagcatattaaatatttttatctttgtcttgatacttcaatgtcgttttaaacatcaggatcgggcttcagtattctcataaccagagagttcactgaggatacaggactgtttgcccattttttgttatggctccagacttgtggtatttccatgtctttttttttttttttttttttgaccttttagcggctttaaagtatttctgttgttaggtgttgtattacttttctaagattacttaacaaagcaccacaaactgagtggctttaaacaacagcaatttattctctcacaattctagaagctagaagtccgaaatcaaagtgttgacaggggcatgatcttcaagagagaagactctttccttgcctcttcctggcttctggtggttaccagcaatcctgagtgttcctttcttgccttgtagtttcaacaatccagtatctgccttttgtcttcacatggctgtctaccatttgtctctgtgtctccaaatctctctccttataaacacagcagttattggattaggccccactctaatccagtatgaccccattttaacatgattacacttatttctagataaggtcacattcacgtacaccaagggttaggaattgaacatatctttttgggggacacaattcaacccacaagtgtcagtctctagctgagcctttcccttcctgtttttctcctttttagttgctatgggttaggggccaaatctccagtcatactagaattgcacatggactggatatttgggaatactgcgggtctattctatgagctttagtatgtaacatttaatatcagtgtaaagaagcccttttttaagttatttctttgaatttctaaatgtatgccctgaatataagtaacaagttaccatgtcttgtaaaatgatcatatcaacaaacatttaatgtgcacctactgtgctagttgaatgtctttatcctgataggagataacaggattccacatctttgacttaagaggacaaaccaaatatgtctaaatcatttggggttttgatggatatctttaaattgctgaacctaatcattggtttcatatgtcattgtttagatatctccggagcatttggataatgtgacagttggaatgcagtgatgtcgactctttgcccaccgccatctccagctgttgccaagacagagattgctttaagtggcaaatcacctttattagcagctacttttgcttactgggacaatattcttggtcctagagtaaggcacatttgggctccaaagacagaacaggta

SEQ ID NO: 41658 - DNA, 2300 bp, Homo sapien
caagatctagttgtttaaacgtatgtagcacctcccatttctctcttcccccagttcctgccatgtgaagtctggggtctccctatgccttccatcatgattttaagttccctatggcctgcccagaagctgatccagccatgcttcttgtacagcctgcagaactgtgagccattaaacttttctttataaattacccagtttcagttatttctttatagcagtgtaagaatggactaacacaattattaacgctagtcctcatgttgtacattaaatctctagatgtattagacgtaactgcaactttgtaccctaccctacaattttctttccccccaagccccccaaccaagggtctactctgtttctataaattcagttgttttttaattccacgtataagtgaagtacaactcagtgtagaaacttggtaaatgctagctacttgttataagctgtcagtcaaaataaaaatacagagatgaatctctaaattaagtgatttatttgggaagaaagaattgcaattagggcatacatgtagatcagatggtcttcggtatatccacacaacaaagaaaagggggaggttttgttaaaaaagagaaatgttacatagtgctctttgagaaaattcattggcactattaaggatctgaggagctggtgagtttcaactggtgagtgatggtggtagataaaattagagctgcagcaggtcattttagcaactattagataaaactggtctcaggtcacaacgggcagttgcagcagctggacttggagagaattacactgtgggagcagtgtcatttgtcctaagtgcttttctaccccctacccccactattttagttgggtataaaaagaatgacccaatttgtatgatcaactttcacaaagcatagaacagtaggaaaagggtctgtttctgcagaaggtgtagacgttgagagccattttgtgtatttattcctccctttcttcctcggtgaatgattaaaacgttctgtgtgatttttagtgatgaaaaagattaaatgctactcactgtagtaagtgccatctcacacttgcagatcaaaaggcacacagtttaaaaaacctttgtttttttacacatctgagtggtgtaaatgctactcatctgtagtaagtggaatctatacacctgcagaccaaaagacgcaaggtttcaaaaatctttgtgttttttacacatcaaacagaatggtacgtttttcaaaagttaaaaaaaaacaactcatccacatattgcaactagcaaaaatgacattccccagtgtgaaaatcatgcttgagagaattcttacatgtaaaggcaaaattgcgatgactttgcaggggaccgtgggattcccgcccgcagtgccggagctgtcccctaccagggtttgcagtggagttttgaatgcacttaacagtgtcttacggtaaaaacaaaatttcatccaccaattatgtgttgagcgcccactgcctaccaagcacaaacaaaaccattcaaaaccacgaaatcgtcttcactttctccagatccagcagcctcccctattaaggttcgcacacgctattgcgccaacgctcctccagagcgggtcttaagataaaagaacaggacaagttgccccgccccatttcgctagcctcgtgagaaaacgtcatcgcacatagaaaacagacagacgtaacctacggtgtcccgctaggaaagagaggtgcgtcaaacagcgacaagttccgcccacgtaaaagatgacgcttggtgtgtcagccgtccctgctgcccggttgcttctcttttgggggcggggtctagcaagagcaggtgtgggtttaggaggtgtgtgtttttgtttttcccaccctctctccccactacttgctctcacagtactcgctgagggtgaacaagaaaagacctgataaagattaaccagaagaaaacaaggagggaaacaaccgcagcctgtagcaagctctggaactcaggagtcgcgcgctaggggccggggccggggccggggcgtggtcggggcgggcccgggggcgggcccggggcggggctgcggttgcggtgcctgcgcccgcggcggcggaggcgcaggcggtggcgagtgggtgagtgaggaggcggcatcctggcgggtggctgtttggggttcggctgccgggaagaggcgcgggtagaagcgggggctctcctcagagctcgacgcatttttactttccctctcatttctctgaccgaagctgggtgtcgggctttcgcc

SEQ ID NO: 41659 - DNA, 2300 bp, Homo sapien
atacccccattgtatctttgaagcaattaccttgtttttgattttacaggttcataggtagaagggactagcttcgtctcaggtgagacttgggactttggacttttgaatgaatgctggatcgagttaagactttggggaactgttggtaaggcacgacagtattttgcaatatgagaaggacattagatttgggaggggccagagttggaataacatggtttggatctctgtccccacccaaatctcatgttcaactgtaatccccagtgttggaggttgggcctggtgggaggtgagtggattatggggtggcttctaatggttttgtacagtcccctcttggtactatatagtgagttctgacaagatctagttgtttaaacgtatgtagcacctcccatttctctcttcccccagttcctgccatgtgaagtctggggtctccctatgccttccatcatgattttaagttccctatggcctgcccagaagctgatccagccatgcttcttgtacagcctgcagaactgtgagccattaaacttttctttataaattacccagtttcagttatttctttatagcagtgtaagaatggactaacacaattattaacgctagtcctcatgttgtacattaaatctctagatgtattagacgtaactgcaactttgtaccctaccctacaattttctttccccccaagccccccaaccaagggtctactctgtttctataaattcagttgttttttaattccacgtataagtgaagtacaactcagtgtagaaacttggtaaatgctagctacttgttataagctgtcagtcaaaataaaaatacagagatgaatctctaaattaagtgatttatttgggaagaaagaattgcaattagggcatacatgtagatcagatggtcttcggtatatccacacaacaaagaaaagggggaggttttgttaaaaaagagaaatgttacatagtgctctttgagaaaattcattggcactattaaggatctgaggagctggtgagtttcaactggtgagtgatggtggtagataaaattagagctgcagcaggtcattttagcaactattagataaaactggtctcaggtcacaacgggcagttgcagcagctggacttggagagaattacactgtgggagcagtgtcatttgtcctaagtgcttttctaccccctacccccactattttagttgggtataaaaagaatgacccaatttgtatgatcaactttcacaaagcatagaacagtaggaaaagggtctgtttctgcagaaggtgtagacgttgagagccattttgtgtatttattcctccctttcttcctcggtgaatgattaaaacgttctgtgtgatttttagtgatgaaaaagattaaatgctactcactgtagtaagtgccatctcacacttgcagatcaaaaggcacacagtttaaaaaacctttgtttttttacacatctgagtggtgtaaatgctactcatctgtagtaagtggaatctatacacctgcagaccaaaagacgcaaggtttcaaaaatctttgtgttttttacacatcaaacagaatggtacgtttttcaaaagttaaaaaaaaacaactcatccacatattgcaactagcaaaaatgacattccccagtgtgaaaatcatgcttgagagaattcttacatgtaaaggcaaaattgcgatgactttgcaggggaccgtgggattcccgcccgcagtgccggagctgtcccctaccagggtttgcagtggagttttgaatgcacttaacagtgtcttacggtaaaaacaaaatttcatccaccaattatgtgttgagcgcccactgcctaccaagcacaaacaaaaccattcaaaaccacgaaatcgtcttcactttctccagatccagcagcctcccctattaaggttcgcacacgctattgcgccaacgctcctccagagcgggtcttaagataaaagaacaggacaagttgccccgccccatttcgctagcctcgtgagaaaacgtcatcgcacatagaaaacagacagacgtaacctacggtgtcccgctaggaaagagaggtgcgtcaaacagcgacaagttccgcccacgtaaaagatgacgcttggtgtgtcagccgtccctgctgcccggttgcttctcttttgggggcggggtctagcaagagcaggtgtgggtttaggaggtgtgtgtttttgtttttcccaccctctctccccactacttgctctcacagtactcgctgaggg

SEQ ID NO: 41660 - DNA, 2300 bp, Homo sapien
tgcagtggcacgatcatggctcactgcagccttgaccttctgggctcaagcaagcctcccacctcagcctacaggttcacaccaccacgcctggttaattttttaattttttaatttttagtagagacaaggtcttgctttgctgcccaggctggtctcaaactcctgagctcaagcaattctcctaccttggcctccctaagtattgggattacaggaatgagccaccaaacttggccaatcttttcttttatatataatacttttaaaatacatttttatttctttcgtcgcccaggctggagagcaatggcgtaatctcggctcacggcaacggcaacctccgcttcctgggctcaagtgattctcctgcctcagcctcacaagtagctggaattacaggcacacgccaccatgcccagctaatttttgtatttttagtagagatggggtttcactatgttgttcaggcgggtcttgaactcctgacctcaggtgatccacctgtctcggcctcccagagtgttgggattacaggcgtgagccaccgcatccagcctcttttataggtaatacttttattgtcaagtctaagaactctttgtgtagcccaatcccaaagattttctactaatttttaaagttttatagttttctgttgtatacttaattctatgatctactttgaggtaagtttttgtataaggtataaggtttaggtagagatttttttttatttttttgcctatgaatatccaattgctccagcactacttgttgaaaaacaatttggtgttaaaaagacctaaattatattagtgttaggaaaatattatccttcattctggacttgagaagctgctatgctgctccacagagctagtgttcctcatgagattcataaagctctgaaaggtcctgtaaagaaagatactaatttatgctagcactatatggaggttattacttctaagggtttccaagtggcttgaagctcaggccaggagtgtcctagtaactatccactatagaataagattgagtggaaggagatgaatccatgggtctaattccagaaggacagaaaggcctcgaagtcgactgcatgatcaatagcacaggcgagcaaacctccagctttaaggcctatggatcagtaatcagccaggtcaccctcctagcagtgtttgtgcagcctccatgtcacagaggcaacaaaacagttgaacaacacagcctagtcaactggccaatagaatgaaaaattatttctagcatttgcctatgctctaggtttccttaaatattagcaaataaatttaccctcgtttcggtgatcgtggcttctctattacctcccattcaaaggtctttcactcagttgtcacaataaagggtagtaggaatgtatttttttcaactctaatgctaaaagttttcagtagctgtcaaataaaatacatgccattactgatcaaaaatcaagaaataccatttcttggaaaggtctcaatttaattgccttttagacaactgcaacccagctaaagtaccagaggaatagtgagctgcattggaaacagtactagattacagctgacaggtcaggaaatctagtgtagtcctcattagctgtgggactgcagggaaaacccttgacctctttgtatttccactttcctttcctcaaaatggcaataagatttgtcttactgacttcaccatgccattgtgaagctcaaataagatcatatatgtgaaagtgctttgaaactcccacagttatccagactgagaaggcgctcattacaacaggcttccctggctattcaagaaccctgactgctgccaacatcctccccaccctcctacccagcattgtttaatttttaaaaatctaattttgagagactgtaggtaaagtgctgagtgcagtgcctggaatctaagtgttcaataaatcacagctgtcataattcttctgccacatgtctttacacttcactctaaccgactacatgacaaagttcggttaatgggctgtggcagagtgggctctctaccagatatctgtgctatctacctttctctagcatacagttatcactgagaagtggctgctcattcatcgactacatttccaaaaccctcctgcagttagctgtggccatgtaactgagttttagcaaaagattgtgagcaaaagtaatgtgtgccactttaaagcttggccttgagaactctcaggaaacgctaagctctttgacccttctcactgcttggaatggtggattcccaag

SEQ ID NO: 41661 - DNA, 2300 bp, Homo sapien
tggttccaagtctttgctattgttgatagtgctgcaataaacatatgtgtgcatgtgtctttataacagtacaatttataatcctttgggtatatacccagtaatgggattgctgggtcaaatgatatttctggttctagatccttgaggaattgccacactgtcttccacaatggctgaactaatttacactcctaccaacagtgtaaaagcattgcttttctccacagcctcaccagcatctattgagttaatgatcgccattctaactggcatgagaagatatctcattgtggttttgatttgcatttctctaatatccagtgatgatgagctttttttatatatgtttgttggccacataaatgtcttcttttgataagtgtctcttcatccatcttaacaggaaatagtctatcttgtgagcattcagatgtgagttgaggacaatggacagccctcctcctgagagacaacactccagtgattcactatttagagtgatgtgtcactctgaatacctctaagccacattcttcataaaatgaagacagattatattgcaaaaacctgtgcttattattttattttgcatgaaaagcaatacaagacaaggtacactgcgttatattgaagggaccacacatattcctcttcctccaatcttctaacattgaagccaatatatttggaatgatacaaatatatatcaatttattctttaagagttaggttgctgtggaatatatttagcatcaattaggtcaaataatattcttacttccttttttcccttgaattctaactatggcactgaatatatttagtgttaaaaaacatctcctcatcagtgacagaaattttttacacatatgaattccgtgtgggagaactgggggaaagagacatggtagagatatctaaatatgaattttaatcaaggaattcagattggtggcacagtccagtaaacagatgattgtaatacagtgttgtgcaaaggaggttagaaaagctttacagaaagggcctttggcatgaaccttgaaaggaagagaagagcaaactaagcaaattatgcacaaacagttcagaaacatctctgaatgtctgcatgtaccagaacattagacatttttgtggctaaaacgtagagtgaatctatggcaaagcttgaaaaggactatataaaaaaatgaagtgcttggatacatgaaacaagactttatatatgtcaaattaagtgtggacttaattgtgcagtgattggtttggcattagtagtactttagtagggggatgacacaatgcaatttgtatttttgaagaaaataacttcagctacaatgtgaaagatgatttggaatgggaaaaaccaactcaaattagatgcttcggtagttcagagaagatattatatgttctgatgatgttgaaacactaagatttgttactgatgaggtttggaaagaaaaggaagtagaaaaatttaaaaattaatttgagttcatgcaatttacataattaagcaagttagttggactggagaaagagataaatgagaggaaatggcagttcattttataacaagttgagtttaaaatgctgatttctaatatttaataagcaataaaagctatggacctgcatcttagaggagtaatctttattagatgtagaaattggattttacatgcagatttcagagcagagcagatttttcaggaagtgtataatgagaagaagaatgaattttcaataagaggaaagcataaaaagggggaaaacataaaaagagaaggaaaacaaagtcagtaagatagggtcaaatgagaagtaggttaggagtgtctgaacaaagagggactggccaaatgccttatagaagtcaaataggatgaggattgatgatgcccaccagactttttgtacactgatgagtttgggaggagctgctgcagtgctgcaatagattacagggagacaatgtgaattagtgtgaggagtgaatgggaagaaagtggtttctgctggtaacaaatgttcaaagcagtcagcacaggaaagataaaacaattagttccttcagggaaggaggttaatttagagaagatgtagggagtgttcaacatgttcgttgtggaagagaaagagctaagagagaggagcttaaagacacaaacgggtagaatcaaggagtgtgctctcaaatgagaggaacaggagtgacattaaccttgaaatgctcggagactctactccttcatgacagtaggaggataattaacaatagatacaaa

SEQ ID NO: 41662 - DNA, 2300 bp, Homo sapien
ctccagaacttctcttcttttccaaccaaaactctgtacccattaaacataactcccctccttccagactctggcaatcaccattctactttctgtctctactaatttgacatctccaagtaactcctataattggcatcacacaatattttatttttgtgaatggtttctttcacttaccataatgtccttaagtttcatctatcttgtagaatttgtcagaatttattttttaaggctgaataatatgttgtagtgtacactacattttgtttattcacttatccataaatattcactggggttgcttcctccctttggctattatgaataatattgctaatgaaaatcctgcacaaatatctgtttgagtccctgctttaatttaattagatatgtatatgtatttgtgatacaaagcaaaaattacacaactttcttaaagtctcaaaaaggagcataacattagtaaaatattagaaagtagattagggaaaaaaaaggagagaaatgaaacccaaagtaaataaacagcataagacagttccaagagaagaaaaaaaaaagagtaagaatataaacgtaaaattaaaaagtggtttgccaggtgctgtggctcacgcctgtaatcacagcactttgggaggccgaggcaggtggatcacttaagggcaggagttcgacagcctggccaacagagtgaaaccccatctctactaaaaatacaaaaatcagccgggcatggtggtgggtgcctgtaatcccagctcctagaaaggctaaagcaggagaatcgcttgaacccggaggcagaggttggaggttgcagtgaggcgagatcgcgccactgcactccagcctaggcaacagagtgagactcttgtctcaaaaataaataaatacataaataaataaataaataaataaataaataaaataaaaagtggttggattagtatttatataattgtcatatgtagttatatgtttgcttatgagccgattttgtattcttttcgtgttccagtttttaaaaagtgtcacaggatccttgggtgtcgctacgccagccagaaacctctgtggttagcggtgccttctgcttgagtattgctcttacctgttgatcttgttctgcccactcagcccagcaggctgtactcagcttgggctaccagcccagatcccacgcctgccaagggccagctaggagtggggcagcgagggctgtgtgagggagcaagcggctgaggcagaaaattatctggttccacaaatccaggcacatcggctactgcagcgggatgggcagctccaggtgcctgcgcaggtaccggcaccgtgtactgcaagaggcttccactggggtcataagcgtggtaatgcccaaaagctcagagatgccagaaattgcagagcccaaaagaggcgtgtctcagccctggttcggggagccctgaggtctgtgctcccagaaaggctgcagctcttctctctttctgttcttctgcagcacaagcgagggggcaatttcgggggtgggatgtgattcggtccatttgtgtgacagctttcagtctctccgccctactctggttcatggaaactggccctggtgctgcttcctgttacgtggggcggccacccggcatagatggaggggattagtgtcacagcaggtctggcccagggaatcccgagttctgggcccccaaggagggtcgccactcttcactcccacagtcagggagcgtttgaccaccggcaaccctgtgagccggccagcgtgttacagctcctttcgctcccgctgtttggcaggtcctgagttctcgtcccccatccaggaaaaatcaggttatactgaggacaactggagggtgagcaaggtggaggggagctttactgaaagaacagctctcaggagacccaaagtgagtagctcctttctgcaggcaggtcgtcccagtgagtctgactgaaactagactcagaatggaggaagtgaatgctgattggtctatgggcagccatgggcgggcctggaaaaagcaccatccgggtagcggactccacccggaactggtagcgtggcccctagcctttgggtcatccctggcttgaaggtggggtttcactggggacccagctcttcccgcccggaaacctcttagcctcccaccgccatcaatataccggctgcggtgcccaggctgtccacgctaaggggtgcccacaggcccatgccgagccaccctcagccccgcagcctccctcacgttctcgttagtgcccagagt

SEQ ID NO: 41663 - DNA, 2300 bp, Homo sapien
tggtcaatctgttttaccagaaaaaacaataataaatatctaaatgacctttgtaataaacagaaatatcctgagattccaattaggtacttcattttaattcacttttaaaaatttacaagagaattttataaggatttctattgcccatcttactaaatacatatgtgccaaggaaacagaaggatcattaaaattttcaagacaccagtaaatttagcacagttctagtcatgaacaggacggagcaagggttgaaatattgggcactcacattctttgtttcatatatctgaaacacatttattttaataggatatatctgtttttgtatatacaagaaaaaataaaggctaaaacaaaaggattccatagaaacattattcaaaatttatttttacataaccaaatttttaaattgcattttgctatccacagcaaaaggttgaaagaaaagacttggaaccaacccaaatgcccatcagtgatagactggataaagaaagtgtggcaaatacacaccatggaatgctatgcagccatacaaaaggatgaattcatgtcctttgcagggacatggatgaagctggaaaccatcattctcagcaaactaacacaggaacagaaaaccaaacaccacatgttctcactcataagtgggagttgaacaatgagaacacatggacacagggtgtgggagcatcacacaccagggcctgttgggggatggggggctaggggagggatagcattaggagaactacctaatgcagttgactggataatgggtgcagcaaaccaccatgcgatgtgtatatctatgtaccaaacctgcacattctgcacatgtatccccaaacttatagtataatcgttaaaaaaagaactgaaactacaaaaaaaaatcttagatgcttttaaatccaagatgtggagattaaaatcttaatgtaattagctttcaaattactgatattctaatcaacaaagacccagctttgtactcccattttctaatgaaaattcagccaataatttcagcatatttaggaatgaagtggtttctgtgacatgaataaattcatcctaccccagatgatacatacaattgagattaataagacaatctgtaagaagaatatcttggatttatttatttttatcagcacaattcccttattacaaaaatgtcacaaataattagcacactgtcaaggtccaatcaggagatactcctcatggccctggcaggtcttaagcagtatgactacttagtttgatactcgaatggagttcttccttaaacaagcgaaatcaatgaaactatcagaagtctggaaagatatgagaaaaaggaataatgccatgacaagtgtgtctctacactgcgcttagtactctgcagcacttctgaaatatgagcaacacagtttccagcatgaacctcacagttctccatatgcccaggaattttggctacttacttcttatcccaaaggcaccccgtgtgaggcactagaaaaaaaaatggttaaaattattatcttattttaatagtacttcatttgacattctctttacataaattataccattaagtaagaggagagtcagatttattgtaaaactaatggaactggttcttctttaagctcttgggcctctgtgagtgctggagtttattgaatgttttgggtagagatcggaagccagattgcaattatttggctaaacaaacctgacaatacaggtacctagattaccaaggctactacatatatttttttcattctgaaaatatgttcactttcatgccccattgtgtatttgttctgtgttattctttttctcaaatagagctctccaactttcataagattttggtctcctcaaacctaaatccttatcccggggggaaaaatgagattaaagatctctgctaaaccgatcactaatttataacgtagaacgcttatatgacttatctattgccattttcatgctaataaccctcaaaactcagtgacatagaacaatgagcatttgtttagctcaggtctataggggagtgatttcatctaggctcactcacaagcctagagtcactgtcaggaagctgagctaggatgcctttagctttgatgactggggtgacttggctcattccacatgtttctcatcctctagtgggctatactgggaatgttctcacagtaatggcacagagaaagggtaagtagaggaaatacacactaacttgttcaagcatctctgtatcccatcgagtaatgcctcattga

SEQ ID NO: 41664 - DNA, 2300 bp, Homo sapien
caaaggccaatctatttatttttatatgccatatgttgggatgacccctcctctcctcacctcaaaaaaaaaaaaaaaaagcagttgtcttagttcattttatgttgctatgataaaatactggagacatttacaaacaatgaaactttatttagttcatggttttggtggctgagaagtccaagagtaagacattggcatgtgataagagccttcttgctgcattataacatgacagaagacattatctggcaagacagaacaagagtgtatgtgctcaggtctttcttcctcttcctacaagccaccagtaccatcatggggccccaccctgatgactttatctaatcttaattacctctcaaaggtcccacctctacataccatcaatatatgaatttggggaataaattttcaacacacaaaatttgggggacaaatttcaaactatagtagtggttctgtgtggttttaaaatcttggattattttcttgatcagttcttacacttttacttcacgctattttttacagagattttatgtttattgcagcattacatcatcacatgcatacatcacaactatcatagcctgtattccctgagcacagagtataaaataagggctgtgggctgggtgtggtgtcccacacctgtaatcccagaactctgggagtccgaggcaggtggatcgcttgagttcgagaccagcctggccaacatggaaaaactccatcgctactaaaaatacaaaaaaaaaaaaaaaatagctgggcgtggtggttagtatctgtaatcccacctactcaagaggctgaggcacagcaatcacttgaacccaggaggcggaggttgcagtgagccggggttacaccattgcactccagcctgagcaacagagcaagaattcgtctcaaaaaaaaaaaaaaaaaaaaaaaaaaagctgtttatagagatacaggttaattgggttaattgaaaagtggtcccagagagcaagagtgaagaactaaaagctggaaagatgaaggcaagaaaggcaggtaagccaattcacagaggtttgcttgaactagctgtatctgtgactaaagtgtttgatctaattagtcccccttcttgggagcctatagaatatgttacagattaatctatcatttcctgccccccattgtttgggttgttgaggacgcattagttccctgcattttgagtttgcacatacatgaatgcatgtgttcattgtcagaatgagacagctctgaaagaaaaagaggctccataaatatttgaggccagctgcttagtactaaaaaaggctgaagcccactgagaacattacagctatgactgggcttagtggacagaccaagagactgttaagctgtgcccaagaggtatccaaaacaaaaacgtagccagggacatttgataagtgtttgatgtttacacaatcacagagcaaatattactgtcacttatattacaaactgtctttagctcatcccaaatactatcctgcttcattttttatgtgttctctattctcccttcttgtctggaatatattatttctaacataatgaagaaggaaatgcacaggtcctctttctcattgccccactcctgtatttaatgctacaccattgttgcattgacagtgaacagcaacagagacaaaattttgaagtatctgcctaaattttccctcagaaatatgtattcgttttggctaaattattcagtctttaatgaacaactactccagacatatatagccaatgtggagaaaggaattggcagaatgtgataaaatcagacaatatcaactaaatacagatttgatgcctgaatggaccaataattactaattccgtacttcctcttggattatgtgatctttaatgatatggtttgggggtgtccccaccgaaatctcatcttgaattgtagctcccataattcctacgtgttgtgggagagactcagtgggaggtaattgaatcatggggggcgggtctttcccgtgctgttctcgtgatagtgaaaaagtctcacgagatccgatggttttataacagggagttcccctatgtaagctctcttgcctgctgccacgtaagaggtgactttgctgctcctccgccttccaccatgattgtgaggcctccccagccatgtggaactgtaagtccattaaacctcttattctttataaattacccagtttcgggtatgtttttatcagcagcgtgaaaatgggctaatacatttagctaagaattatcctaaggattta

SEQ ID NO: 41665 - DNA, 2300 bp, Homo sapien
taaggtcccctcaaagcattcaggaggaccactgtgcattcagaggacactctcttgcctgctgccaggtaagacatacctgcttccccttctgccataattgtaagcttcctgaagcctccccagcatgcagaactgtgagccaattaaacctccttccctatgaattacccagtctcagggttctttacagcagcgtgagaacggtctaatacagacacctttggaatatccaggtggggttgccacatatggctgcaaatcaagagtgtgaaggtcagaaagttaactaagaccaatgacagagacatagcaggcttcagctagaagtggcaggcagtctgcatactgagaaaatagatgaagaaaaactcagcaaatggagaaacatataaagcaagaggagagagtgtagggaaagaccttaaaaaagagggacaaaagagggaagaggtgactcctaagagcggagggctgaaaagccaaaaggaggttaacatttctaggaaaacgaatcgccagtgtcaaataccacagagtagtgagtaaggacaggaacagaggacaggccctgggattcacgatctgcacgtcactggtgacaacgtccaagagcaacagactggggggatgtggaactatttccttcacggttttgaccagcgtgcttactaataaatctcaattcccttcatagctctgatttgattgttttctgcgaaggattctcagttacacggatgttatcattgaacattagatactttgctttccgaatggctgcctcattaagaatcgcaatttagctggatgtgtcctcatcggacttccccagccttctactcactctcaccttgcccctactctccctacctcccaaggggactggagcatgatttttcagggattgtggtgcacctctgccatatggtggacattcaaagaaaatttaattactaatgtgaatggaaaggatttaggaagtgggtgggaaaacagtctcctctcatattggaaatacagttacttcccctttcaaaataaatataagtatttatatttcaaagttaaatataactagacgatagttgtaccctatagtgcagtatgacagggaaggtgtaggctttggtgtcaaaccaacctaaggactgagtctcagctgttgcgcattgcacacctgcaaagacgggtaatattctttacttgtaaggtggttggaagagctgaactgaataacgtggaaagagtcgatcacagggctttgtgcagaataggagggcagtataaagtagcaggggggctattagtactggctattgtttactcatcctataagctgcttattcagaaaactacagtaactttccaaataatttgggcaggaaaacctcaccacctttcatctagaaagatctaatcacttctttgaacgccattcacccaagagggcacaactcctaccaacatgaaaagcagatcttgtgaaagcccacttgctgccatctcccagccatttctccgacttcagaccggtgaacatcgtgcattagaaagtgttgttacatgtccaaggaaatctacatatagaacttttgccacggaaatgctgaagtcctattctgacagcgtgactccgatgtccacttggcaggctttgcgcaaagaattaaggcgagggtggagagggtgggtagggtggggacggacaaagtgagaagggaggcgggccaagtgaccacacgtacatgaagcctctccagttatggccaaatcattttttaaaaataattccatttcttccccaccctttggtcacttcctaacgccggctggggagtcacatgctaagctccaaagtgagcaacagacaccctcgtcccaggtcccatgctggcagaagcggacccgggccgagggatcagccctcccacttccagcggaggagcccttcgcaaccctagcctccagcccggggcgaagtcctccaggcccgcgggggcgcccgcaggctccgccccttcttcggctagctgcccgtccgtcccgcccctgctccgcccttcccgcccctgctccgcccatcgcgcggcggccccgggggcgagagggggcggagcgtggaggcggcagctggaaccgcgcagcgcacgggaacgcgtcccgctgcttgggtcaggttcgccggtcgcgggagccccgccgtgcagtcggaggtgagtaccgacgcggcccgacccacgtccccaggcgggagcgccgtccaccctgtatccctcgagagtcggtgcgggccttta

SEQ ID NO: 41666 - DNA, 2300 bp, Homo sapien
ccctgggacagagcacctaggggaaggggtggctgtaggtgcagcttcagcacacttaaatgtccctgcttgacagctctgaatagagtagtggtcctcccagcacagcatttgagctctgataaagccagattgcctcctcaagtgggtccccgacccccatgtatcctgactggaagacatctcatacaggagagctctggctggcagctggtgggtccgcctctgggacaaagcttccagaggaaggaagaggcagcaatcgttgctgttctgcagcttccgctggtgatacccaggcaaacagggtctgaagtaggcctctagcaaactccagcagacctgcagcagaggagtctgcttgttagaaggaaaactaacaaacaaagtaatagtatcaacatcaaccaaaaggacatccactcagagaccccatccgaaggtcaccaatgtcaaagaccaaaggtaaataaatccacaaagatggggagaaaccagcacaaaaacgctgaacattccgaaaaccagaatggctcttctcctccaaaggatcacaactcctcaccatcaagggaacaaaactagacggtgaatgagattgacaaattgacagaagcaggcttcagaaggtgggtggtaataaactcctgcaagctaaaggagcatgttttaacccaatgtaaggaagccaagaaccttgaaaaaaggttaggcgaattgctaactagaataaccaatttagagaagaacataaatgacctgatagagctgaaaaacacagcacgagaacttcgtgagtatatacaagtatcaatagctgaattgatcaagtggaagaaaagatatcagagattgaagatcaactcaatgaaataaagcaataagaaaagattagagaaaaaagagtgaaaagaaacagagaaagcctccaagaaacatgagactatgtgaaaagaccaaattacgtttgaatggtgtacttgaaagtgacagggagaatgaaaccaagttggaaaacattcttcaggatattatccaggagaacttccccaacctagcaaggcaggccaacattcaaattcaggaaatacatggaacaccacaaagatactcaacaagacccataattgtcagattcaccaaggctgaaacaaaagaaaaaaatgttaagggcagccagagagaaaggtcgggttacccacaaagggaagcccatcagactaacaatggatctctctacagacaccctacaagccagaggagaatgggggccaatattcaacattcttaaagaattttcaaccgaaaatttcatatccagccgaactaagcttcatatgttaaggagacataaaatcctttacagacaagcaaatgctgagagattctgtcaccaccaggtctgccttacaagagctcctgaggaaagcaatgaacatggaaaggaaaaaccgataccagtcactgcagaaacataccaaattgtaaagaccatcgatgctatgaaaaactgcatcaactaatgggcaaaataaccagctaacagcataatgacaggatccaattcacacataacagtattaaccttaaatgtaaatgggctaaatgccccaattaaaagacacagactggcaaattggatagagtcaagacccatcagtgtgctgcattcagaagacccatctcaggtgcaaagacacacataggctcaaaataaagggatggaggaagatttaccaactaaatggaaagcaaaaaaaaagcaggggttgcaatcctagtctctgataaaacagactttaaaccaacaaagatcaaaagagacaaggccattacataatggtaaagggatcaatgcaacaagaagagctaactatcctaaatatatatgcacccaatacataaagcaagttcttagagacctacaaagagacttagactcccacacaataatagtgggagactttaacaccccactgtcaatattagatcaacaagacagaaagttaacaaggatatccaggacttgaactcacctctggacaaagctgacctaatagacatctacagaactctctaccccaaatcagtagaatatacattcttctcagcaccacactgcactttttctaacactgaccacataattggaagtaaaacactcctcagcatacacaaaagaatggaaatcataacaacctgtctctcagaccacagtgcaatcaaattagaactcaggattaagaaactcactcaaaaccacacaactacatggaaactgaacaacctgctcctgaatg

SEQ ID NO: 41667 - DNA, 2300 bp, Homo sapien
acatgtctttcgtgtgagtttaattcacttaaccttttagaaattctccctttctctaaaatgggtaggttagactcagtagataatttccaaagtctttgctagctcttaatgatttatatgcctacctgttattgagataaagcctttgattattttttaaaacttctggttatgttgagagaaaatatcatttgagaacttgaagaacgacaaagcattattgctccttaataagaaattgctttgagaatccaatgttaacagtttggttttcttcaaagatcgtgggaggatttgttgcttttttcacatacagcattgcctttagtagacagcttgtcttaccctgaatggggccattctttctttggtttctgttagccttccatgattgtataaaaaataattcatgtttttttttttttctttcttgccatcaatactttgtcactgagagaattctgtacttcaaattagtggaaaagctagaatggttaccaagagaaaggattctaaactttctccaatgaggatcttcttgctggagtcagaatttgtggacattagactgtagctattgccgtgattcctcagagcaggaactgtttggtaattttgctccttttgtattccagaagtgtctgatacaaacttgtacagcccatttaaaccaagaaattaccaattagagcttgctttgcctgctatgaaaggaaaaaacacaataatatgtgctcctacaggtaagcctattgccattacttacatagtttttctgtttgcttccttttttttcttttgttgaatactgggacagaatgggcaagtttcagttttttccttgttccatgtgtcttttgagaaaactgtcctaatataatcctaatgttttttatgggattatgtaattaattaattatgtacattaatgtatttaatgtattttctttacctttcatgagaaggtaaagaaaagtgtcctcttttagcttgcttttgggtcctggctgttggcatgctacttagggagcagcttgatattttttagtcatagtgtaaattctgtaatcattaacatatttaaattatcaattaattagtcagctcagtggtattagaagagccaaaaataaacacctttccagagaaatatctaatatatgagttacatgttttcttttttccttacatgttaaaaggttgtggaaaaacctttgtttcactgcttatatgtgaacatcatcttaaaaaattcccacaaggacaaaaggggaaagttgtcttttttgcgaatcagatcccagtgtatgaacagcagaaatctgtattctcaaaatactttgaaagacatgggtaggtataatagttgcttcaacttctttttctccagcttcatgtaattgatgtgttttctgttttgtttttgacaaatgatttaaaaaaatttatattagattcagcttttttataatccagatgttatcccttcatggattcaagtcttttttgttagatgtaccagaaaacttaaactcccctggtttgcccttctatggggagtaaatgacttcaggaataaatttgatgtttacgtggcacatttaacttctttagtgattttataatttatttgatattattcttttacgtactcttttctctcttagtgacttaaaataatatatagtactataaattacaactagcttggatttattgatctcttactatgtgtcaggctctgtgctaaggacttgcctacagctattcttcttttggactcagggagaatttaatcagttgatgttctgatctagcatttcatctttgtggttccttatccacatcgtggttagtaatatggaatttctgtcatttcccaggtatagagttacaggcatttctggagcaacagctgagaatgtcccagtggaacagattgttgagaacaatgacatcatcattttaactccacagattcttgtgaacaaccttaaaaagggaacgattccatcactatccatctttactttgatgatatttgatgaatgccacaacactagtaaacaacacccgtacaatatgatcatgtttaattatctagatcagaaacttggaggatcttcaggcccactgccccaggtatctccaaagtcagacgaatgcttcagaagagctataatcttcctaactcctattttcttactcttatggccacactgaagatgtccttctcaggtcccaagtccatattgtacaactcattatgaattttgtttcctttattcatttgttca

SEQ ID NO: 41668 - DNA, 2300 bp, Homo sapien
tatattttatgtattaaatatattttatatattttatgtattaaatatattttatatattttatgtattaaatatattttatatattttatgtattaaatatattttatatattttatatatattaaatgtataatatatatatatatgtttttgagacagccttgctctgttgcctgggctggagtgcagtggtgggatctcagctctcagctcactgcagcctccatctctggggttcaagcgattctcctgcctcagcctcccgagtagctgggattataggcactggccaccatgcccggctaatttttgtatttttagtagagacagggtttcaccatgttggccaggctagtctcgaactcctggactcaagtgatccacccaccttggcctcccaaagtgctgggattacaggcgtgagccactgtgccgggctgtgacaactatactttatcagtgaggattcagtcagggaccagagacactaatgagtgttatggctggatataaaacttttgactcatatttttttgccatccgtggaaagcaaagggagcttatccacattccccccgtgcccacatccagcatctcgtttactctaaccctctctgcaatcagatattgtgattattgacgctagtaacgtcttggaaaaggagcactgaagccatgtttctcctggagaacttgcatggtaccctggaagctgcagcacttttctcactcacaggttgtccaggatgtttcaaggcagacctgggtgtgtgtgtgtgtgtgtgtgtgtgtgtgtttggagtcttgctctattacccaggctggagtggagtggcatgatctcggctcatggcaacttctgtctccctggttcaagtgattctcctgcctcagcctcccgagtagctgggattataggcaccagccaccgcgcctggctaatttgtgtatttttagtagagacggggtttcaccatgttggccaggctggtcttgaactcctgacctcaagtgatccacccaccttggcctcccaaagtggtgggattagaggtgtgagccactgtgcccagctgcagattttttatagtattttggagtcaaaggccaaccatgattctggaggggcaccaggtgggcagtattctgagtatccattcctttggtagcactttctggacacatgcgtgagccaggtactgtgctgatgatcacaagacaaatgttccaagtcacagtttcaggtggaagacaggcccacatttactatatactatgcagtgtaagtactttagtcagtagtcaataaagagctttagtcagtaaggagactgagaaagcagagaagggatcaagaaattctaccttgagaagctgaggtttgacatcacaatgggccccaggacagcaaaggcagtgggaaatactgtcaaagatgaagttttgtctgcattgttggtgcttttgaggaaattgtcactactctgtagcagcagatattggggccaggtagtagaaggatgggcctgaccacatgcaaagtaaatgtgaactgcccagcatactgcaaggcagtttatctgggaaggcggtagctgtggctgggataaatttgcatctccacgtggaatatctgtaatggctgttagcatgttgaaaggaagctcaagcagcagggaggcctgggaacaaaagtacagctgtaaggaatgggcttaggaacagaatgaactgactcaatggaatacggtaggattgtgggtccagggaagctgggataggtgacaagataggttgctgttatgagttgaattgtgtccccctacccaaaatatatgttaaagtcctaaaccccagtacttcagaatgtgatttattgggagactgtttctttacagaggtaattagttacgatgaggtcatactagagtagggcaggcccctagttcaatatgactggtgtccctctaagaaaacagccatgtgaagacatagagacaacgagaatgctgtgtgaaaacataggcagagattggagtgatgtggccacaagccagagaaacagaaggcaaagttggagggagtgttgtcacaagccaaggaatgccagcagctaccagaaaccggaagggcaaggaatgcattctccccagagccttcagaggaagcatgactctgctaacaccatgattcacaattctggcctccaagaacagagagaataagcctctattgtttaaaccacctggtttgtcctaattcgttattgcagccacaggaaactaatacagaaggcta

SEQ ID NO: 41669 - DNA, 2300 bp, Homo sapien
tcacttgtatttctttttttgtgtgtgtgtgtgagatggagtctcactctgtcgcccaggctggagtgcagtggtgcaatctcggctcaccacaccctccgcttcctgggttcaagcgattctcctgcctcagcctcccgagtagatgggattacaggcgcccaccaccacgcccggctattttttgtatttttagtagagatgaggtttcaccatgttggccaggctggtctcgaactcctgacctcaggtgatccacccacctcagcctcccaaagtgctgggattacaggtgtgagccaccacacccagccaatcatttgtatttctataccgtagcaacagacaatttgaaaatgaaatcttaaaaacaattccattgacagtagcatcaaataacataaaatagttcagaatagccaggtgtgatggcccgtgcctgtagtcccagctactctggatggctgaggtaggaggattgcttgagtccaggtggatcccttgagcccaagagttcaaggctgtagcacactataattgtgcctgtgaatagccactgcactccagcttgggcaacatagtgagactccgtctgtaaaataaaatgaaacaaaactaaaatactgctgagagaaattatagacctaagtaaatgaaaaggcataccatgcttatggattagaagactcaatattgttaagatgtcacttctccccaagtttatctgtaggttcaatgcaatcttgatcaaaatccccataaactttttttgggggaaggaaggggtaattgacaagttgattcttatttcatatggaaatgcacagggattcaaggttgcagtgacccctgtttgcaccactgcactccagcctgggagacagagtgagaccttgtctcaaaaaagaaattaaaaaaaaaaaaaaaaaaggaatgcaaagaatctcaaatagctaatatcttcacagtgaaaaacaaatttggagaacttagtagtacttgattttgagacttagttgaaatctaaagtaacctagagacaatggtattgtcaaagtagtaggaagtagaatataacaagagtcagaaatagacacatatacattcaatggacttggtttttttacaaaggtcccaaggctatccaatgccaaaaggaaaagttttcaacaaacggtgctgaaacaattagaaatatggaaaaagtgaacctggaccccccatctcacgccacaacaaaattattttgagatagtaatagacccagaagtaaaggctaaaaatataaatctaaaaggaaacaatattttcatgaccttggggtaggcaaagatttattaaagaggacacaaaaaacaacaaacagaagaaaaacctgaaaattgcatcaatataagtgtctgctcctcaaaagacacctttaagaaaatgaaatggtaagccacagactggaagaagatatttcgaatacatatatttaacaattttgtatcctgaataaataactcctgtaaatccataaaccaaaaaactccaaagtcaggcaaaagattggagcagatgcttcacaaaagatatatgaatgacccagtaagcacatgcaaatgtgcccaccattaattatatgggaaattaaaattaaaaccacaataatataccatttcacaccgaccaagatggaagttaaaattaaaaaaaaaaaagaaaggctgaccaatgtgtctatctactggagctctcctactgcgggtgggaatgtaaactggatgtaatcagtcattttggacaacaggtggcggtttcctataaagctaaacatagacttaccctggcacccagccgacgtgggagaactgggtacacaggtgtacactttacaaaactcatcgaattgcacactcagattgtgtgcattttactgtgtctaaacgttagcgctataaaagcaaaacaaaatataagatcataaaaataaaagcaattcctaggggtcctctccgttcccgggcttcctcggtgcggagggaaacgaaactagcccgaggcaaaacagcctccgcgaaccccgcccgccgctagttgcactttcgattttccctttagttattaaagttcctatgcagctccgcctcgcgtccggcctcatttcctcggaaaatccctgctttccccgctcgccacgccctcctcctacccggctttaaagctagtgaggcacagcctgcggggaacgtagctagctgcaagcagaggccggcatgaccaccgagcagcgacgcagcctgcaagccttccaggat

SEQ ID NO: 41670 - DNA, 2300 bp, Homo sapien
tcatgcctgtaatcccagcactttgggaggccgaggtgagcggatcacaaggtcaggagatcgagaccatcctggctaacacggtgaaaccgtctctactaaaaatacaaaaaattagctgggcgtagcgacgggcgcctgtagtcccagctagtcgggagactgaggcaggggaatggcgtgaacctggcaggcggagcttgcagtgagccgagactgcgccactgcactccagcctgggcgaaagagcaagactccgtctcaaaaaaaataaatcaataaaaatcaaaagtcatctatggcatacactgtatataaaatttaatcatctgctgattacatttgcgggagtgatgttaattttgctgcagagccaaggctgagaatcgccaccacttagtaggtgtgtaacctggaggaagttttttctcaaaatctcacgttttctcaattctaaaatggaattgaaaaggtggttgtgtgacgggacatatttcataaaaacccttagcacagtgcttgatgcacagtaagaactcaacaatgttctctatgttacgtgaacacgaagtgaatttcggtagctcatcacccataactgattatatgggtccagacagaggatagtttataacaacaaaataatcatcatacttaatataattattatacttaatatttctaggcaaagtgactaaaaagggttcacgaatagatgaaatagaaagatcacccaagtattaaaaataaactggttcctacctcttgccaccttaaagaaatcactgtacctctctgaactgcatttaatcaactccaaaagaagatacaaaagtcacaggatctcagtagatcctatcaaatttatccagatcctatcaaatttaatccaattccagcaaaaagaattggctgggaaccgttcgcctctaaaaccactcattccagacaagtatgattgattttagctgattgtatagctttctttgcatttcatggacaaaacccagaaagctctcaccactattaacttaaatcttgggcagctgtttcttaatttatcttaaataatcttgaaaattacctatcaaaaggtctactccgttttcctcttaaatcactatgtggctcatctcagcactgcccccttccagcctacaatcagcaacccatgaggaaagctgcagtaaatggatggatgaacaagtcacgggcaatttctgctcagaatgtttaacacaacacagacaagtcccaactcccaaagccacggtgatagtcgtttactttggttcagaactgccactagactaagataagcaccatgagcattacataaccacaacgaacttaaatattgttattcccattttacagacaggctcagggatttaagggacctaggcaaggtcacatatcctgtaagtggtgacgccacgattcagtctcattgcttttttgcttttccctgagaccaagctctttccagtacacggccaggctcgcgcccctcgggagcgcttgtgggaagcgcaaccctcgcctgcccgcaccaatccacaggtgcgcgcaggagccgctcgggggccctggccctggcccgccgaggcccggacagccccgcaggccatgaccgcaaccctcgggtcccgaggcgccgctccaggcgggagcgccaactcccacggcccttccgacccccgcgtcccattgttccgaatctcactcacctcggaggatgccggcgcaggcctggctggggcgctcgccgcgagctcccggcagcccagaaagctaggtcggtgtcggcaggatccgcgaaggcgtacccggcgacttctccgcctaccctccgaagcgggagcaggcgggggcgcttcaccctcctcgcgagacagcggagaccccagcggcggctgcgacccctgtgacgcaaagggctcatcaccaatggcagctcggaagcagggcagagagcgagacccaccccccagctcccgcgcatcaaaacacaacacccgccttcctcacgcatgcgcagcagatggacgccggcctcgggggcggggctcagcgcaccggcccaaatgcggcccctcccccgccgctccagaccccggaggagggcagcgcgaccctccccatcttgttactggtactcagccactggggacactgactgaatgttcgcccctaacttacccggaaaacacgagaactagttcgatgtcgtttcaaccttaccaaactctgcggaaacttaggaaattatctttagtgtctagataggggaattgtta

SEQ ID NO: 41671 - DNA, 2300 bp, Homo sapien
tgcccaaatgtataatggcataaacatatttattttttcattggactataatcctgagcagtaccaggtcagggaatggcagggattggggtgggtatggggacaattctactcttcccagtcattcagggactggcaggctaacagaatctatcttaaacacatggctgaaactgaaattgaataatctgtcttaaaactatacagcttgtcagtggaggttccaagattcttaccacttggttctggcttcaatgcccatgcctttttgcccacatctatatcaagaattgaaaagacatctggaccagctgcctagccaaagtttgtattctgtattcagtatgtaagccaatcagaaaactggtgattgcgtaacacattcagttgctgggggtacattacctccttatctggaactgcagatgtttccttgcaacttctttctggggcctccatttattggggtcatacaaaataaaagattatccctttatcacttagagaacacaattttcgtgccctttttgattattttgtttctgagtgaaaatttccctattatttcactataccttaaaattttgaatactgattgttcagatttagtcagcttctactttgtctagggtccttttaaagggaatgccagaactcaagtacattttccatgtgagatctgatgaacatagaacagaatagaactatcacctctgtagacttaagatttttgtactaactgtatctttgttttcctagggtgatacaattctggagactggagaagtaattccaccaatgaaagaatttcctgatcaacatcattaaagattatgtaaaaagttaaaaggcttatgagcctaagtttgttcctatattaccatatttactgaattttctggaaaagtaactttaataaagtttaatctcagaaattgtcatatctgttttcaagcattgtacaatttgagactgagtaatttaacaataagtaaaaagtggacatgctaaacaaatatgagagactacctactttttctggtcattcttgacttggaaaacggtatggaaaagtatttagttacatgtttgtttgtttttttcttacacagtacttacactaatttggtatcagggtatgcaacagtgaaatatcacaataaacaaatgtaagaacagcaattccatgcacttttgttttaaggaaatctttccggccaggcgcagtggctcatgcctgtaatcccagcactttgggaggccgaggcgggcagatcacgaagtcaggagatcgagaccatcatggctaacacagtgaaaccccgtccctactaaaaatacaaaaaaattagccgggcgtggtggcgggctcctgtagtcccagctactgcggaggctgaggcacgagattggtgtgaacccagaaggcggagcttgcagtaagccgagatagtgccactgagcctgggcgacagagcaagactccgtctcaaaaaaaaaaaaagctttccgaatcatttttgaagaatttagaaacttgattgaaaagcttattccaactatgatctgacactcaagactgtcagatttaggttgctgttaattttgtcatgagaatgtaaaatactaaaatctctaagtgaaaaatttgcatactagtgcttgttataaaggataatgcaaaaataaacttgggaactttgcattatgaattttatttttatatctacataagcatgagggaaagaactgtattttcagataattaaatccagaagagttacaaattttcattcgtcccaaagattttgtctgggtatttcttccttagctgtcgtcttgcagacaccatcgaagcatagatgatgcagccccaggagattaaaacgatggcaagcagcaactaaaccaaaaatcgcaaaggaggtgtgaaatctacctgatatttcccctcgcccccgtcaggttaccgttgccattgctaaggtgggaattaaagtaacaaagtcgaataaatggggttccagtggcgggtacacccagcagcccttacgtaagaagcggaagatcgtatcctccaggaagaggcggagtcgaggtgagggagtgaaatgcttaattcaggaatggattttggagtttctgggtgctgaagaaatagggcctttccgcctgcgggcccagtgagtcgacacggtgggggcccgcgatccccgggacttaccactgaataaatccagtccagcgtgcgacgacttactggcttcatggtaaggaggcggcagcagtccgcgggagct

SEQ ID NO: 41672 - DNA, 2300 bp, Homo sapien
ttaataacagtttattttctctggcttactttattgtaataatatagcatataatacatatacaaaatgtgtgttaattgactgtatgttatcagtaaaacttctggtcaagagtaggctattaagtttttggagagtccaaagttatatgtggatgtttgattgtgccaagtggaggggattggcactactaaccctagcgttgttacaagggctattgtatttagaatgatgtgtacctttgagattatgccaccaagtggaccaattaagagctactggtttttacttgatttttatggactgctttttgtaaatttaattttgttttgtaatgatattgttaaaattaaaactttagaaaaattaaatttagcagaaattaattgagcaatgaccaatttgagaatcaggcagccctcagaaccagaggaggttcagaaagtatcgttccacaaagaggccaggcagcacgcatagaaaaaaaacagaaatgagatacagaaacagcttgattggctacaggttggcctttgccttatttgaacatgggctgatcagttgaccacctgtgatgattggctgagactcagttatttgttacagaagtatattcctaagttaggctgtgagttaaattgcatactaagttgggttgcagttcattatataaggactcaaaatacggagacatctttaagctaaatttaatttcacaatatgaaatatttacttggttctaaagtcaaatttatgaagtaagatgtttccagagatgtctagattctatccctgtctcctctatcctatttatttcctccaccataggtagcatctttaaaaacctcaattgttttcattcccattattttgaaaatttaagaaaatatgtatatatattgaaattaccaccatctttctctttttgggtaaaagcatactgtacaaattcctatccattttttttccactttgtaatgtattctggagatcacaccacagatgtatatagagttcttccttattacttttgacgattgtattagcatttcattgctttgttgtgtgaaagtttttgggaagccactgttttggactagcttcacgcactaggccccagcagaccagaccaaaccagaatggagtcgtttgtgctaagtaccacacaatcaaactgaactttgaaatgggccagtttcccaaaaaataggaaattcccttaagtctgagtcagtgaaacaaggaagtttcttctgctttaaccctaaaagtaactttgaaacgatgagtccactttttgttcggtttctgctttcttcagcccctatttgccaataaaaccaaccgcctctgctcagctgatcagaacactcattctactttatagaatgaggtgttttttgattctagaatcacgaataagagtcaattaagatttttaaactaattcgttgtaatgctgtcttttgactgttgtactacaatttattcaagcagtcctttatttaggaatttgggggtaatttccaatattttggtattatgaatcgtgctgaatagtcgtgcatgctctttcatattttcaccacacgtatttttgggtgaaagcatgaattcatctatgcaattttgctagatattaagctactcttttcactattcctgtacagatggagggacagatgagacagctgcccagggcacttcagcagttactggcatagctgggatttgaactgggatgtaactattttcatacactctctaggtcattccaaggtgggagaggcaagcaaataattttgaatctggccagcatattcactgaaacatttatgcttatccttcctcctcccagcatacaagttcttccttagcaaaacctccagtcctctaatttagcatactttcgtctaatctgtcactttcctcaggccccacaactacgagtactccttgtccccacccggtcctaatttggtcgggtatagcggaggtgggcgtagagagaactggaggtggagacctttgtgcatgcccacacactgctttcctcgcgaggaatctggggcccttgcagaggcggaaccaggatgtgacgtaataaccgcgcgcggcgctcggcgttcccgcaaggtcgctttgcagagcgggagcgcgcttaagtaactagtccgtagttcgagggtgcgccgtgtccttttgcgttggtaccagcggcgacatgacggggtacactccggatgagaaactgcggctgcagcagctgcgagagctgagaaggcgatggctgaaggacc

SEQ ID NO: 41673 - DNA, 2300 bp, Homo sapien
tccaggatggatgacagcgtcaccatagggtctgtgcggcgtcggtggatggacttatgaggtatattcaaatagtcacaatgaacagtggttccaactcgccgtttcttctttggaggaagctgctgtttaggaaacttgagaaccagagattttctgcgaacctcatgcacattctcaattagctgtttcccgaagacaattttggtcccttcaaccttgataagttcttcattatcattatgaatgactgtcttttccaactcctcctcctgctcttctgtcatggcaacaggtttcgaaggtggcacatttgtttgataatagagggggcagaatttgttagtcctcatatgtccaatggcaccacatgccccacatttcagttttaggtcaggacgctctttcattttcttgggcttcttctcaggaggacccttaagcttctccttttcctggttccgcttaagccgcctcagttgctcttgaatcctccgccgttctttccgcatctcttcccgatgtttttcatcaaaaagggcaaatttttgaatgaatttctcatcttttgtagtccgtatgcgcacataggcatcaatgacagctggttttcggactgtctcacagcgaacatactctttcccctcttcatctcgaaatgtgcgataaatcttgagacagtgtccagtggcagaagacttaaggctagtcatggaagctgtgacatcatctctgtgattgtttcctgatgctgctgagcctgctaccagtagcattcgccgtagttccttccgctcctgctcctcccattcacgtgacagctgagagctggttttcttgttctgcaacatgttctcaatgttctttcccatttcttcaaagtcactatcttcagctgagatgctgtctgtgtcagttgataagacctcagttgatgacagaaccttgttctgtaggtcaaagatacgctgacattcctctttgtaacgctcttgatgctcagccacagaaaaccttgatccacgggcaaatttactcatgggcccctctccagaatgagcctgttctgttgacattgtgcgcaccacatcaatcacttcccagcgggacaactttttaatctcttcctcaggcacaccaaatttacgtagaagttgcttggcatttttcagggaaaggcgacgaaggtctgcatctgttcctgtcactgtcttcttcactgcctgtggctctttatcatccttctgctgtgttggtttatttggaatcttcacataggagaatccttcaccacaccctgtgggatctgccaccccagtcacctctaggagacacttgcccttcatggcagcaatgaaggcccttgtggtgttccaaggagcagcgtgaacttcatcatcaatcttcatctggaaatcttcctcattttcttcttctggggcaaaaaaggatttctcaccatagccagcatccttcagtcgttgctttgcagctatcatgctataataagcacagcactgctctggtgacaccttagctctgatctcttcttccgttggtaaacgaaaatcagacttaagcacccaccagtttgaatccatccctgtgcgtttgaagtcagcgcagagctttagcctcttccggatgctgctttctgaatgggaaggaaaggctttttttatatcttccattcgtatcctccgtggccgatctttactcttccagaaaaggcggtaaataaaaacctgtagaaagtctcgaatatgcatattggcccttctggagttaggcccaggaacttcaaacaagggacactgctggccaaccacaaaaatatccactaattcccgaatatagtaaccctgtcttgtccgaatgatcagaaaatcagtttctggcatcttatgaagatacactggagcacgaaaaaggttgttctcaagtgcctgcagtaattggccaggatggagagagcccaagaaaggagatgtatggcagtaaacagtttccccatatttacaatctggtgctccaggatctttgccaggtttccgtttataatagttctttatcttggttgccatgccaacctgcatcattaagggtccattttcctcactatattctgcaagaataagatctccatctttgcctgtgagatcctgaggtgtgcgcataaaaaacaactctccaccacctgaggcttgcctctcttgttctctcatcttggccttttttttgatgtgctttagcaaaggttggactgaatggggacctggctgagagagtgcaccaaatga

SEQ ID NO: 41674 - DNA, 2300 bp, Homo sapien
atagcaaagcctggaaacaactcaaatacctgtcaatgggtggctggtatactcacccaagtgataactctacagttatcaaaaataagaaggaatctctttataaactactacagagtaatctccaagatatatttttaagcaagaaaagcaaggtggaaaagtaaatactattggttatctaaaaggaagagataaaaacatgcatacacaattgatagtatttaaaaatagaatgataaataataacactttaaatatgattacttatagaggattacataaacaaccacccaagataatctgcaatcaaattgtgaaaatcattaagacagttgactagactagtcccagctacttggggaggctgaggcagaagaatcacttgaacctggagacagaggttgcagtgagccaagatcgcgccactgcactccagcctgggcaacagagcaagactgtctcaaaaaaaaaaaaaaagcataaaggaaaaatttgataagattgaaattttaaaatatatattaaagacaccattaaaatagattaaaagacatgtcacagactggggaagttatttgcaagcaaatccataatatatgaagaactgttatacattaaagaaaagacagataacctaaagatactataaaaattagataaaaatatatgaaaaggcaattgacagaagaggaaaaacagttggtcaataagtgtatgaaaagttagccttcagtagcaatcagaaaaatacaaattaaaaccacattatcattatacatttattagaaatgaacaaaaattaacaaatgacaatgctaagtgttagaatggatgtggagaggtgagaacttttatacactgctgttaggtatgtaaaatggtacaactactttggagaacaatttagtaatagcaagtgtagttgaaaaagcatatattgtaaaatctagtaattccactcctagatgtataccctggagaatgtgtcctacatatgctcaaggaatcatatacattatttataagaggaacaatttgggaacaatttaaatgaacaaacataggaacatagataaattgtagcataaccatactgtagaacactatagagctataaaaatagaattgaatgcatcaacatagttgaatatcataaacataaattttatccagaaaacattctggctaagagtacatacagtaaggtcgggtttggtggctcttgcctgtaatctcagcactttgggaggccaaagtgggaggattgcttgaggccaggaggagtttaagaccagcttggctaacatagtgagatcccatctcttaaaaaaaaggaagggggaaaaaaaaaacgagtacacacagtaagatgccttttatacaaaattgtaaagcatgacaatgctatagattatttggagaagcatacatatgcagttcatgtataaagagatttacagaggctgggtgcagtggctcacgcctgtaatcccagcactttcggagacagagacgggctgaccatctgaggtcaggagtttaagactagcctggccaatatggtgaaatcttgtctccactaaaaatacaaaaaattagccaggcatggtggctcatgcctgtaatcccagctactgtggaggctgaggcaggaatctcttgaactcctgaggtggaggtttcagtgagccgagattgtgccactgcacgccagcctggggcgacagagcaagactttgtctcaaaaaccagcaaacaggctgggcgcggtggcttacgcctgtaatcccagcactttgggaggccgaggcaggcggttcacgaggtcaggagatcgagaggctaacatggtgaaaccccgtctctactgaaaatacaaaaaaaaaaaaattagccaggcgtggtggcgagcgcctgtagtcccagctactcaggaggctgaggcaggagaatggcgtgaacccagaaggcagagcttgcagtgagccaagatcgcgccactgcactccagcctgggcgacgttgcgagactccgtctcaaaaaaaaaaaaaaaaaaaagttttgcgggtttttccccccgcccctttgccccctccccccgcctttattcagcttccggtagacgctggtagggtaagggagctaagtagatcacttccgggcgactgttgttttatttccggtttatgcgacccggctgcgatttgctgctgagggcagcagctaccgtcactgccgccatcatgtcagactcggacagcgaggaagattcatctggaggtggcccatttacttt

SEQ ID NO: 41675 - DNA, 2300 bp, Homo sapien
aggatagaatggtgtcagtaaaagaaacggttttaagaagggaaaacttttcaataattgtaacacacgtagcgagctgcttccccagtatttaaaaggagcagtatgctgctccttttaaacaaaacccttttttcagaccatcagtggatctggtaaataaataaacaacaatttcccaggtacctttgtatcccaaagctcatccatctctggtcaattacaggcagatgcctatctacttgggggggctgccaggaaaattattattgtcctcatacaagtggccaaagaactggcacctcacttttaccctttgcattttctcctttcttccctcctaaatgattctatgcctaaaggtgcagcagctgtctaatggtcatgagtacaaaagatacaaaatagatgatggagaggaaaatgagaaggatctgcttcctgatccacccctttgaaagtgagaaagttgggagttgaccttggctcctcccttcatctcacttcactgtgctccaagacacttcactcaacccttaaataccctcagatctgcttccttccaactcctctaccagcccgacattgttaaggccacatcatgtcttgcccggcttactgaacttctcagcttactgaacaagactcccggcttccagacttaccagctccaacctatgctctcacctgccgcccctttcagtcaaactggaatgtttttgtattgatctttgcttaaaatacatcaagcgttcttcattgcctagtggataaaaagtccttagtctcacagcctttatgatttgtttggctcctgtcatacatgatgaagacactaattatgatgacaaatatatatacatatacatgtgtacgtgtgtgcatgtgtgtgtaatttttgtacacagactatgtaccaagcattgtgctaggaactttacgtttatttaatcctcacaatgtttcctcatatatttggtattaatctcattttacagataggacgactgattctcagagaggttaagtcacttgcccaggaatatacagctagtttaactggggaaggcctggatgtgaaaattctttccagtaaatcagtgtcttgacatgaaagcatgtaccgctcatcaacctgttctccaccgccctcctctatcctaaatgggcagccctgttgaagaatcacagccaaagccagtcttgccccccggggccagaggaatccatctgcccctgcctaccagagcgggaggaacgcaggctctcaatgcctgcttcagcaagggaggagagaatcgcccagagctgagcggcgtcgtagggtggtggtcctgaccggtcaaggccccttctcctcgtgaactgggggccagggagcccttctccctgtccccccggcaccacagcgctgtagaagtgaaatcccggctccaaggtcaccctctcccgagcctggagctggaaagccacggggactccggggactcccccaaggcccggactagcctggcacccacccctcaccactaacccactccgcctgggcgctggttctgtgcgctcccgcggcgcagtcgctccgctgcaagagcgctttcgcgcgccgccaccgcccagagccgggaccaaagcagtcctcgggcaccggctccccgagggacacacacccccccgcgccccgagtcgaggggttgagagaagggcggtcggggagcccctgggcctgccgtcagtcacccggatttgtaactggagaagggtgcgggtcccggagggacatctccagctggcacctaactcctcggatcccggactgggagcccgagctcggatattgcaacggctgccccgtgggcaaaccgaccctggtttccgactccggccactggcagcctcgcgccccagacccttcccgggcacggaagcgggtcaggtcgccctgctcagcctccggaacggcggcggcacaaaccccggccgctcccagcagccccgacgagaccccgggcagcgcctgccgccgggtggcctccctctggggctgaccccctcgcgcccccgcgcgtctgtctgcgtttctgagcctgctctgacagtgatgtaacaaggccaggctcgcgccgcgtcccctctttcccagactcagtgctccctcctcctcccgcgccccgcgctctgcgcgctgagctggcgccgggctccgcttgcacagcaccgggaccgacgggcactgctgggagagccgctctcccaggttccacctccccgatgcagagtccgtgggggaaaccaggctt

SEQ ID NO: 41676 - DNA, 2300 bp, Homo sapien
cttgactataggcaggtttccgggagaggcatgttagaggcttgagcactgataagagtctggagtctagagaggcaatctctctctgcccataattccctgtttcacctcattgggtgatctcatcctctctctctttgcctcagcctctgtgacatgttgatgcctctcaaatatatgcatttagtccattcccctctcttgagcttcatacccacatatcacagcttgagtcttggatcttccacaggcaacttaaaataattacatttcaatatgaaattggtccttctctcttcactttcctttttatccccaaattatgtctccttgtgtatttttcatttttgttaatgggcatcttccaaatttgaagtctttggtgagtgtctcgcctttttttttttttcttgagatggagccttgccctatcgcccaggctggaatacaatggtgcgatctctgctcactgcaacctccgcctcctgggttcaagcaattttcctgcctcagcctcccgagtaggtgggaggcacctgccaccacacctggctaatttttgtatttttagtagagatagggttttaccacgttggctaggctggtcacaaactcctgacctcgtgatccgcctgccttgggctcccaaagtgctgggattacaggcctgagacaccgcacctggccagtgtgtccttttattcctttgtcattccccaaatgtcatcagtaattaagtatgtcttccagatttctcctggctcttcttgctctccatcccctttgcttcggccattgttgaggtctcatctctcttctgaatttcttgtctctttctcttttactgatagtccacatggccataagggttgtttttcaaaagaatatcagcacttccattgttttgcgcgttgcgtattgcacaaaattgtcacattcacactttagaaattgtaggtttgcggccgggcacggtggctcatgcctgtaatcccagcactttgggaggccgaggcaggcggatcacctgaggccaggaggtcgagaccagactgaccaacatggagaaacctagtctctactaaaaatataaaattagctgactgtggtgacacatgcccataatcccagctactcgggaggctgaggcaggagaatcgcttgaacccaggaggcagaggttgcagtgagccaagattgtgccattgcactccagcctgggcaacaagagtgaagctccgtctcagaaaaaaaaaaaagtaaagaaattgtagatttgcatatttattatgactgtctcctggcagatgggagtgaaatatattgttctaacatcagtatgtcatgacagggaaggaaaacctatgacacataaagacacctaagcactagagaacatcttttttatgtccttagttctctggcaggcaaactccttctcatcctttaaaaccgcacattaatatcccttcctcgtgaagccttttaaaatattctccacaagagtcagtcagtccttttactgggctaatgccatatttggttactctcttcttgtagtgtttatcacattatattgtatatattggtatatgattctgtctgtcctactgcactccaggctcctcaaggacagggacaatgtccctgttttattcatcctttgactttcaatatgtagcctaatgtccagcacatatcaatacatgtgtaacaggccaggtgtgatggcttatgcttgtaatcccagcactttgggaggcagaggcgggtggatcacctgaggtcagaagtttgagaccagcctggccaacatggtgaaaccctgtctccactaaaaatacaaaaattagccaggtgtggtggcgggtgcctgtaatcccagctactcaggaggctaaggcaggagaattgcttgaacccggaaggtggaggttgccgtgagccgagattgtgccactgcgtgccagcctgggggacacagcgagactctgtctcaaaataaataaaataaataaataaataaatgtgtaataaatatttgattgcctagcatgattcaggcagggaggtaaatacttactcacattatctcatttaattttcacaacagcctcctgagtcccatcattatcatggtttataggtgaggaaattgagactagggtggtgaagtcacttgcctcaagatgaacagctggtagatcacatgcgtggtggcaccgggtgtggccctggaggactcgtgctagtggatctgtttttctagtgattcttttgttttgtcccttagagtgatg

SEQ ID NO: 41677 - DNA, 2300 bp, Homo sapien
ccaggtttctcagatctctgacacttcccgttgccgaagaaagaaaaactccttggtggtccattataactttagctgtcatccaataactttctttctctttatatccaaactgttttagtgagtattctgaactctgcctccatttcctcaccttttgtttccttctgtatctagctctcagacccatcattcccctgaaatttcaccccaaggtcaccagtgactattgtcaaaccagataaaaattttttgattattactggatctctttgctgcttttggaacttggtcatccctttactcccttcttctttgctttacgtgtcagtgctctcagatgatttattcaacaagtattgattgggatacagagatgaacaagacagataaattgttttctcttaaggaatttacattctagctgttctccatgtgcctttcttaccagtcatttctgctatgggtagtcattttcctccttccctaaaatgttgggtgtttctgttgtttgtgactttggcatataaacaatgaaaaactgttctttttttttttttagcttgaccaattttttttttatactttaagttctgggatacatgtgcagaacgtgcatgtttgttacataggtgtatactaagtgccatagtggtttgctgcacccatcaacctgtcatctacattaggtatttctcctaatgctatccctcccctagcccctcaccccctgacacgccccagtgtgtgatgttcccctccctctgcccatgtgttctcattgttcaactcccacttatgagtgagaacatgtggtgtttggttttctgttcctgtgttagtttgctgagaatgatggtttccagcttcatccatgtccctgcaaaggacatgaactcattcttttttatggctgtataatattccatggtatatatgtgccacattttctttatccagtctatcattgatgggcatttgggttggttccaactctttgctattgttaatagtgctgcaataaacatacatgtggatgtgaagcttgaccagtttttataaaatgattatacctatgtgaccaccatccagattaggttacagatacataatattaccagcattcagaatgaaaactgttcttttcattctgtacacattgcctgagtgaacccatcagctggcttggttttaactacctcctacatgcccccaaattgaaattgtcagcttagacctctctgagctttaccctcacatctgactatcctcctggacagctctgcctgcaagtcccacagacacttcaaattcagatgactgaaactgaactcagtgtctttcctggacttaactcttatcacattcatcactaagtcctgatagttttaccccctaaacatctctcaaatctgtgcagtcttctccatctctactgttgtccttttacctgcaatatcatggccttctaactgatttccctgcttctaggcctgttcccccatatcttttcttcacattactcccctccacccccagatggtctttggaaacaagtctgtatcaaattcctgcttaatctttaaagatctgtccatgcattcatccattcttttctctaattcattcagcaaacattcattgtctactggcttgcaaaatccattgaaagttctaaagtttgagcttctcagccagggctctgcctgttctgaaccctgcctgtatctccagcctcttctctgcctcatgctttaggttccagcaacactgaatggcatcttcatgggtactgtgctatttcttctttgtgtacttgcccttgttctctttgcttggaatcttctccctgtttcctttctccacctcctgctcctcacctaattaggctgctccttttcacctaattaacccagtttataaatgggactcagttataaagtttaggtccacctcctccaggaaattttttcctgacacctccttcctcccaatctcggttgggtactctagcattgtgcttccaccctttgcacagagcaatcatcatgtttaccacatctactattaacataattgtttgtgtttttctcctccacaagatttattttttttagatgaggtgttgctgtgttgcccaagctggacttgaacccctaggctcaagcaatccttccacctcagtctcccaagtagcagggactacaggtacgtgccaccatgcctggctaaggctgagttttttgaaggctgggctcatatattatctctttattcccagtactagaatggcacaagat

SEQ ID NO: 41678 - DNA, 2300 bp, Homo sapien
catgaggtacctagagtggtcagactcatgaaaactgtaagtagaatggtggttgccaggtgggggagggaaaatagggagctatttaatcgatacggagttttttttttgaggcagagtcttgctctatcgcccaggctggagtgcagtggagtgatcttggctcactgcaacctctacctcccgggttcaagcaattcttctgcttcagcctcccaagtagctgggactacaggcgagttccgccacgccaggctggtcttgaactcctgacctcaggtaatccacctgcgttggcctcccaaagtgctgggattacaggtgtgagccaccgtgcctggccgagtttcagtttttcaagatgaaaaagttctggtgattagcatggcaatatgaagtgcctgaaagtcttcactgcctgccatacctttagctatacattgtgccatgtgatcttgcttttctggccactaatacactatagacaatggactaggcctaacaagcaggacgtggaaactctgcccaattttgcacattatatagtgaatgatgtaattagaatgatccaatccaacttttggatgcaagacacacaaaggcaggtcaaagaagcacccttaaccgagagggatgcttaattgagggaacaacaaaactggtcaggtcaccagagttgcctctttttatcttgggcagttgtgaacaacattcctcagctgtaaggcctgtgtggctgctgagatgctgcttgtgttttcccacttccttatatgaccctaatataaacctgcatcttctctgctaacaaaagcaagcctgtcctctgtgtttcttggaagatcctcccaccttctgtcttgaaggctctgatagcttcatcataccattaagtctctgcttttccatggaaggaaacaatactccaccttgatgaagaatgtgactccttaaatctcaattttgttaaagaaaagattattcaatgatacttgctgaagcatggtaaggaagactttattcaggaacttcatgataggtatatagagctcactgcaacggggttttgcagtggaagagagattaggctcaactccaaacagcagcatgggcaagtgggcatttatggccaaggagctgtgtaggggtcagtggatggaaaattactaagaggaaacatcggggtaaaggagtttctggctaaatatacctaacaggattcttgctggagacaggccaaggtaatcagacatcatctgggggatagtggagaataaggaacctgatcagatattgagaataaccacataaggcggggtggtggtggtggttcttggtaaactgacttagccagggtctgtgctaaaactggattttacagggaagtgcacagatgggcctagcagaaaattcagaaacctaattcaaccaaagaatttttgccagtgtgttgtacttgagaaaaattataaactatacttttacctccgagatagggattgttccttctgccaaaatgcctttgaataactgcaatatgattcttagggaactttctggaattgctgtaaaaaatcagtacacgcatcttatccctgcatcttgctttttttctcccggattgcccctcagttcatttagtgtacacagcactacaaaaaacaggtttccctgcctcttaccgctccattctttcctccctgcacaaaggagaaagcggactgtagtttaaaaagcaagtagcagtgctacagcaggttgtctgcagcaggagagatggccttaaaggttgtgaacgtctccttatggagtatcgagaagctgcacagccacctagaaacgtccacagagggattgggtctgaaatgtcacccaattcagagactgtgaggcagtgacaggcgagtggccctcaggcagagagatgctgagagagctggtccccacaggcataacttccaggatcctcagttggaccacggcccagagagaacccaattggggcggacgctttttgatctgggaagtgggcaagattctttcagccaatccgttagagaggtgctggtgacgtcactggtcgcgatacagccggcctctgacgtcatcccgcagcgccggaagcggtgaggcacagatgagtaacgtgaatttgtccgtctccgacttctggaggtaaggcggtcgtcagcctatctcttctgctggctgggctcaatgccgcgggtgagcgttcggccgaggctgctcctacccttgagtgatgtgccttgaatgacgctgctttcatgcgctgctct

SEQ ID NO: 41679 - DNA, 2300 bp, Homo sapien
gagccaccatgcaccccctactcttcctttattagcatttaacactcaactgtttgtttctggttccctatgttgtgagctccttgaaggcagggaccacgacttatgtgatttttttttttttctgagactcgacagagtcttgctctgtcaaccaggctggagtatagcggcaccatctctgctcactgcaacctccgcctcccaggttcaagcgattctcctgccacagcctcctgagaaggtgggactacaggcacgtgccaccatacctggctaattgtttctatttttagtagagaagggtttcaccaagttggccaggctggtctagaactccggatctcaggtgatccgccaccttggcctcccaaagtgctgggattacaggtgtgaggcacggcgcccggcctgacttacgtgatttttgtattacaaagccctagtacactgcctggtaatattagacgtttattaacggttggtttaaacaaaaaactttataccagaggtgatacttgagaaggcaacacctaagattgaaaaaaatcaggtgtctgtcagccaatgcaaaagcatacaaaggtgaaaaggcgtatatgggaaactgcggatagttctgtgactggaatgcacagttaaaattaatgaaagagaaaaggctgaagaggcagcatgaggatgcttccaaggataaagttcaaaattcttagcgtagcatatataccaacagacaaaggcatgccctaactagctttgaagcctcacctccggctattctagctcccttagctatggctatatccaattagttgcaatttcctaaaaacatcatattcttccacaccttagtatagccttcccctgtgctttgtccactgctctcctcccattttcaaaactcagctcaattgccactttcccaaagaaattctctctgatctatcaggttaatataggaggctctcccctactgacttctacctcatggtttctctggcagtctgttgacttgtttggcttctcactaaagtctaactggggcttttcaactctgcatctccagttctgtttttgttttaaatcgagacggggtttcaccatgttgcttgggctggtatcaaacttctgagctcacgcaatcagcccacgctggcgtcccaaagtgctgggattacacacgtgagccaccgagcgtggcaaactccatctttcttggtgctagatactgacatacctgctgtgtccctggataaagaagcggaccccaattcccattaagcccccgtggtaccattttcaagtccgaggtcttacgttgcagattgtacatccaggttccctgacccgtaggatttaaaagtgaggtcaaataattaaacaaattgttttagtcagacactcttgcggctactctgtagccaaactgggtgaaaacctgaccagaggagtccacggccctctgtacatcaaagacggtccaaacgtctcactgtttagctcagtcccagacacactgagctcaatctgcacgaatcagcgaggtccagggcagataacatgtgtctaggggcctggacttgcacaaaaagccttaacaacttcacaatttgattaattatgccgccttggaccacgcgtgaaaaacagcaagacccaaggcctatgctattggtctggggactagacccacctggctcaagcattttttgctcgccacgttcccaaaaagagaagaggcgcccgtaagaggggggggggggggggcaagactgttccaagagctttcccgttcacacacagctcccgctgggtcactgtactcgagcccttcccgccctcgcgggcccaggcggccaccccacaggtttgggaaccctaggacttgcagtgctcctgggccatgccccaccagccggagacttccgcactctcaggctcgctgagtggagaaaagggctccagaagattccacgagcgccgggaagccgcgctagcaccaacacccacaaggcctttcggcgcagctcctcccgacccgtgcgcccccgcgccgttgcccaggtaacggcggggcggtggcagcggccgagaagggcgggacttccggcgggtgacgcgcccgggttcggctacaaaagaggacggctgcggcgcgccgggcggaactttccagaacgctcggtgagaggcggaggagcggtaactaccccggctgcgcacagctcggcgctccttcccgctccctcacacaccggcctcagcccgcaccggtgagtttgagccctcgcgctgcccct

SEQ ID NO: 41680 - DNA, 2300 bp, Homo sapien
tggctctccagcctgggcaataagagggaaactccgtctcaagaaaaaaaaaaaaaaaaccacaacaaaaaaacacgacaccataaatcagaggcaatttgtggtcagtttgcaacattataccaacatgtaaacaagcatttaaaatgggtgatttctcaaagatctgctctgaccaacagctaactttagttagctgcacaaagactagattcttcttacctctcctttctctctgcatccttcctcctcctccaaaaaacatatcaaagatgtccatgggggagccaaaaccgccacctgctccaccctctttaattgcctgttctcctcctttgtcatataattcccttttctttgcatcagagagaacttcgtaagcttgagaaatctgtttaaactgtttgagaaaagaggagtgaatttcattttttaaaaaacaagtgttacctagctacattacacttgatcttagctaaaaaggccgagaagtgatcatagttactatattagatactcgatttcaggccataatagaaatactatacgtctggcaaagaactattcagatacgtttaagagtagatactattcaccttctctccttcatttgggttcttatcaggatggtacttcaaagccagtttcctataagcctttttcaattcttcctgagtagcattgggtttgacccccaaaacatcgtagtaagttgtttctttcaccatcttctactgcctgaaataagaaaatgcaactttaaccggctttcaactggtagcttttaataaaaaagagagctaaggccgagcaatctctttgcaaaatccgattataagaacaccaccttccctaaatttcaccaaaaaggtaacaattcctgcgataattcagctataaactcgaacagacaaaacaaataatcattatcgggaaataatctgagagccgccttctagcagctggttccaattttcctacaccaaagcttccatactaatataacacaactattatctggattcttcccgtttgccctagaggcggtgacagttgtaaccaaaagaagcactgatatgttcagtctaccggtcattacactatcactgtctttggcaaatctgataaactccatatactctccagaaaaagacgtctgggcacacagtggtgggggggagtggtttatagaacaggttactggctccacacagcaagccctccaccgcccacggcttacagcttctccagccgaatccctctcgcccctcaggctggcagagtttacctgccaggtttccccttgcacttggcgctgaccgatttccttcctttctccctcccaccctggacccaagtggcggtggggaaagcccagccctcaacaaacaaagggaggggaaacagagaaagcgaaaccaaaagccgcagtctccgcccggctccccccgcagcccctcgcccctgcctccctgtgcgcgtgcgcagggtcgccaaccccactccccccccccaccccgagcgagcacggacggggaggggggccgcgggggcgcgcacggaggggcagccgaagacagtagctccttggagatcccaggctggggaaggagggaggtctaggaaaggtctcgggcccattcactgtgcgtgccggggatgggttgccagggcaccacaccagccctccaaaagggaaatcgtgggcccaggaactgacagcggtcctacccacgcggccaactgcctcccgaccgcggctccatcggtttcccggcgccaatggcgccagccaggggactaggggcagcgcgagggctcaaactcaccggtgcgggctgaggccggtgtgtgagggagcgggaaggagcgccgagctgtgcgcagccggggtagttaccgctcctccgcctctcaccgagcgttctggaaagttccgcccggcgcgccgcagccgtcctcttttgtagccgaacccgggcgcgtcacccgccggaagtcccgcccttctcggccgctgccaccgccccgccgttacctgggcaacggcgcgggggcgcacgggtcgggaggagctgcgccgaaaggccttgtgggtgttggtgctagcgcggcttcccggcgctcgtggaatcttctggagcccttttctccactcagcgagcctgagagtgcggaagtctccggctggtggggcatggcccaggagcactgcaagtcctagggttcccaaacctgtggggtggccgcctgggcccgcgagggcgggaagggctcgagtacagtgacccagcgggagc

SEQ ID NO: 41681 - DNA, 2300 bp, Homo sapien
tatttccaaaatgtcatcaccctaaacagaagccctgtaacattgtcaattaacttctccttcccttcccctcagcctttggtactgtttctgcctcaatgcatttgtctaagtttagttcatataagtgaaattatacaatacttgtccttttttatctggcttatttcatttagcatgttttaaaggttcatccatgtatcaaacagtaaagtgcttcatatttgggggaagtataaaaagtattccttttaatggctgtgtatttcacagtgtatgtacacatgtatattgagaattgagagatttgtaggtacacattaaccatttgttggtggacagtcaggtttccactttgggctgttgagaatgcacagtaaacactgaccatacgagttttttttttttttttttttttttgagacagtctccctcttgtcgcccaggctggagtacaatgatacaatcttggttcgctgcaacctccacctcctgggttcaagcgtttctcctgcctcagcctcccaagtagctgggattataggcgcccaccaccacacccggctaatttttgtctttttagtggagacggggtttcaccacgttggccaggctggtcttcaactcctgaccttaggtgatcagcccgcctaggctgcccaaagtgctgagattagaggtatgagccaccgcgcccggccttcattcgtttttaattccttttgtatagtcatccctcagtatccatgggggtactggttccaggactttccatggataccagaatccgagggtactcaagtccctgatataaaacaagatggttatttgcatataacctacacatcctgcgtaatttagccatctagctctaggttactggtaatacctaatacaatgtaagtactatgtaaacagctgttatacttttaacagctgaagtctgtacatggtcaggaaacaatttttcccaattgtttttgatccaaagttgactaaatccatggatgtgaaacccaaaaaggagggccagctctgggtcatgtggtaattccatgtttagctttttaagcagctgccagacttttctacagcaactgcaacattttacattaccaccaacaaagtacagagggttccaatttctccatattcttattttccattttttggattagagctatcctattaggtatgaagtggtatctggtttttatgtgcatttcccttatgactgacaaacgctgaaaaccttgtgtgagatttgtaaaaatttttaagcgtcctataaacaatgcttttttttttttttttttttttttgagacggagtcttgctgtcacccaggctggagcgcaatggtgcaatcttggttcactgcaacctccggactgggtttgagcaattctgcctcagcctcccgagtagctgggactacaggtgagtgctaccacacctggctaatttttgtacttttagtaaagtacaccacgttttcaccaagttggccaggctggtctcaaactcctgacctcaggtgatctgcctgccttgtcctcccaaagtgctgggatcacaggtgtgagccactgccaccatgcctggcctaaacaatgctcttaaatgcattaaaatacaggttcagagatttttagaatttgtacataaacccagtgaaaagtgaaatctgtcacaaagcacttttttgaacaccgatcaattatactttcctgaacatctgcttcacatctccaactttagggtagctgtgggtggctggcacagactaaaaggaagttgacaaacactgatggtttgggaaccttattttttaaagtttttctcctttttaaacttgtattctttatgagaacttgttctctcatgctcactccaatgtttgcagttttctaagtccccttcttcttggctcattacccagtcctccacttttactctccatcctatttaatattatttaactatagttcaatagtatttttgtatcactcattcagactagctaaaataaagctatgtatcttagttaaaagccaaaatttgatgatctgggaaaaaaaagcctgtagtgacacacattggagatgctttgtaattagtatattaaggagacaatacatttcaagaattgcttaaattctgatacccagatttaagcatgtgaacatatgagacttttaaacatacaattaaagctattcatcataatttgctatactaccaacataactttggagcgaaagtcaaatggtttaaagtaatcctgtaacatacctaaa

SEQ ID NO: 41682 - DNA, 2300 bp, Homo sapien
actttatatgtttctttatagtttgcttttattttttaaaccaggaagcagtctcactttataattagaaaaaaataagaaaagtaatctgtttgaacaataatggataataaaagaagcatcacaaataaatagattagtcagtaaactgtttcaggaaaggtagctgatcatttggaaaaaatattagtttagtttcccacatcatacaaaaataggtaaattcagatttattaaagatgtaaaatatgaaactagagaaattttgcctagaaaaaaatcagtaaggaaaagatctagagtagtatgtgggtattttttataatactaatttgaattgtataaaattatttatccccggcaatatcactgggaactagttacttactaggaacgtgtatgcacggcacttctgtttactttgggggtttagagtaggtacaatccattgcccctggtttttgtgagtttgtagagaactggggtcttggctttgtgttattttgataactgctaaccattgtttctttaggatcttaagtaccaggcccaagataactttatgatgatggatgatgctgtcctctgcatgtgtttcagcagagatacagaaatgttagcaactggggcccaagatggaaaaatcaaggtatggattagtgccacagcctctcatatgtagacattttgaatgttctgctatggggtagtgtcctacatatgatattcagcataataatagctactgattattgagcatcagctttatgctaatcactttactttttcttatgtaatcttagcaactctgtctgggtgatccaataacatatttaaggtcacatacttggtaagtgatagatctgggactttagttcatatctgcttatgccctttctattgtaccaccctggcttgctgtataaaaatcaaaataactaactttttttttaaggggatggtctaatagccaatttgttgtggtttgtatttaatgctagaaatacatcctgggctacagaaattgcagaaatggtctctgctaagtgaacttagagtctatatttttgttttaataatttacaaggaaagagttttaagtttcaaaggattcagttaccattgtactatgtgaactagacatcatattcagctattagcgtgcatttttaatgctgtttcagtacattagtgagcattgcatcttgcttggctctgtgggctattaatagtaggacacttaacaaggtttttttaattcttttttttttttcaaataaaggtgtggaagattcagagtggacaatgtttaaggagatttgagagggcacacagtaagggtgtcacctgtctaagcttttctaaggatagcagtcagatccttagtgcttcttttgaccagacaattaggtaagtaaaaatcccaaaactgctctcacttgagtttgatataatgaggccatggagggaggtactagtgattccttacgcttttaccatgatgcttttaccatgatgatgtgatatggagagggaaggtatgtgagaccttatgtccccaaagtacaactgacacttgttgttgtgtcatttgagtttttacccagaagagacatttgaaagggggtagcagtgcttcatgtttctcagagtatggtcttatggacctacctgcatcataatcactttagagggtctgttatactctaaaggacccagctgagacccactgatctcaatctcctgctaacttgttttttagaggtctgtccctgaacagaagcttgtggtattactggcatattttcttccagcctctttctttgcaaagcttttgtttgattgtttgatatagtgaaaattacaccgtatacacaatcacatagccctcttcacttaatattataacatgagcttctgtaatttatctaaaatgcattcaatcgttggtcacaaccataagatattaaatatttattgttcttttcatttactttcatttggtagaattcatggtttaaaatctgggaaaaccctgaaggaatttcgtggccattcctcctttgttaacgaagcaacatttacacaagatggacattacattattagtgcatcctctgatggcactgtaaaggttaagtatttgctatcagtttattttgggatgtctaccccatctttgtcctttgaggagttttcagtggtgataatgggaatgattgtgctgtagtaaacctctttcctggctattttagctgtaattgaggtgagtctgagacaacaacagtattctgtgggta

SEQ ID NO: 41683 - DNA, 2300 bp, Homo sapien
cagaatcagataagactgaaagccatcaggaaatctacaaatacatcatttcaatatgtaatttcggaacacagatttattttatttatttatttatttattattttttggtcactcggtcacccagggtggagtgcagtggttcgatctctcctcactgcaacctctgcctcccgggttcaagggattctcctgcctcagtctcccgagtagctgggattacagatgcacacctatctgcctggcaaattttcttatttttagtagagacggggtttcaccatgttggccaggctggtctccaactcctgaactcaggtgatccacccgcctcagcctcccaaagtgctgagattacaggcgtgagccaccacgcctggccagatttattattactgtgctgcaaataatttttacaatttatatacaacagcaataaaatatttaaaaataggttttatgtatgaagttcactgatatctctacatttcatttgtcactacaaatgtaataatgtgtttgacctaaagtcccgtgacagggcgtggtggctcatgccagtaatcccagcactttgggtggctgaggtgggaggattgcttgagctggaggggtcgaggctgcagtgtgccacgatcgagacactgcactccagcatgggcaacaaagcgagtccttgattcaaaaaaacgcaaaaccaaccaaccaaccaaaatcctcaattaactcttcctataaattttggctagtgttatgttggttttgaatgtattaatatcccatcaggtattgcatattcagcctcatcttaaatctaatcaactaattacatcaaacgaaagcaacattggctgggcgcagtgactcacgcctgtaatcccagcactttgggagaccgaggcgggcggatcacgaggtcaggagttcgagaacagcctgaccaacatagtgaaatcccatctctactaaaaatacaaaaaattagcctggcgtgatggcaagaaacctgtaatcccagctactccggaggctgaggcaagagaatctcctgaacccgggaggcagagtttgcagtgagccgagatcgcgccattgtgctcttcagcccgggcgacagtgcgagattccgtctcaaaaaaaaagcaatctttccaaaccagtgctctttcttttctttcttttcttttctttcttttcttctttcttttctttgcttttcttactacaatcttatcaccactacttttcttttcttcttttgagacggaattttgctctccttgcccaggctggagtgcaatggtgtgatctcggctcaccgcatccacctccagaggtgaaacgattctcctgccacagactcccgagtagctgagattacaggcgcccccgccaccacgcccggctaattttttgtatttttagtagagacggggcttcaccatgttgcccaggctggtctcgaactcgcgcgctgggagtacaggcgcgagccaccgcgctccgccccagcgcttttctttttcagtacatttgtgagctgtatggcgcccggtgctttttttctttttcttttctatctttcttttttttttttttttttttttgagacggagttgcgctcttgttttccatgctggggtgcaatggcgcgatctcggctcaccgcaacctccgcctcctgggttcaagcgattctcctgcctcaggctcccgagtagggattacaggcatgcgccactacgcccggctaattttgtatttttagtagagacgggggtttctccatgttggtcaggctggtctcgaactcacgacctcaggtgatcgcccgcctcggccttccaaagtgttgggattacaagcgtgagccaccgcacccggctccggcctgcttttaaacagtcttcctcctgatgcgtatttctctggggcaggggcataaactccgccctctgacagcccctgagggctccgcccctacgcgaacctcgcccctactcttcgttcactctatctccagagcgggagccagacgccgacccaagcggaagtgacgttaggtgtccgccggaggtgtcgttggtgtgttgcgcgactggccttgagggagagctggggcctgctcccggagagatacggctatgtcgatcgaaatcgaatcttcggagtgagtcctgcggtggggatgttcgcgccttgccgggggcctggaggttaagggtgtggggcggagggtactcgggagaaggcatccgagaggccagggagtggagggccatttccttgcccccaaagaa

SEQ ID NO: 41684 - DNA, 2300 bp, Homo sapien
tctgtcataaggtgacatttaagagacctgaattgaatgaaatattggggacaagtgtttcaggctaaatgaacagcaagtacaaaggccctgaggcaggaagaaatatggcaagttcaaggaatagctatcaggctagtgtggctaaggcaggtccagcatggtagagtgacagatgtgggtggggagggaaataggaaccagattgaacagggtttctgtggatttggttctgaacaaaatggcatgatctgatttatgcttacaaagatttcctggatgctctgtggaaaacagactagggaggaggaatggaggaggtggaagcagggtgaccaattagtagctgccatataacccagggcaagatgatggtggcttgatcgaggatggttacatcagagttggctggtggtgaattttgatgttttgaaggtagcactgacaaagctggctgagggcttgcaaatggcattgagagcaagagaagcacatcaaggacaccttttagattctggggaactgaataaacaatagtatcactctctgagggaggtaagaacgggagtggtgtgtaaggagtaggttgctgagggcaagatgtattgtgtttgagatgccagtaaaataagcagttgaatctggaggtcagggaagagatctgggctggagacaaatcagtgatcagcatttggatattataaatcattccgaggcagtaagtgtagacacaaaagaacatcatggactatggctggggccttcagcaactggggaagaagtccagagaggagacagaaatggccagtgaagtgaggaagatcagaaggacctggtgtccaggaagtcaagtgaggaaagttgattctgtatgatcacaaccaaagtgtcaactcataagccttattttctcatctgtgaaatggacaccgtaacaccacctacttcatggcagatagtactggcacacagcaaactctcaaaataaggtagctactgttattccctgatggttggctgccagagccctcaacttccctatccacattactgacagcacctccatgagtctttctctggggtgaggtgtctctgctcactcagggcctgaggcctctgggtcaaatcgaggtcaagtggcttcagtgcctaagtctctcacccacacagccttcagcccttacttgcaaatcaacaaagggtaaacctgtagaaaacatgggtttcggagccagaattctgcctcttgccagctgtgggctcttaggaaagtttcttaatctgccggggccccactctacgacatggggagaactgctacttcatgggacagtgggtagcccagtgtagactgtaacgccggctgatctcctgcacgctggcctgggagttagaggcttcttgctgctctcctcttcaaagtatacaggactcccgccacacacacatctggaaccaagctggtctgagagccccttatagcccaggctacctgatggggaggcacagaagtggcaacccgtccactttctttgccgcaggaccccccgttaagcagcggggtccagccgggctgagttagggagggggtttcgaacgtgccactcctcgcccggcgtcgaagcccgtttcctgggtaacctttttctgcctctcttcctagcccaccaaggcccactggccagaacgccgccgcggccccaaaccactccagataaccacccgccagctgtcctctccgttctctccgccgccgcgctgcaggcccaggctcgcacccgagtcccttcgcaccccaggaagtggcgcggcctgtcgagggcagcgtggaggaggaagaggaggcgcggctcaacgcgaccgaagctccgccgcaaaggctcgggaggaagagggcggtgcgcggccaagcgtcggagctgcagtcatactccggggaccccacgacggcgccccgcccgctgcccaccctcccgaggccccgcccagcgcgcccatcccgccacgggctgccccgccttcccgccctcgtccagaaaaccccgcgcccggccccgcccccgccttcgccggggccccgcccctcccctctccgccggcgcctcgggcggcttctcgccgctcccaggtctggctggctggaggagtctcagctctcagccgctcgcccgcccccgctccgggccctcccctagtcgccgctgtggggcagcgcctggcgggcggcccgcgggcgggtcgcctcccctcctgtagcccacacccttcttaaagcggcggcgggaagatgaggcttcggg

SEQ ID NO: 41685 - DNA, 2300 bp, Homo sapien
acaaccttggctcactgcaccctccacctcccaggttcaagcaattctcctgcctcagcctcctgagtagctgggattacaggtatgcgccaccacgcctggctaattttttgtatttttggtagagatgggtgtcaccatgttgaccagggctggtctcgaactcctgacctcaagtgaatgcacccgcctcagcctcctcccaaagtgctgggattacaggtgtgagccatggtgcctggccccaagatgacctttaaagtccaattccccttttataagatggcgtttttgctttaggacaggaagtcatcattaaatattttctctacctgcctaagcaatggaaagatagctgccacctgcctcagaggcatccctgggactgtgcagtttcctaaggaggaacggaaggatcttgaagctgagtcaaggatcactgggggcctcaagctagtcttggccacaggtctggggcttctatgggtctgtagaggtgactggatggctggtgtccccaaagggactgttctttttttaattaaaaaaaaaatttttttttagagttggggtcttgctatattgcccaggctggtctctaatttctgggctcaagcaatcctcctgcctcagcctcccaagtgttaggattacaggcatgagccaccgcacctggctggggctgtcctcaaacaagaatccttcgccttgtcattggaatattcttgcaacttatctgcaggcttgaaatctttcgaaataaagtttttctttaaaaaaaaaaaacacagattctgatttaaatatttcagagcgaagctcagcatctgtatttgtaaattctcccccagggaaatccaatctgcagacagagctgaaaaacactgatctaaatgaattagagaaacgtgtatgtaaataaaatgtattttatatatcagaaattctttgagagcaaatatccaaatgacttattaatgtatactatgtaagtatgggggagttttagaaactgatttttctttaaaagaatcttgtctttatttaacctatgaagatacagatgaggccgcgtgcagtgactcatgcctataatcccagcactttgggaggccgaggcaggcagatcacgaggtcaggagttcgagatcagcctggccaacatagtgaaaccccgtctctactaaaaatacaaaaagttagctgggcaggtggcaggtgcctgtaatcctagctactcaggaggctgaggcaggagaatcgcttgaacccaggaggcaggggttgcagccagccgagatcgcgccaggcacaccagcccgggcaacagtgtgagactctgtctcaaaaaaaaaaaaagcaaatgaacacataatacctgcaaagcaagaaggcatcttccttttaatgttttattttgcctttgttttgcctgttagttgtgcccactttgcggtacaaaaaaataagtgaaataaaagtaagtaaaaatgatcatttctgcttacgtttacagctcatttcatattctgcaaaatgttttcccgtctgctatcaccgccgccatcctcacagcagcctgggagaaaggcagagccaaaagtctcatctccacttcgtgcatgggtgatctgaggcccagttaagaaaagtggctctaccgaggtcccagagttggttgctggaggcactggcaaaggaatccaggctccagcccccttctctgcctcctgccatcttccagttgcttttttcctttctctctttctctatctctttccccttctctctgccttgaactctctctctttctacttcaactttcctctccttgctccaaccctcagattggagtcagctttgcaagttgtccaaactttttgtcactctggaaacctgccagccccatggccacagccccatctcatcaaaagctcagcatctgcacctagagcaagccctttccggatgtcagcgtgcaaagattaactctggtctctccatctggccctagataagataagattaggagagcggcactataaataggcccccatccttcctcaggcgcaggccccagccagctcaggctacactatcccaggatcagcatggccgtccgccagtgggtaatcgccctggccttggctgccctccttgttgtggacaggggtgagtgggcagaacctggattctctgtggctttgtgttggtaggtgagcttggggtgagagcagaagcagggcctggagcaccctgtgaggcctcagctttttccatgtaccttcattctgcatatg

SEQ ID NO: 41686 - DNA, 2300 bp, Homo sapien
gggattacaggtgcataccaccatgcccggctaatttttgtatttttagtagagacagggtttcaccatgttggccaggctggtctcgaactcctgatctcaggtgatccacccgcctcggcctcccaaagtgctgggattacaggtgtgagccactgcacctggccaagggtaagcatttcttttccggcttttccttatggccaaaggacagttttaaaactgctgaacttttcctaatagtcactctgttttcaaactgggacaatttttatttatttgtttattcattcagttcttcaacagatatttattgaggacctgctaggtattggacactctcaaacacctggacaggtgtcagatttgaagtcttatgatgatggcagaaatctcaccattttcgatgaagctcatgggcagtcttccctcgctaggttagatcatcttcccattatatgttaccatggtactccctgctatttttgcatcacttctatgaaattactattaaataatcattttcttagttgcttaacatctgatttctctgttaaaataacagcctccgtgagggtggagatactgctgtgtttccagtgcctcccattgttctgactcaaaggaggttttgagcaaacttacctgaggcctggatgtggcgggctcagtggatgcatgatgctcatttctgccaggacccacaccctcctggcccctgccctctgtcttcccacccccctgagaatctatcattctggtatccactggggaaagacttaccccattgggtgtcagtcattataaagaatttagtaataggaggcatttttatttatatttcatagtgtaacatattgtctttaatttttaaaaatattttatttctgaattataaagacaatagaaattcatgtttcaaaatagaggaatgcatgaaaaagaaaatgttcccctggataaaacccctcataataacactgtgtcatcagcattcattgtggtattggggtttcctgcaaaaaatgagctttaatggctactgtagaccttaatgcctactgaagactttaaagtcttctgtagtgtggttcgttggtccctgattcctgaatatttggctctttccagtttctcactattatgaaaaggttgcactgaatattatcgtatagtagttactgtggagtcgcatgtccaattatttgtttaggataaatatctggaaatgaaattactgggtcatgacaccctctaaaaagataccagttctcattagtgaacacacttgtctatttcctgtatcctgctgaaatttattttcagtgttgtacaattattacaacttggcctacctttctcctctttttaggaaaatctctgaaggaaatggaaacaccgttgtcagcacttggaatacaagatggttgccgggtcatgttaattgggaaaaaggtaaattgctttttccatcagaaatcctcagaatcaaatgactgaagtcttttatacatgtttctgtttagaagaccaaactggggacccagattctgcattgataaaacacctctctaaacaaatacaatctttattggttttacaggattaccagttttgttgttctcataccctcctgctcctgttggttagaacttttgctctaggaattaggagcggttgtgctgccttaataatatgttttttgttttggtggtggaatcttggtctggttaaaatggtgcctgggacaggtctcattcacttggagtagaatttgcaagagtcttttgttaaaataaacttgtagatattaagaataatcactctgttccagttcaggagcctctctccctttaaccaaccttttaactaaaatctcccacaagggaaaaccttcgactggaaaggaaggttcagactaaagaactgaggggaaaaaaagacagatgaggtcagcaacccttaaggtgatgagagagggctgtggccagccctgcattgtgacacagcagaattatgagcatatgaagttcccttattgtgagttaggtggctgagtagagagagggcagataaacaaagtgaaggcaaaaaaaatctaatccagacttggaactgccaggagactggaactcaggacttgccacaaagagaagtgaataatttgggatagcataactaagcagaaagctgctagacctatctatcaattgtttacctgagagaagagggaaatattctaaatttcttgcttcagggtcagggagaatggtgatgggcaacaggcagaaccaaagagt

SEQ ID NO: 41687 - DNA, 2300 bp, Homo sapien
gtaccatggtaacatataatgggaagatgatctaacctagcgagggaagactgcccatgagcttcatcgaaaatggtgagatttctgccatcatcataagacttcaaatctgacacctgtccaggtgtttgagagtgtccaatacctagcaggtcctcaataaatatctgttgaagaactgaatgaataaacaaataaataaaaattgtcccagtttgaaaacagagtgactattaggaaaagttcagcagttttaaaactgtcctttggccataaggaaaagccggaaaagaaatgcttacccttggccaggtgcagtggctcacacctgtaatcccagcactttgggaggccgaggcgggtggatcacctgagatcaggagttcgagaccagcctggccaacatggtgaaaccctgtctctactaaaaatacaaaaattagccgggcatggtggtatgcacctgtaatcccagctacttgagaggctgaggcaggagaatcacttgaatccgggaggcggaggttgcagtgagcctagatcgtgccattgcactccagcctgggcgacaagagtgaaacttcgtctcaaaaaaaaaaaaagaaaaagaaagaaagaaaaagaaatgcttacccttaaatatgagtttctgaaaagactgtggaacccctatgacctcttcaacaacctgggccaggtcttggacaactggttcactgctgccctgctgggaggtaacatgaaggtcgtgcttctcattgcctggggagaaagaaaagcatttgacgaatatgattctttcacatacaccaatataggatgacactttatcacatttatttacccagccttcaaggcccagctcatatgccacctactccacagagcctgcccccatgccacccagctttcctctggtgacctcctcaagtatctctgtttcctctattataataactaacaatatgaatgatatctgctaacattttaagcatttcatgcataatctaatttaatcctcagataaaccccacgaagtagatctacctattacttcttatttcacagatgagcaaactgtgacttcaggcaagttaaggactgcctatggagactcaactgttggaatcagaagttgatatcagatctagctgattcccaagcccacctttttcatcacaagccatctgcttcctgtggcttgactgccctgtaccctgtattgtattggtctcgtctcgcttgctgtaatgggcaagtgactgttttcctccaagtctctcccactgaacacacttgagtgcatccatgatttgtgctaagtaaacagacaaatgcatacgaacagcagagcctttctttctgaagaagagacgccaattcttttccagggatgcggacagcaaggagggagcctgtgtacagtacattacaccaaggtttggttcccccaacagctccgtgaggtcagcaggagccagggttaccaaatctacttcacagaggagaaaccggattcttagaagaagccgtccatcccaaggtcactcaaaaccgcaggatctagaatccaggtctccagattcccagacccttgggcctcccctagctggttctagagaaacctcatggactcagctctccggtgtactgacttcatttggtggtgtgtcaactccaacagtaggcagacccaaagggtgcccagagtacaacgcttggacccacggccaactcaagcggcgcacacggagaaggcactcagcacacgaggagcaccccggcatgcacgaagttctgacttatcacacacggagcagtcgtagaccacatggcccaatatatgcctgacacaaagggcacaataactgcgcgggcacacaaacacaaccaggcccacgacgtaaagcacggagaagctcaaacacccaggatcgcacaaatgaccagagacaaaatacaccggccacatggaaaagtgtacagacacaagcccgggacaaaagacagttccacggacacaaccaataacccacgcttccggacgccaggacaagcgcaaggtcacacgcttctggaggacacgtgactaaacccacagaccccgccgggctttcgggacctgcatggagcccacctggcgcccgacactcactgtgggtgacagtcacggtgagcccagctgccgccatttcctccctggtcacctcctcgctccgggtcgactcctcgtcccgggtcacctcctggctccgattcatctcttcgccctgggtcgcctcctcactctgggtcgcctc

SEQ ID NO: 41688 - DNA, 2300 bp, Homo sapien
catttatttacccagccttcaaggcccagctcatatgccacctactccacagagcctgcccccatgccacccagctttcctctggtgacctcctcaagtatctctgtttcctctattataataactaacaatatgaatgatatctgctaacattttaagcatttcatgcataatctaatttaatcctcagataaaccccacgaagtagatctacctattacttcttatttcacagatgagcaaactgtgacttcaggcaagttaaggactgcctatggagactcaactgttggaatcagaagttgatatcagatctagctgattcccaagcccacctttttcatcacaagccatctgcttcctgtggcttgactgccctgtaccctgtattgtattggtctcgtctcgcttgctgtaatgggcaagtgactgttttcctccaagtctctcccactgaacacacttgagtgcatccatgatttgtgctaagtaaacagacaaatgcatacgaacagcagagcctttctttctgaagaagagacgccaattcttttccagggatgcggacagcaaggagggagcctgtgtacagtacattacaccaaggtttggttcccccaacagctccgtgaggtcagcaggagccagggttaccaaatctacttcacagaggagaaaccggattcttagaagaagccgtccatcccaaggtcactcaaaaccgcaggatctagaatccaggtctccagattcccagacccttgggcctcccctagctggttctagagaaacctcatggactcagctctccggtgtactgacttcatttggtggtgtgtcaactccaacagtaggcagacccaaagggtgcccagagtacaacgcttggacccacggccaactcaagcggcgcacacggagaaggcactcagcacacgaggagcaccccggcatgcacgaagttctgacttatcacacacggagcagtcgtagaccacatggcccaatatatgcctgacacaaagggcacaataactgcgcgggcacacaaacacaaccaggcccacgacgtaaagcacggagaagctcaaacacccaggatcgcacaaatgaccagagacaaaatacaccggccacatggaaaagtgtacagacacaagcccgggacaaaagacagttccacggacacaaccaataacccacgcttccggacgccaggacaagcgcaaggtcacacgcttctggaggacacgtgactaaacccacagaccccgccgggctttcgggacctgcatggagcccacctggcgcccgacactcactgtgggtgacagtcacggtgagcccagctgccgccatttcctccctggtcacctcctcgctccgggtcgactcctcgtcccgggtcacctcctggctccgattcatctcttcgccctgggtcgcctcctcactctgggtcgcctcttcactccaggtcgcttcctcactcagggtcaactcctcgctccgggtcaactcctcgctccgggtcgagcggcgccgggttttcttcttcatccgcggcctgcgagcgccggcggcggcgcccctggtgggtcggtcatgcccgctggcagtactccgggcaggtggacgcccagagggaggcggaccacgctgggccgggggctccgactggcgcggctcccggcctggccgaagggcgcgcagccgggaacccagccgctcccggtcgcctcgcggtctccgcgcccccccgcgctgagccaggcccgcacttgttgaccgcccagcgatggaagctgagcgcggcgtctcacaaccccgcccgactacttcccagccccgccccggcctgccggccccgccctcgccctatgccgcgttagttgcctccaggccccacccactcaactgaggccccgccttgctacagtaaaacccctcccactccttctaccaacaccccgccccctgcaggctctctccgagagcaccaagtccttttgctctccatccccggaagacccggctgaaaatccggaaaaagaatcgggaaacgccaggaggcatattgcgcttgcgcacggaggggccggaagtcgaggcgggagtgactctgcttccgtttctggttttgctctagtgtttgggtttcttcgcggctgctcaagatgaaccgactcttcgggaaagcgaaacccaaggctccgccgcccagcctgactgactgcattggcacggtgggcatttgatcatgcataagtaggctcaggacctctgacacacccgacccc

SEQ ID NO: 41689 - DNA, 2300 bp, Homo sapien
aaggtcacaactagaaggcagtgacagtgtattagaacactggtcccagatgcctagttcagtttttcccagcaggccactccttaagcagtctaatataccaacctaacctgaccagcttagcaagtcattgatcttgagcacagcctagtcttcctctccagattaccaccttctcagtataatatgctaattctcatgtacatgcttttagacgtgtgaccagcatctctttccaccagatcaatccccagcctcccttccatatttgattgcaaactctcctccctaaaggatacaccctcacatgttttctccttaccagactgtaagcatctcttctgtagggatgctcacagcccctgcactaggtcctatttcacttattttttgagacggagtctcacactgtcacttgggctagagtgctatggtgtggtctctgctcactgcaacctccgcctcccaggttcaagcgattctcctgcctcagcctcctgagtagctgggattacaggcgcctgccaccatgcccagctaagtttttgtattttcagtagagacagggtttcgctatgttggccaggctagtctcaaatgcctgacctcgtgatccacccgcctcagcctcccaaagtgctgggattacatgcatgagccactgcgcccagccgaactaggccctatttctataggtgctaaaactaggctctgccagcaccttgtgcagcagttgctgcccaccttacctttgcaggaccctctctcatcttcttgatctgatccttatacttcactagctcagcatccaatcgagaaatcttcttgtcaatggattctgctctactgtccaccttaggggaaaatatcaaatgcactggtagttactgcaatacacttattccagaaggggcaggtagagaggaaggaatacagaggaagaaaagaggagcttaaggggaagggtgaaaaacagtggttcacaaagaagggtattcccaaccagaaaccctgggctttataaattattctcttaccccccgccacactgccccgattctgatataccaggtagccttcaagtgggttggggcagaaaataatttgagaatcactgagttgagttggaatttccctagaatcagagactagccaggctgagagttcctccaagaggcacatgaaatgggccagtgccaagtgaaaccagctgattgtagatctaatgccattccctaaatcggggatggtggcttaatctgaggggctagggttctgagttttgtgttactgagatccaggacgaaggcacagatatgttgacctaggatatcaagctgagtcctgatgtggactggggatgacagatggaagaagggtaagggatcaggcaggatgaggtgggaagggtgtatgggcctagggctgggtgaggtgagaggatcaaggcgagagcgagtggacgggcaatgggcatcaaaacgggttgggtgctggcagggcaaggcagtgatggggttaggggttccctggtttgtggcgttaggaatgacttgggtaacagggatgaaggggagaaggtgagatagagagggacgacgtgtaaggggcccaggacccgaaatgaagtggaagaatatgggcccggggctgggggtgggcggggtcgggtgtgtcagaggtcctgagcctacttatgcatgatcaaatgcccaccgtgccaatgcagtcagtcaggctgggcggcggagccttgggtttcgctttcccgaagagtcggttcatcttgagcagccgcgaagaaacccaaacactagagcaaaaccagaaacggaagcagagtcactcccgcctcgacttccggcccctccgtgcgcaagcgcaatatgcctcctggcgtttcccgattctttttccggattttcagccgggtcttccggggatggagagcaaaaggacttggtgctctcggagagagcctgcagggggcggggtgttggtagaaggagtgggaggggttttactgtagcaaggcggggcctcagttgagtgggtggggcctggaggcaactaacgcggcatagggcgagggcggggccggcaggccggggcggggctgggaagtagtcgggcggggttgtgagacgccgcgctcagcttccatcgctgggcggtcaacaagtgcgggcctggctcagcgcgggggggcgcggagaccgcgaggcgaccgggagcggctgggttcccggctgcgcgcccttcggccaggccgggagccgcgccagtcggagcccccggcc

SEQ ID NO: 41690 - DNA, 2300 bp, Homo sapien
agtcccagctgctgcctaggctcctgtgggtccgaccgggttccccctcccctgtccaccttccccaacagggctatagtttcagggtgtcccaggccttggctggttggctgggcccagctcctgggggctgggcagggcagggcagggcagggccgggtccacttccattgttagcagttgtttgcagaattttctctgttaccattcctctctttttgttctcgcccagagtgggtggttttttgttgttgttttagattttcatgtgaaggcagagagttttttttcttttttaactccccatccccctatgcggggtgtcatttcaccatccacatccttgtttgcgtttctggccctcgtcctccctgcctctcctctgcctccccaacccccgcctacctactgctcccaggggtctctccaggggcagggggatttcaggagatggggtgggggccagcccctactggacccttgtaatctgatttgaagaccatccccctgatgggaccagcagccccgctggcccactgggggtccctcttaacatctgcttgttgtgggggtcagtgccacggtctgctggggtcttggcactgtcttcctggccggggcctggcaccttagcccccagccggcccgagtgggggatatcgacacccccagctaaagcacaagcaccttagtcatccctcctctccccctgcctcctggcctgccaccccaccccagcgtttaccccaaagcacaatgccctggtcacttggcaagtggctgggcctgacggaggccaaggggcagaccggggctccagccagacccccgaaaggaagcaggtgctcccccacttccaggacttagttggggcggggggcccagctcctgggcctagggtcttctcacccccacccccttgtcctgggtaggcccctgcctgcccctctctgccttttcctcgggtgtccctcctcgagcccctgcggcactggcttgggtggcagagcccacttgtttcagggaccccaggaggtggtgccccctggctcctgggactgtgtgtgggtctggggggtgggggggtggggagaagcgtcgggcagggggtgcaggggaggaaactcctcaccaggaaagccaaagacagggttgtgccttacctcaggagccacccgttcccccttgccctgccgttcaccctccacctttccccccgggcggcctgctgctttttccttctcttcctcccctgccctgccctgagctgcatggttcccctaccctgggaagccaggaaggaatctgaatggagaatcaccaaccaccaaagaaaaaaagactgcggggccctcccctgccaactccccttccctggccgcccactcacccacacctctttcacgcaggacaggctgcccaccctgtccacgtgaagtgccaacgccctccccaccctgggccgagcccccacccctccctgggcccccaagtgagattgcacatttaactactgtaaggagaggagcggcgttggcaaatgtgaaccatgagaatatcggtgatactgatgagaataaacgcctttgtaaaaaaaaaaaaaaaaaaaaaagtctggagccaggcgtggtggctcgcctgtaagccaagcactttaggaggccaaagcggcaggatcgcttgaggccaggagttggagagactagcctgggcaacatggcgaaacccgtctctactaaaaatagctgcgcatggtggctccgcctgtagttccagctaccggaaggctgaggcgggaggattagagactgaagctatagtgagccatgatcagaccactgcactcaagcctgggtaaggcagcaagaccctatatcaaaaaataaaaaaaggaaaaccacaatgattacgcaagtcgccgccctccctcctgcgattgttgctatttccatccagctactagtctcctcctcccgcccgacacctggcgcgtctatctgacgtcacgaacgcgccacacagattcgggctgcgcaacctctgtggccgtctacacggcgcgcagatgcgaatattctcgcggcgccggaagtccggggcacgtgacctggtgacagtgctgacttggctgtacagctcgatctaggttctgcggcacgggatggcggaggcgcctcctgtctcaggtattgtcccggcccgagcgggactgggcccctttcagggagcggaaattgggtcagtgacgaagttctagggcctcagccactcatatcgcgagagtagcacatgctagggcg

SEQ ID NO: 41691 - DNA, 2300 bp, Homo sapien
atgggtttttttcctgagggctttgcctgctgcctcatgtctagttgaacatatcctgtatatgagtacatgcagccttctctggattctctagttgcatcaactcattactgcttaacgagaaacactcttttcctatcctttactaggcttctctagacatctttactgatcttatttctgcccctctttccagtctcgctttttcaagcaagcgagaactacacaatacccactggtccaatttaaccattccaacctttaaattatcttatgtttccagaatacctctgccaccctctgcatttgtctaatccttttgtgattttgtgaggccctccatcccatcccctagaattctgcctatgtgaaagctttcaggacaaatcctgaattgggtgagaggttactctatgacctttatgatcattccatttttcactgtatgtttctatggtacccactgcccaagctctgttagtgtaagagcgcagtctctaatacacaaactgagttggaaccccgagtcttccttggaattcctctgtggccttgggcaagttcctactctctgtgcttcagttttctcatcaggaatgtaaggattaaatgagttaatacatgtaaagtgcttaggatagtgcctggcacataatacctaataaatgttaggccttattattaaacctgaaaccctcaggctctatactgcacccatcaatgctcaagcctgtgtgtttcagatcctctgtagtcctaacagcaatgatagagtaccattttaaccattttgtgtgtgttattaacttgctttactcttcactgcaactctttgatatagaggttgttactatcttcattacatgtaaggaaaatggggctaagtaactttcctgaagttaaaataagtgataagtgacttaaacccatgtcttccaggtcttaccaatttatagtatattctgtatgctacacatagttctgactttgctactaattttatgtccttaggcaaaccattttgtctttgtgcttcagggactgaattgactgtaccaagaagcatcttctgggggaacatgagtgggttgaaggggagtatgcttaattttttccactttgggattgtagaccagattatagaggttatgtatggaaaacccaaaatatattcctaggggaaagagatgaaaactaatacacttattaagtactatctatgaaatcatatttaaatttctcagtaaccgttgaaataagtattgtcatcctttaccatagacaaggaaactaaggctaaaagcaggcacgtgatatccctaagttcatacaataagttggacaggtggactttaacccattttggcttagtccaaagcctgtttacttgatattacacaatgctactttactgttttgaaagaagaccacatggaacctgatgattgatacccctgaactgttagctggccttaaatttttgtaataaaatgaatagatgtatacatagtactttatggcccaggtgagcatttttactcgacaacacttagctgtcattggctattggtgtttggtttttggacatggaataatgattgattagtcctccacaagcaccttgaacccatcaccttcactggaaacatagttcttacttaacagcatgttttatacaaagttctaaggaaagtaatttttagatttggcttggagtctatgagtttcatggatgaagtttaatctctttactggcatgtctattttttatgtcctaggtacttttaaattcaatacagatgctgctgaattcattcctcaggagaaaaaaaattctggtctaaattgtgggactcaaaggagactagactctaataggattggtagaagaaattacagttcaccacctccctgtcacctttccaggcaggtcccttatgatgaaatctctgctgttcatcagcatagttatcatccgtcaggaagcaaacctaagagtcagcagacgtctttccagtcctctccttgtaataaatcgcccaagagccatggccttcagaatcaaccttggcagaaattgaggaatgagaagcaccatatcagagtcaagaaagcacagagtcttgctgagcagacctcagatacagctggattagagagctcgaccagatcagagagtgggacagacctcagagagcatagtccttctgagagtgagaaggaagttgtgggtgcagatcccaggggagcaaaacccaaaaaagcaacacagtttgtatacagctatggtagaggaccaa

SEQ ID NO: 41692 - DNA, 2300 bp, Homo sapien
ggtctccttatgttgcccaggctggtcttgaacacctgtgttcaagtgatcctctcacctcagcctccccaagtgcaggaattacaggtgtgagccaccatgcctggcctaaagtagcttttgaaaaatgagtaagacttcgtcagcgaactgagtgacagaaattctaaagagagggagccacatgcaacaccatgcaaagacaaaaaagtgtagaatccagggaataaaatgtggtagatattgaggcagcagaagatgggactgttgagtaaggcagaagcagtaaacggaattaagcagaggagtgacacagtttaatgtgtgttttaggcagggcgcagtggctcacgcctgtaatctcagcactttgggaagccgaggcggatcacccgaggtcagaagtttgagactagcctggccaacatggtgaaaccccatttctactaaaaatacaaaaatcagccaagcatggtggcgggcgcctgtaatcccagctactcgggaggctgatgcaggagaatcatctgaacccaggaggagttgcagtgagctgggatcgcaccactgcactctagcctgggcaacagtgagactcctctcaaaaaaacaaataaataaaatatgtgttttataaagattgctctctgatgctggtttaagaggtgaactgaaagagagaaattaagagatgataagaccagttaggaactgctgcaactaagcagaccagatgaggcagattagatgatgcaggatgaaaccaaaagaggcagcagagatgttaccacccaccacttgttttcacaactcaaaaaaaatcttgtaaccagacatctacaccacccgtatttgcatttttgaaaacccttacaaaattcctcatttggaaaagaaaaagaattcttatttgtatttgcttgtgatatgcataaaactaagtggttacctattggggcagggagcagcgagtggtggtagaacttaggcagacagtgaataaagattgagactttttacagtgtaactttccatactttctgctttctaaattatgtgaatatatgacttatttaaaaatttaaattaaaaagacaacaaaatatttcctatctaggtaggtttacctgtgtgcgtttccacattctttagcacatggttctgtttgcctcgggagaaaggagatactacttgaggatcctgcctccgtacagtgcatttctcttggtcaaccctcctggaagacttgttgatgactgccaagttctcactgtcacaggtagattttgctggtctttcattgaggtcatcctttggaatggggcccatgttgtttctgtgtcctgcgtttgtatgtcggtggccctcctgttttggtggatttctgcctggtcgtggcctggccccctccacttcccagggaggccttttctgtgggtatcttctctgctcatttcgtctggctccatacccatccaatactccttttctagaggatgcctctgaagagtcagggtggaaaacccccacaggtttggtactttcgggtccagcatcctccggttttggagttgttcggttactccattcacatttgagtttccccttgacttttggtcctctaccatagctgtatacaaactgtgttgcttttttgggttttgctcccctgggatctgcacccacaacttccttctcactctcagaaggactatgctctctgaggtctgtcccactctctgatctggtcgagctctctaatccagctgtatctgaggtctgctcagcaagactctgtgctttcttgactctgatatggtgcttctcattcctcaatttctgccaaggttgattctgaaggccatggctcttgggcgatttattacaaggagaggactggaaagacgtctgctgactcttaggtttgcttcctgacggatgataactatgctgatgaacagcagagatttcatcataagggacctgcctggaaaggtgacagggaggtggtgaactgtaatttcttctaccaatcctattagagtctagtctcctttgagtcccacaatttagaccagaattttttttctcctgaggaatgaattcagcagcatctgtattgaatttaaaagtacctaggacataaaaaatagacatgccagtaaagagattaaacttcatccatgaaactcatagactccaagccaaatctaaaaattactttccttagaactttgtataaaacatgctgttaagtaagaactatgtttccagtgaaggtgatgggttcaaggtgcttg

SEQ ID NO: 41693 - DNA, 2300 bp, Homo sapien
gtcagaactccttggcctggctgacaaagcccttcatggtctatccctgcccacttccgcagccctctgcaagtcactcgcagttcccaggttttctcacaatcccatcaagcttcaaatgccccggtgccccatccccctgctcgttttggaaaactcagttcccacgtcacctctaacggaagacccttgtacccctccagcttgggatagccccgtctgtattccttccagcctatctggtgtgtcctaagtcacctgctgcttacctgtctctgccgtgagacagatgggactgtgtcttctccacctctcagtccccagggtcaagccctgtaaaagagcttagagcctgatctctgaccccagcatggatcccaattccctccctcaccaacctgacaccagcccattccaactctgcccaagtgctgacctcatccaagaccccagatccacttctaacatgacctcatcccggccctgggagcacacatgggaaaggaaaaaaggcaggactctcccatttccaagcgtgcacccctcccttcctgaggaagaaaggctgaatcttgagcccacgtagaatctgcagagggaggccgggcgcagtggctcacacctataatcccagcactttgggaggccgaggcgggtgcattacctgaggtcaggagttcgagaccagcctgaccaacatggtgacaccccgtctttactaaaaatccaaaaaaactagctgggcttggtggtgcatgcctgtaatcccagctacttgggaggctgaggcaggagaatcacttgaactgggaggcagagattgtggtgagacaagactgtgccactgcactccagcctgggcggagcgggactccgtctcaaaaaaaaaagaatctgcagagggaagttagtgccttacagagggcttctgactaggaagccccgggactgtggccgaccccttcctctccctgcctcacccctgcagaaagatctgcagaaaaagctggaaggggtgggagggtgtgtgcaggggtggggactggggctatgcaggttccagacctggtctttggcaccctctacaggacagttccattcccagacctgagctttggacaactgaatcttatgccccttcccacccatggagcctggtgccggaagttcccaggacttacccaccgtccaccacgccacatagcaagcgtcctcagtgtctgcagaccagaaacacctcccttgtgtctcagcactgggccacctgctgaaaccccaaactgcctgccccattgtttgagacccagtcaggccttggctccaaaagtcctctgggactgctgctggcccccagggtctctcctgactgcacctcggtcccggagctcccacaccgctgagccccgagcccgatgtcccgatccagctctgggtcctttacgggggccttgctggcctttcctaagggaggtgttttcccgaggacaggtggactgctcctcagactaggggccctcggagggccaggcctgggcttctacctcctctcgcaggctggtgtttctctgcaaatatggctcgtgtgtcctccttcctctcagactgggggcccctgaggactgggcctgagtttccctttcccccttcacaatgggggttccctgaggactgacccagggcctcccccgtcccctccacctggctgttaatctccaacacttccacctccagtcctattctgcacagctctccccagcgctgggggctcagaggcctcttcagccttccccagggctggggctcagggagggcttcctcaggcgctggccccagagtcaggctgcacattggcttggaggacaggcctttcctctgggactgagaggcccagagtgcccacccagagctccacctctgacctcacaaaggcctgcttcagaactcggtctccacggcactgctggccggacgagggatgttattttgggcagtgcatctggacttggttcaagtggcaccagccaaacccctgccttactgacctctcccctggaggagcaggagcagcgctcgaggccgccctgggagagctgagaggcaggctctggactggggacacagggatagctgagccccagctgggggtggaagctgagccagggacagtcacggaggaacaagatcaagatgcgctgtaactgagaagcccccaaggcggaggctgagaatcagagacatttcagcagagtgagtggggctccaggcagggtggggatggggcagcctcctcagcgcccaga

SEQ ID NO: 41694 - DNA, 2300 bp, Homo sapien
tagccctgctcgcttctcaatgaaccgtgggagcccttttttttttttttttttttgagatggagtttggctcttgttgcccaggctggagtgcaatggcatgatctcaggtcactgcaacttccgcctcctgggttcaagtgattctcctgcctcagcctcccgaacagctgagattacaggcacccgccatcacgcccggctaatttttggtatttttagtagagacagggtttcaccatgttggtcagtgtggtcttgaactcctgacctcaggtgatctgcccgcctcggcctcccaaagtgctgggattataggcgtgagccaccacgcccagccgggggcccttatttctcatattcgtccctcaagggacaagtcctcagggtcattagcccacctggattaagtccctctggaaaatgatttctttgatctcctctggcaatgctgccatagaagctcagcctaagggcatgttgtttgctcccaggccaccagatgtttccttgttattaaaagcagcatagagggcaaggttgcacttcgggaggccgaggtgggaggatcgtttaaagccaggagtttgagactaacctgggcaacatagcaagacctcatttttacaacagatttttaaaaattagctgagtgtcatggtggcacatagtccctatagtcccatccattctggaggctgaggtgggaggatcacttgggcccaggagttcgaggctacagtgagctgtgattgcaccacagcctgggtgatggagcaagaccctactctttaaaaagagagagagggcaaggttgtcccatgatccccctcagatagggctgactcccccataattaagtttgcttaaagaggcagacttgctgggctcagtggctcacgcctgtaatcccagcactttgggaggctgaggcgggtggataacttgtggtcaggagttcgaaatcagcctggtcaacatggtgaatccccatctccactaaaaaaacaaaaattagctgggcatggtggtgtgcacctgtaatcccagctaatcgggaggctgaagcaggagaatcacttgaacctgggaggtggaggttgcagggagccgagatcacgccattgcactccacctaggcgacagagagagactccgtctaaaaaaaaaaaagagacagactcttccttggctgggggtaagtcagatgggagaggagagggttaaaaacagctgggactcagcctgctggcaaacatgtggcatgtggcatgtcggggcaactgcagctcagcctctggagccatgtgagcaatgcacgcaggtacacgtgtgacaagctaggtcacctagccatgttcaacaggcatgtgcacagccacgaggaatgcccagccgtacaattaggcacacaggacatccgccatgtgtagacacagctgtggacatagctggccaggacatgcgacacacgacgtgctcatagcacagggagaagggcccatgaagtctggttggaactcagcacgtgtgtctgtgtgcccacctgagtctggactgctgcccctctgacactagctgtccccttgaagggtcggtgccttatctgtcctgacagaagagacagtgttgcttctcacttggggctcgcagcctcctcctcctgcctcgaactgaggatctgttgggtccagtcatcctggagagatgcggccagtttctttctgacaggtctcctcctgcccgcaaggaagtggggtgatcacagggcgcaggtggtctctatgacagctgcatcctctccagccatggccctgaaccctgcctataatcccaccattggctctcagatctgcctaagcctctcagcccccttgacgtcccctcccttaagcgccctccgaaggccacccgtccctcaaagctcctcacactccatgcccgcagctccctccacccggcgtccgcaccagcctcccagccgaggtggggcgggggcgagggggcgcgcactcctcggcgctccgggactgcagggcggggctgcagggcgggcggggcccgtgtctccagcgctcctataaagggagccaccagcgctggaggccgctgctcgctgcgccaccgcctcccgccacccctgcccgcccgacagcgccgccgcctgccccgccatgggtcgacagaaggagctggtgtcccgctgcggggagatgctccacatccgctaccggctgctccgacaggcgctggccgagtgcctggggaccctcatcctggtggtgagtggagggagccgg

SEQ ID NO: 41695 - DNA, 2300 bp, Homo sapien
agacctctgactcttcttcctcagtggtttgtcacctggagggcagtggccagtggccacaggacgctgaggccgtgcagcgggtccgagctgccttccagctgcgcctggcagagctgttgacacaacagcatggtctgcagtgccgtgccactgccacgcacacggatgtccttaaggttaggctggtgcaggcagatatgtccccagggaaggggggcaccagggatgtcagggcgtggaagaagacacccctgtgggtaccacgctgggtaatagggctgtaggccacagagtactcccggggttctgggctgacacatccttctctttccataccttcttccaacaggatggatttgtgtttcggattcgcgtggcctatcagcgggagccccagatcctgaaggaggtgcagagcccagaggggatgatctcgctgagggacacagctgcctccctccgccttgagagagacacaaggcagttgccactgctcaccagtgccctgcacgggtaaggccactgacacagcttcttcctgtctgtaggccccctcctgcccccattctcctcacctagccacctgtctctccaggggccagatggtatcatagttaggggtatgagttctggagtcaggcaggttctggaatcctggctctgccacttactgactgtgaccctatggtcagattttcctccttggtccctatatttgtcatctgtaaaatggaaataacactagggtcaacttcttggtgcatttcttaagagaatatgagattacatatgtaacctattatcactgaggctggccttgggtaggggctggatgaacagtggcagtggggccctgagtctcgctgacactccccttctctctgcagactgcagcagcagcacccagccttctctggtgtggcacggctggccaagcggtgggtgcgtgcccagcttcttggtgagggtttcgctgatgagagcctggatctggtggccgctgcccttttcctgcaccctgagcccttcacccctccgaggtgattccctccactttttccccagctgagaagtttccttgcggccagccatcatccttcgtgctgcaccctaagtctacatgggaatgggtggttgagcaagtggcagaaggggttctaagatgccctgccctgccaatccacaccagggggtctgagctccatagcctgagagaagcctggggatatgtggctgggccctggattctttgcttactccagccctttagttccccccaggttggcttccttcgattccttttcttggtatcaacgtttgattggaagaacaaccccctctttgtcaacctcaataatgagctcactggtaagtggtagaacaggggtcagactgctggaagaacagctctttatggattgcaggcaagggtttccctggcagtgttaggttttctctgtgcctccccagccccagatgtctaagcctgacatgaagaagaggtccaggtgaacagcctgaccattatgacatggtttgctcttaattgtcagagacagaatgatagggtggtaagcaagctacctggcggggggctgtggaaggaagaggagaatagaagggggatcctgaataccacgtaagaagtattagggcacggagctaggaagtgtagcacagatactcagacctcttggtgggggtgggagtggtgatttctggttgtaacgtgaggcactcggtctctgcagagagcagggtgtcaggttcctaattccccaggtgtgtggaagcccatggtgggagggggccaggggcaagactcagcttgtgcaggcccggaaaccagactgggggtgccaagcagtggaaaattttgcctctgggctgaggttgggcgattaatgccccacccagttgaggcaaatgcgatgtccctttcgtcacctttgccacttggtgggggggagtgttgaaaaatacctgtgatgagcagccgttgggggcaccgtaggaggacctgggggagtagagggtgtcttacagggaggagcaggctgacccaggacccattcttgtctctagtggaggagcaggtggagatccgcagtggcttcctggcagctcgggcacagctccccgtcatggtcattgttaccccccaagaccgcaaaaactctgtgtggacacaggatggaccctcagcccaggttcaaccccatacctgccccctaatgtgtggttttcttcccaaggaaaaagcaggcccagcctgacctgggagagacccacttcag

SEQ ID NO: 41696 - DNA, 2300 bp, Homo sapien
ccccagctctactaccacccttgcctcctcaggctgctaaattccgccagttctggggatcccgctcggagcttcggcgtttccaggacggagccattcgggaagctgtggtctgggaggcagcctctatgtcccagaagcgccttattccccaccaggtggtcacccacctcttggcactgtgagtgttggcatctggattccagaaggcagtgtgggctggggagccttttcaggggtctggcccaggcagttgagcgagaacatagccccaaattttctcactgtgtctctgcctctttttcagccatgctgacatcccagaaacctgtgtccactatgtggggggccccctggatgcacttatccaaggcctgaaagaggtaagggtcttggggtcaaggctagtgattgtagagtaatcaatctgcggggagagagtcctctcagccttggccagcttgcacttcctggcatgtccagcaggcggcggtgctggctctgctgcagcctgagctggggcagaatccaggtgaagctggccttctgtagggtccagcctcctgaccgtcttctccctctcagacctccagcacaggtgaggaggccctggtagcggcggtacgttgctacgacgacctcagtcgcctactgtgggggctagagggtctcccactgaccgtgtctgctgttcagggagctcacccagtgctgcgctacacagaggtgaggtgcaacggtgcaggtgacctttctgcttagtggccccacctctgctccagtcacccagtattccccacttccaactcctgactctgggcactccctcccagtcctaggcccattcctcagcccctcttcttccacaggtgttcccaccaactccagtccgtccagccttctccttctatgagactctgcgggagcggtcctcactgctgccccggctcgataagccctgtccggcctacgtggagcccatgaccggtaagagggcccttgggagggagtgggagggatagttccagctccaggccacagtatgagacctctgactcttcttcctcagtggtttgtcacctggagggcagtggccagtggccacaggacgctgaggccgtgcagcgggtccgagctgccttccagctgcgcctggcagagctgttgacacaacagcatggtctgcagtgccgtgccactgccacgcacacggatgtccttaaggttaggctggtgcaggcagatatgtccccagggaaggggggcaccagggatgtcagggcgtggaagaagacacccctgtgggtaccacgctgggtaatagggctgtaggccacagagtactcccggggttctgggctgacacatccttctctttccataccttcttccaacaggatggatttgtgtttcggattcgcgtggcctatcagcgggagccccagatcctgaaggaggtgcagagcccagaggggatgatctcgctgagggacacagctgcctccctccgccttgagagagacacaaggcagttgccactgctcaccagtgccctgcacgggtaaggccactgacacagcttcttcctgtctgtaggccccctcctgcccccattctcctcacctagccacctgtctctccaggggccagatggtatcatagttaggggtatgagttctggagtcaggcaggttctggaatcctggctctgccacttactgactgtgaccctatggtcagattttcctccttggtccctatatttgtcatctgtaaaatggaaataacactagggtcaacttcttggtgcatttcttaagagaatatgagattacatatgtaacctattatcactgaggctggccttgggtaggggctggatgaacagtggcagtggggccctgagtctcgctgacactccccttctctctgcagactgcagcagcagcacccagccttctctggtgtggcacggctggccaagcggtgggtgcgtgcccagcttcttggtgagggtttcgctgatgagagcctggatctggtggccgctgcccttttcctgcaccctgagcccttcacccctccgaggtgattccctccactttttccccagctgagaagtttccttgcggccagccatcatccttcgtgctgcaccctaagtctacatgggaatgggtggttgagcaagtggcagaaggggttctaagatgccctgccctgccaatccacaccagggggtctgagctccatagcctgagagaagcctggggatatgtggctgggccctggattctttg

SEQ ID NO: 41697 - DNA, 2300 bp, Homo sapien
tctgagttcagcccagggcctgaaggatggcgtggcacttctgaaggtctggctgcggcagcgggagctggacaaggtgagttgggggtggcgcagcctccctacctgagcgcctgtgtgatgggcaggctctgacctcagcctctccctgtctctttcagggccagggtgggtttactgggttccttgtctccatgctggttgtcttccttgtgtctacacgcaagatccataccaccatgagtggctaccaggtcctgagaagtgtcttgcagtttctgggtgaggcaactaggtggggaaaggccaggggctccactcctcctgggaatcctctcatcccagtagcagtcttttggtgttttgccatcagacagatgagcaaactgaatcggctgagggagggtgtcattagggctgggtccccagaaggggataccttctaatacacttgtgattcacttcagccactacagacctgacagtcaacgggatcagtttatgtctcagctcagatccctctttggtgagttggggaagggccaggtctatgccaggaggcctgcaagtaaggtgccaatcctgacctgcttctctctacaccccccaagccggccctggctgacttccaccaggccttctccgttgtcttcctggattcctcaggccatctcaacctctgtgctgatgtcactgcctctacttaccaccaggtaccaatgggcccccaatctgtgttcccctgatgtctcagcccagactctgtcccttttgcaagtaccagaaccccagaaactcctcttcaaagagttaagtttagggcatgtctcctggtctaagcccttggatcaatgaagggcacagggatggtcccttctgtggctccaggtacagcatgaggcacggctgtctatgatgttgctggacagcagagctgacgacgggttccacctgctgttgatgactcccaaacccatgatccgggcttttgaccatgtcctgcagtgagtttaggggtgacagggtatgttggcgggtcctgtctcttcggggctacagtggtggggcaaaggtcttcagacaggtgctcagatcattcagggaggaggtggtactaggggccagcaacctgattacccctctttggccctttgtacccctccagtctccgtccactgagtcgcctgcaggcagcgtgccaccggctgaagctctggccagagctgcaggacaatggtggggactatgtctcagctgctttgggccccctgaccaccctcctggagcagggcctgggggctcggctgaacctgctggctcactctcgacccccagtcccagaggtgaggtggtgtaggttggggagtttgggtctgagttgggctggatccagggtcccaagagacacaaaggacacaccattcctccagctaggcgtttctagctagctagaaagtaggtttctaggccaggctggaggattggaggactgagctcagccttttgaaatcctgcagtgggacatcagccaagatccaccaaagcacaaagactctgggaccctgaccctgggactccttctccggcctgagggactgaccagcgtccttgagctgggtccagaggcagaccagcctgaggtgggggaccccagcatgtacactggaaggaatggggtggctcgtcctcatggcacctggactgaagcttgttggggagggtccacagagcccttccttccccagctctactaccacccttgcctcctcaggctgctaaattccgccagttctggggatcccgctcggagcttcggcgtttccaggacggagccattcgggaagctgtggtctgggaggcagcctctatgtcccagaagcgccttattccccaccaggtggtcacccacctcttggcactgtgagtgttggcatctggattccagaaggcagtgtgggctggggagccttttcaggggtctggcccaggcagttgagcgagaacatagccccaaattttctcactgtgtctctgcctctttttcagccatgctgacatcccagaaacctgtgtccactatgtggggggccccctggatgcacttatccaaggcctgaaagaggtaagggtcttggggtcaaggctagtgattgtagagtaatcaatctgcggggagagagtcctctcagccttggccagcttgcacttcctggcatgtccagcaggcggcggtgctggctctgctgcagcctgagctggggcagaatccaggtgaagctggccttctgtagggtccagcc

SEQ ID NO: 41698 - DNA, 2300 bp, Homo sapien
ttgcaggcatcctgaaggcagcttagatccctcgggccagttgctgtccttttggagctttgctctccagatatgagaactgggcctagtgttgctaaccgtggctcaggcacttctgtcagcagaggagccctggctctctcaccttggtttcaccttggcccacagctccacaagcacttatgtgcctggccttctcttctcccctggcccctccaggaaatcctacaggacaaggacgggctgaaccagcgctacttccgcaagcgtgccctctacctggcccacttggctcaccacctggcccaggaccccctctttggcagtgtttgcttctcctacacaaatggctgccacctgaaaccctcactgttgctgcggccgcgtggtgagaggcacacattgggctgagggcatagcatgggatggtaaatctggaggagaaggcacagaggcacggaggcctcaagtatggggggacaggatggggagccctctggctccaagggctcctgcagagtctcagcactcactgtctctggcaggaaaggatgagcgcctggtcactgtacgtctgcatccgtgccctccacctgacttcttccgcccgtgccgcttgctgccaaccaagaacaatgtgcgctctgcctggtaccgagggcagagtcctgcaggggatggtgagcaggccctggtgttgaggtggagctggagggaagaggtgtggggacttttcctctcatggcttcccttttcatcccacaggtagcccagagcctcctaccccccgctataacacatgggtcctgcaagatacagttctcgagtcccatttgcagctgctgtcaaccattctgagttcagcccagggcctgaaggatggcgtggcacttctgaaggtctggctgcggcagcgggagctggacaaggtgagttgggggtggcgcagcctccctacctgagcgcctgtgtgatgggcaggctctgacctcagcctctccctgtctctttcagggccagggtgggtttactgggttccttgtctccatgctggttgtcttccttgtgtctacacgcaagatccataccaccatgagtggctaccaggtcctgagaagtgtcttgcagtttctgggtgaggcaactaggtggggaaaggccaggggctccactcctcctgggaatcctctcatcccagtagcagtcttttggtgttttgccatcagacagatgagcaaactgaatcggctgagggagggtgtcattagggctgggtccccagaaggggataccttctaatacacttgtgattcacttcagccactacagacctgacagtcaacgggatcagtttatgtctcagctcagatccctctttggtgagttggggaagggccaggtctatgccaggaggcctgcaagtaaggtgccaatcctgacctgcttctctctacaccccccaagccggccctggctgacttccaccaggccttctccgttgtcttcctggattcctcaggccatctcaacctctgtgctgatgtcactgcctctacttaccaccaggtaccaatgggcccccaatctgtgttcccctgatgtctcagcccagactctgtcccttttgcaagtaccagaaccccagaaactcctcttcaaagagttaagtttagggcatgtctcctggtctaagcccttggatcaatgaagggcacagggatggtcccttctgtggctccaggtacagcatgaggcacggctgtctatgatgttgctggacagcagagctgacgacgggttccacctgctgttgatgactcccaaacccatgatccgggcttttgaccatgtcctgcagtgagtttaggggtgacagggtatgttggcgggtcctgtctcttcggggctacagtggtggggcaaaggtcttcagacaggtgctcagatcattcagggaggaggtggtactaggggccagcaacctgattacccctctttggccctttgtacccctccagtctccgtccactgagtcgcctgcaggcagcgtgccaccggctgaagctctggccagagctgcaggacaatggtggggactatgtctcagctgctttgggccccctgaccaccctcctggagcagggcctgggggctcggctgaacctgctggctcactctcgacccccagtcccagaggtgaggtggtgtaggttggggagtttgggtctgagttgggctggatccagggtcccaagagacacaaaggacacaccattcctccagctaggcgtttctagcta

SEQ ID NO: 41699 - DNA, 2300 bp, Homo sapien
actgcatgctccgccttccgggttcacgccattcttctgcctcagcctccccagcagctgggactacaggcgcacgccgccatgcccggctaattatttttgtagagacggggtttcaccgtgttagccaggatggtctcgatcttctgacctcgtgatccgcccacctcggcctcccaaagtgctgggattacaggcgtgagccaccacgcccggctcgtaaaatgggtattcttaacagagctaagttaaggtgatttaagtggttttggcttgagcaactcatatggagttgtcttagcaaggaagacatagttatgggaagattgggagtttggtttcaaacatatcgatgtgttaaaatgtcttctagacataaagggtacatgtgaggaaggcagttgaatcagtatgtgtccctgtctctgcccccacagctcactgaccaggcatggctcccagctggggttcgagtgcccctccaccaagtgccctatgccgtgaagggctgtttccgcttcctgcccccagcccaggttactgttgtgggcagctaccttctgggcacctgcatccgaccagacatcaatgtggatgtggcactgaccatgcccagggtaaggtccagggtttaggggatagaggcccaccacctgactacctacaaatcctggatccctctttcttatctgccgcttgccaggggattgaagtcagaattctaaatcagaagagcagaccattgcaggcatcctgaaggcagcttagatccctcgggccagttgctgtccttttggagctttgctctccagatatgagaactgggcctagtgttgctaaccgtggctcaggcacttctgtcagcagaggagccctggctctctcaccttggtttcaccttggcccacagctccacaagcacttatgtgcctggccttctcttctcccctggcccctccaggaaatcctacaggacaaggacgggctgaaccagcgctacttccgcaagcgtgccctctacctggcccacttggctcaccacctggcccaggaccccctctttggcagtgtttgcttctcctacacaaatggctgccacctgaaaccctcactgttgctgcggccgcgtggtgagaggcacacattgggctgagggcatagcatgggatggtaaatctggaggagaaggcacagaggcacggaggcctcaagtatggggggacaggatggggagccctctggctccaagggctcctgcagagtctcagcactcactgtctctggcaggaaaggatgagcgcctggtcactgtacgtctgcatccgtgccctccacctgacttcttccgcccgtgccgcttgctgccaaccaagaacaatgtgcgctctgcctggtaccgagggcagagtcctgcaggggatggtgagcaggccctggtgttgaggtggagctggagggaagaggtgtggggacttttcctctcatggcttcccttttcatcccacaggtagcccagagcctcctaccccccgctataacacatgggtcctgcaagatacagttctcgagtcccatttgcagctgctgtcaaccattctgagttcagcccagggcctgaaggatggcgtggcacttctgaaggtctggctgcggcagcgggagctggacaaggtgagttgggggtggcgcagcctccctacctgagcgcctgtgtgatgggcaggctctgacctcagcctctccctgtctctttcagggccagggtgggtttactgggttccttgtctccatgctggttgtcttccttgtgtctacacgcaagatccataccaccatgagtggctaccaggtcctgagaagtgtcttgcagtttctgggtgaggcaactaggtggggaaaggccaggggctccactcctcctgggaatcctctcatcccagtagcagtcttttggtgttttgccatcagacagatgagcaaactgaatcggctgagggagggtgtcattagggctgggtccccagaaggggataccttctaatacacttgtgattcacttcagccactacagacctgacagtcaacgggatcagtttatgtctcagctcagatccctctttggtgagttggggaagggccaggtctatgccaggaggcctgcaagtaaggtgccaatcctgacctgcttctctctacaccccccaagccggccctggctgacttccaccaggccttctccgttgtcttcctggattcctcaggccatctcaacctctgtgctgatgtcactgcctctactt

SEQ ID NO: 41700 - DNA, 2300 bp, Homo sapien
agctatcgcatagccgggcgcggtggctcacgcctgtaatcctagcactttcagaggccaaggcgggtggatcatgaggtcaggagatcaagaccatcctggctaacacggtgaaaccccgtctctactaaaaaatacaaaaaattagccgggcgtggtggcgggcgcctgtagtcccagctacttggcaggctgaggcaggagaatcacttgaacccgggaggtggagcttgcagtgagccgagatcgtgccactgcactccggcctgggcgacagagtgagactctgtctcaaaaaataaataaataaataaataataaataataaaaaagctattgtataaactgacctgcactgtttgaagtcagaatagtgattgttgggggcagagttactagagggcagcatgaggggagattctgaaggtgcaggaaatgttctgcttattttctgggagctgactatatgagtatgtttggtttgttagtattcaagctttacacttgggatatgtacatttttccttatgtatattgtacttcaatacaaatttttagactgggcacggtggctcacccctgtaatcccagcattttgggagactgaggagggcagatcacttgaggccagagtttgagatcaggctggccatcatggtgaaactctgtctctactaaaaatacaaaaattggcctggtgtgttggcgcatgcctgtaatcccagctacttgggaagctgagccacaataatcaattgaaccaggaggtggatgttgcagtaagctgagatcgacccactgcactctagcctgggcaacagagggacactcactctctctcaaaaaaaaaaaaaaaaaaaaaaaaaaaaaatatatatatatatatatatatatatatatatatatatattatatggtaatagttgaatttagatgatcctgcattaggaaataaaatgaaacatataacggttattactggaataactgacaaaatttaaagatggaatttgtatactagtattgaatcacgattaaatttccttaatttcataatcgggctgtgcttacataagaggtagtccttgatcttagtagatacatacctaagtatttagggagatgtgtgattggttttcaaatggttttgcaaaataatatgtaaatacataggtaaagataaacttggcaaaatagtaacactaagtgaatctaggtgaagagtatatgcgcattcattatattattcttgcaacatttgttttaaatttttaatagtttaaaaataggccgggagcagtggctcaggcctgtaatcccagcatttcgggaggccaaggtgggcgggtcactggcagtcaggagtttgagaccagcctaggcaacatgaggaaaccccatctctagtgaaaatacaaaaattagacgggtgtgatggtacctgcctgtaatcccagctcctcaggaggctgaggcacgagaatcgcttgagcctgggagagggaggatgcagggagctgagatcgtgccactgcactccagcctgggcgacagagcaagactactccaaaaataaataaataaataaataaataaataaataaataaataaataaaaataactaaattacttgaaattgtaataagctaagtaataagtaaaaactggagaaaagtcataacaataattcgggaacaagatgatgtgacgggctaaacctggcagtgaagacacagaaaaatgaataaattcaaggtatgttttggaggtagaactgacaagatttgttaactgataaggtgtagcaaataaagaaaaagggaggaataactgctgtaaacaaacctgaccaaaaggaacaaactagctccgcccttcccgattgcagccacgcgaaggaagtgaggaaaagaaagcaaaggcctagctacgggcaggcttccgttctagcgtcgcgaagaggccgtaaagcacagaaacccgtttgtcccctcccctaatgggcgggccttgagactgcccggccaatggcaagcgagtaatcgactgataatccaatagctctggagtgggtggagtcctgaggaattggggtgggctggacttgggcctggagttaggcatttccgcccacgtgggaagctatgaggtatagacccggctagaatctgaagtgcgggagagtgctggaccctgagtgatggggccggcgccagctggagagcagcttcgcggagcgactggagagccagaggtgggttgagccatcggggaggaacagaggctcaatgtgcgctcc

SEQ ID NO: 41701 - DNA, 2300 bp, Homo sapien
tggaaaagagtggctttcagttgccatagtacaacaggcctcttgttttcacgccagatcctctcactctgaataggatgatcagtcattgaaaaaagaaaaatggcctccagggatgtggcaataggaatgatcttcttatctcagaccacagtaggattcctgggcaattgctttgttcttcaccattatagttatttatttcaccagatgcacattaaggtccacagatctgattctgcagcacctgactgtagccaactccttggtcattctctctaaaaaatgctcctatccttgtcaatgcttggtattggaaatccttttaatttaagtcattctggtggtagttttattatctcattataatttcaatgtccacgatacagctattttttttttttttttgagacagagtctgactctgttgcccaggctggagtgcagtggtgccatctcgctcactgcaacctctgcctcccaggttcaagtgtttcctgtgccttggcctccttagtagctgggattataggtgtgcaccaccaagcccaggtaatttttgtatttttagtagagatggggttttgtcatgttgcccaggctggtctccaactcctggcctcaagggatccacccgcctcgacctcccaaagtgttgagattacaggcatgagccactgtgctcagccatgacatagctattaatatagaacttttcatgtgggcctataggtcaatctaggaatttgccctttcagaggctattcatatttatatgcatattggtgcatggcaggggttggtgtatacaccttggtgtatggctgagccataaatggagcatacctgagaataaccctattctaagtgtgtttggagtcccaggctaaggaatccaggagtagccaacactgagattcactacttacctatgaaggacagccatacccctgccccatcccttggaacacagcctgtacaggtgatcaaggccctttattttgggttaaatggagactgctagaaggagggttctaagtgaaaatgcgatatgctatatggactacatgcttttttttttttatacaaacggtagcgtttctccaggccagcccaccaccactggaccacccctgtatgtaactcctgaataaacgttatgtttccttcactggttctgcctctcctatagtgtcatcccaatcggaatcaatggggatccggaaggacaaccggccatttagataacatttgaaaattaaccaatgtaattggtcacattgtaacattattattaaaatattattttaaaattattattatataacagtaacatattattattaaaaatacatatgaacatttcaataaaggtagaaaaagcacttgatattgaatgctttcctcttgattttacaaccaagacaaggaagtccattatcactatttctattcaatagtggacatactagccagcaacaaaactaaaaggtataaagattacaggaaagttaaaccatctctattcacagactgcaagattgtaatcacataaattccaaaagactctacagactctacagtcccacggcagccccttcctccgcgccgcggcggcgcctccggcccacgtcacgctcgcgccattgtttcccagccgctgctcgctgggaccccgccagccctcgagcgcggccattcgccgcgttctgccctctcccccctttcctcacgctggtggtggccctttcctcagtcctgctgatgtcctccagctgattccaggctgttcccggccacccctgaggccgtcctttcgcttcttgtaaaagcctccccgcctcctgagctccctcggtcgcctcccgagaagccaacgggcctctctggtggagcgttaggttgacagcgttttagcaggaccgcgagaaaccggggagatcctcttacgaggaaaaactccaagattacatccctgttatctttcctccaagtagtttctgatcataagttatttgtttaaaaatgatgttttaattagaatttatttgatggcttttaaaaaacttttactgacactcaacatgtttgtttttgtaggagctgactaaggctttggaacagaaaccagatgatgcacatatattatcgtcaaagagcttattgtcacattcttcttgggaattactgtggtaatttttcttataaagtatattgcccctttttaataagttacttatacattttacccatgaccaattaatcaaataaaataaaggttgtctttgaggatttttgag

SEQ ID NO: 41702 - DNA, 2300 bp, Homo sapien
cagttcacgagggctccaatttctccacctccttagcaacatttattttctgtgtcgttgttatgaaagccttactagtggatgcaaagtggcatctcattttggttttgtcttgcattttattaatgaataacaaataatcgcttttgattactaattcagtctcctaggttataggtctattcagattttctcttttttctggagccactttggtagtttatgtctttctagtgatttgtccatttcatccagggcacctaatttgttgttggacagttgttcacagtatactcctgtaatccttttgtatttctgtaaagttggtagtaatggctctgctttcatttattattttaataattagtcttccatcttttgctcagtcaatatagtgaaaggcttgatctttcaaagaatctatgtttatttattctactgctctccaaccttttattttattgatttatgctctaattatgctctttattatttctttccttctgctagctttggatttagtctttttttgttttcttccactgcctttaggtatagagtgcggatattgatttgagattttttcttaaaatgtagttgtttatatccatacattttcctttgaactctactttcactgcattcaataagttttggtatgttttgtttttattttaatttgtctcaagatattttataattttgcttgtaatttattttttcactcactggtagttgaagactgtattgtttaatttccacattttcatgaattttccagttttcacttatttatctgttgtttcttccattgtggttgtaaattatattttgtatgatttcaaacttttaaaaatgattaggacatattttgtggatgaagatatggcctatcctagagaaagttccacataacttgaaaagaatgtatattctgctgttgttgggatggactgttctgtatatgtgtattagctctcagtggcttctactgttgtttaagtcttgtatttctcatgaagcttctgtctggtttttctatccattaattaaaatgaggtattgaagtgtccaactgtgactatagaactgtgggtttatcctttcaatcctgttaattatttcagctttactgaggtgtaatagagaaataaaaattgtacatgtgatgcgtttatatgcacattctgaaatgattaccaaaatgaagtcaatgaacatgttaattacctcacagaatagttaccttttcgtgtgcatgcgtgggataagaaaacttaactctatcccctgtgactgcagagtggccatttcagctgctccaggctcaggcagaggaagaccagggcaggtggcaccaccaggggggccctcaggcctggcgcgcacgcattccagaggccacccagaccatgctccgctgcctgggcgcccaagctgcagtcgccctctgtgtgcaggcagcagcctctaggcaactcctgggcccgcccgcactccccacatctcggaagcagggccagatgtccctgtggctgcggccgagccaggcggtctgccctgcagcagctgcacgggggcgggaaccggccctcagccccatccccggtggctgcagagggcccctggctagaggtctcgagctctggcagaggaggagccgggagggggcagggtctggcgggctctcaggccaggggcacccgcgatccagaggccgcccaggccatgctccaccacctgggcgcccagctacaggcgccgggcaactcccaagctggctggcgcgcccagcctcgcagaaccggggctagatgtcgccgtggctgcggccaagccaggcggtctgcccggcggcggctgcaccggggcaggaaccgaccctcagccccatccccgcggacggtccctggagcggccccgatctctcttcggagaagaggggcgggagtcacggccaggcgggaagggatgcgcgcctgagattccggaacgtcccgcgccagcccaggagaacccgcaagccagcggcgcctgagcccgagctgcagtcaccctctgcgggccacgcgagctcgagggcgccttccggagtccgggctggcgctgagctgtaggcgcgcgcctaaccgctttactgggctcactctatcgagaggtcggaggctgcgagtgtcgctgctgaaggctgtagtggaccgggctggatcgcggattctgagctacatcgcgggtttgggggtgcatcttggatttaggggtggatcgctgggtggggagggggatctcgaatttggagc

SEQ ID NO: 41703 - DNA, 2300 bp, Homo sapien
cttataattccatcatggccactttaaatgtttttggaaacaaatacacatactttcacatatttaagaaaatcaccactccaatgtttctgttgaatcagacttttacatgatgttgtttaataaaatatggtaggttttgacatgtatgattttatcatataagtagcgtaactcctcagccaaaaatttagcatttgactctatagtagaaggctgagtcctgtacattatgttctaaagatagacaaaaatctagagattttcttctttcaaagtaaaagcagatgaggcctcccaccaccctctgagccattaaattgttttgccaaagtcacacttttaatttatttgacgaattggatgtatttatctggtaattgatgtaattcagcaatatgtaattgtatcttcccttttggtgccacgaaatgctaggcaatgccaccttaggggctttgggtgagttacttaatatttcttggttttacttccattatcaagtagataatggggctagagtggacagctatactgtgtatcttccagctacaaacttctgtggtgattgaatgtacatttgaggaacatctcattttccaggattccacactagaaactcagcagtttcactcggctccttgtgttgtggcaaactttggttcctctatttcagtgagcaccttcacttttttgatatcccaggaaccaaatgaaaaaataaggagaaaaggcagtggggaaaagaatatcttagtgcagaaaagggaaaggttcttttctgtttctgaagccccacaaggtcacatcctctcaatctggctatttcatggagaatccaagtgacaaaggcagaagacacattttatgcctgtgtctttttgtttctctgtttttgtgttgatatatttacaccacagaggtaactgtgatctgatggagaactggaagtagagtcagaagccgtgaggaaaatcctgcagcttgcttatatttttaacctgtcttttttaaggattgtgataactaaataagttcatcaatatatgtatgtagaagtgcttagtacaatgtctagatttatgatttagtaaatgtaattcttacaactgactaaaaaatgttgagtcaaatcacaatagaatatgatcagggaaacagaacttttaaaactttgagagattttatctgtccaaatagatgtggaggtaaagctcttactatagggtggtgtctgggttagatatcagagtataaatgcaatttcctttttccaagattttaatttagtcaaatttttaaacaactttatgctttgagtttgttgtaattcagagaaatgcttttccaattctgatattcttaaaaattctctagagtgtgtgtgtgtgtgtgtgtgtgtgtgtgtgtgtgtgtgtgtgttttatggattcattgacttcaaatacatttttgaactttttgaaatgtatgttctctaaggttcaaggttttgcttcaatttttttctccagttggttatccacttacagcaacttttaattgcatgaatgtataggttgctctttcacttcagaaataaccatcatagattattttgagtgctaactaaaaatttgttttgttttatttaggattctcaaagttatggaaaaaagaaggatgagatgtttggaaattttatgttgaagagagacattgccatgctcaaagaggaattatatgcaataaaaaatgacagtctcagaaaggaaaagaaatatattcaggaaattaaaagtattacagaaataaatgctaactttgaaaagagtgtaagactcaatgaagaaatgataacaaaaaaagtggcccagtattcgcaacagcttaatgatctgaaagctgagaatgcaaggctgaattcaaaattggagaaggaaaaacacaacaaagaaagactagaagctgaagttgaatccctccattctaacttggccactgctataaatgagtacaatgaaattttggaaagaaaagacctagaactagttttatggagagcagatgatgtttctagacatgaaacaatgggttctaatatttctcaactaacagataagaatgagttgcttactgaacaggtccataaagctcgggtgaagttcaataccttaaaaggtaagctccgtgagacaagagatgctctcagggaaaagacattggctttagaaagtgtacagctggacctaaagcaagcgcagcatcgaataaaggaaatgaagcagatgcatccaaatggggaagctaaagaaagtcaa

SEQ ID NO: 41704 - DNA, 2300 bp, Homo sapien
tgccatctttattaatcctaattgaattttaaatgtccttttgacacaaaaaggtatatacatgacacagctacacaaccttttttcaactggacaacaagtgtcaaaaccctgtggatgtatagggtaaaacaagattggtcacgaaaagagaattgtttctataactggtaatctgacacaatgtcctattgccattaaaaaaaaaggtcccttttcagtttattcaagtttgttttcatggtgttttatccctcttgataaaaaaaaattcagacttttgtaatttgtgtatgctgatcttcatcaaaaggttcattctctggatcagagtcagtggtgtcagaatatctataatgatcaggttcattgtcactaacatctggtgttacagaagttgaactgctagcctctggatttgacggctcctctactgtttttgtgaagtacagcttcaccttaaaatttggagaaaagtatcggttggctttgtctttatttgctttgtcaagatcattttttgttaaagtaagtactagatactccttgtcattatctgcacgctctatactgcaaatgctatcaatttcttgatcacatagacttccattttctactttttctgaggtttcctctggtcctggtatgaagaatgtatttacccaaaagtgaaacattttgtccttttttagcatcttgttctgtttgtggaagaactctactttgatatcaccacacacaggtaacggctgagggaactcaaaatacatgaacttgtcctcccatcgtgtgggtcctgaattggaggaatacatcttcacctttagctggcagaccacaaactgaggattgcaagttccgccactgaacattggaatagtttcaaacatcatcttgtgaaacaacagtgccactggtctataatccacatgattctttaccaggtagctatagtaatacacatagcgcctctgactgggaatagttactccctttttgtctctggtccttacttccccatagaaatctagggcctcttgtgcctttaaaaatttgccccgatgtaataaatatgcataaatcattataccagttcgtccctttccagctttacagtgaattgctgcaacatgattgtcatcttcacttagccattggtcaagatcttcacaaaagggtttgataagttctagctgtggtgggttatggtcttcaaaaggatattgcgcaactctgtaattagatttggcggtgtcataatgtctttcagcacaaagattgtgtatcttgtaatggtttttatgctttgaatccaaaaaccttactacatcatcaatattgttcctgtatacgccttcaagtctttctgcaggaaatcccatagcaataatgtttagataaatataggtcaagtctaagtcgaatccatcctcttgatatctccttttgtttctgctaacgatctctttgatgatggctgtcctgtctgggagcctgtggctgaagaaaaaggaggagagagatggcagaagctgctggtggcggggctctgcaggatggaaatggctctggacttggcggtagctgatgcccctcgctcagccgctgcttggctctggaccgcagccgggtaatggctgcggcagcagctgctggatggtggcagctactgggcctgcttctcctcagcagccagaggcctggcagcggcggcagcggaatggggagaagacgaataatcctccgaacggctgcctcctccagcggcctccggagcccgggccacggggggtgcggcggcggcggacgagaggtttaaaaccggcccgggtccctccatgtgccgccgccgccgccgccgccgccgccgtgttggaggcagtagaaggggagagaccaactctccggcgttcccagccctggaaatggtgacaggcgactcagaccccctccctggagctgcagccgccggggccaccgggggcgccgccgccgccgcttctccccccgctccaggagggggaggtgccgccgccgccgcgcctcagccggctcccgcccaagcccacggcttccaccttccctttcaggagaagccgaggaagaggctgcacagttagaaaagacgaagaagaagcgagaaacgccgccgctgccggcgccgcccccgcggatgctcacgggttgctgagaggggcttcaggccgggccgggccgggccgccgccgccgccgccgtctctgtctctcatctccctcgcctgagcccggcctcgcctcacagcggctcaacattcaaac

SEQ ID NO: 41705 - DNA, 2300 bp, Homo sapien
aagaggtcagcaaaatttttctgtaaggagctaggtagtaaatattttgggccatatgcaacctctgtcagttctttttctcctattcctcctcttccgtcttctaacactttaaaagtataaaatttattcttagtttatttatgagtcatacaaatataggccatggcttgactttaacatgtgagcaatagtttatcactccatgtcatagagaaaagctcaggactagctgactttactggtaaatcccatcagatatttaaataataataccactcctacaaaaaaaaaaactttcacaaaataaagaataagattattcctaaattcatcccagttcagtccacaatttcctaattcagcctaacaggtcagaattactttgatactaataaaagaaatcacaagaaaactacaaactagtatgtctatggtctccataaaatattagcaaacctcatttagcaatatataaaacgattatatactatgaccaagtgggatttatcctgccagtggaagattggcttgacatccaaaatcaactaacgtaatataccatattaatagaataaaaaacatatcatattatctcagtgtatgcaataaaataaatttgacaaaataacctgtacccaatcataataaaatctcaacaaattatgaacagactgaactttctcatcctgattaacggcatgaaaaaacactcaccttaaacatgaaagcttcaaaagactgaatgctttgcctataattttggtagcaaagtaacaatgtctgttttcactacttttattcaaccttgcactggagatatcagacagtacagtcagataagaaattgcaataaaaggcttccaggttggaaaggaaaaagtagaactctttttaatctccgactacatgatcctgtatgtaagaaaaacaaaaacaaaaacaaaactcctgtgaaatctacgaagaaacttctataactaacaaatccatttagcaagatgtcaggatacagtatgtataacaaaaatcatatgtgttctaatactagtaataatccaaaagtgaaattaagaaaaatatttttatagttgcagtatagaaaatagcactttgcaatatattaaacaacagaaatataagacctatacatagaaaaaatataaaatgctgagataagttttaaaagatgaaaaagaatggaaaaaacattccatgatcatggaggactcagtattgttaagatagaaattatctccaaatttatcaataagtacacggcaatccttgtcaaaattctagtagtaccttttgtagagattgactagctgatcctaaacctatatggtgatacctaggacttgaatagtcaaggcaattttgaaaaagaaaaacacaattaaaagacttacactagccaattttaaaacatacgataaagctgcaataatcaacagagtgtggtattaacataagatcaacatagattacgaacctagaagatgctctcctctcagaagctgcagccgtgatggaagtttgaatgttgagccgctgtgaggcgaggccgggctcaggcgagggagatgagagacagagacggcggcggcggcggcggcccggcccggcccggcctgaagcccctctcagcaacccgtgagcatccgcgggggcggcgccggcagcggcggcgtttctcgcttcttcttcgtcttttctaactgtgcagcctcttcctcggcttctcctgaaagggaaggtggaagccgtgggcttgggcgggagccggctgaggcgcggcggcggcggcacctccccctcctggagcggggggagaagcggcggcggcggcgcccccggtggccccggcggctgcagctccagggagggggtctgagtcgcctgtcaccatttccagggctgggaacgccggagagttggtctctccccttctactgcctccaacacggcggcggcggcggcggcggcggcggcacatggagggacccgggccggttttaaacctctcgtccgccgccgccgcaccccccgtggcccgggctccggaggccgctggaggaggcagccgttcggaggattattcgtcttctccccattccgctgccgccgctgccaggcctctggctgctgaggagaagcaggcccagtagctgccaccatccagcagctgctgccgcagccattacccggctgcggtccagagccaagcagcggctgagcgaggggcatcagctaccgccaagtccagagccatttccatcctgcagagccccgccacc

SEQ ID NO: 41706 - DNA, 2300 bp, Homo sapien
atcagatcctgtgtccttctgcactgctaatatctatctgtggccctgctttaaaacccaaatacgaacatctcttccatgaagcccttcctgattgccagtgccctcaacagtgggataaactgccaggcatcttggagatctagacccgtggttctcaatcccgacttcccccggcctcctgagaagcttttaataggtgcatcagccctggattcttaccagtaggtctgagagggaggcttagcgcttgtgttcttttaatagtgtgcacagggttgacgggaaacacacacacactgtgcagaaccattccacgaggctgtgtgtccggaattggttccctccaatgggttcctggtgccgctgacttcaagaatgaagccgcggaccctcgcagtgttacacttcttaaagacggtgtgtccagagtttgttccttcagatgttcagatgtgtcaggagtttcttccttctactgggttcgtggtctatgcacgacttcatgagtgaagccgcagacctttgcagtgagcgttacagctcttaaaggtggtgcgtccggagttgtttgttcctcccggtgggttcgtggtctggctgacttcaggggtgaagccgcagaccttcacagtgagtcttatagctcttaaagccacagtgagtcttatggcggctccagagttgtttgtttctcatggtgggttcctggtctggctggcttcaggagtgaagctgcaaaccttcaccatgagtgttacagctcataaaggtagtgtggacctaaaaagtgagcagcagcaagatttattgcaaaaggggaaagaacaaatctcccacaatgtgggaggggacccgaacggggaagctggccgcgatggccagcctttattcccttattggccccgcctgcatcctgctgattggtccattttacagagtgctgattggtccattttacagagtgctgattggtccgtttttacagagtgctgattggtgtgtttacaaacctttagctagacacagagtgctgattggtgcatttacagtcctttagctagacagaaaagttctccaagtccccaccaattagctggacacagagcactgattggtgcatttttacagagtgctgattggtgtgtttacaaacctttagctagacacagagcgctgattgatgcttttacaatcctttagctagacagaaaagttctccaagtccccaccaattagctggacacagagcactgattggtgtattttcacagagtgctgattggtgtgtttacaaacctttagctagacacagagcgtagacacagagcgctgattgatgcttttacaatcctttagctagacagaaaagttctccaagtccccatcagacccagaagcccagccagcttcacctctcagtagcttacagaagaggaccccgctgccacagcacaataccacaaagaaagtcatgcgctcctcagcaggaagcccccttctccgggacagggactttgtttccttctcagctctattgccagcacctagaactgtgcccacctgtcagatctgttatcagatgggaacgtggcagatttgttgaatgaatgaaggaatgaatgaactatgtgacactcaaacttagccaccaaacttaaactagaaaaactgggttgtggtccctgatggaccgttggtgccttcttcctttgctggacggtgatctgtggctgtttctccggtgtgttcgcagtggttgcctggcttggtaacaaacactcttcagagccacagcctgtgctcgggctcctcgccgcctcccaggccctgcgatctctttgcatcccaggaggtcccggttggttgcagtcctcctgggtgactcaggaaccagcctctcctgaagcacacagcctagggagttcctggggccagagacatctccaagggaaggtcaagggcctggaggatgtgcggacctgacgacagatgccccgcacgctggccgggaccgggaagggcggtcaagtgtggaaagggtctggcggctgccaggcctggcagagtggagcggggcggggcgcagcggggcggggcgggcctggagctgcacccgcttctgggtggacgcacttggcgagcggcgcgggatgcagacggctgcgaggcgctgggcacaggtcagacgtcagtacccgcagggggcttgaaactggaggagggctcgaagggagagggagccccgccaaggagcggggctgtgatggagagggggttccgactcgcatgggacctgc

SEQ ID NO: 41707 - DNA, 2300 bp, Homo sapien
agagaggtgtgtcatctacatggcagtcatggcctggatgggtctggaactgtggcaagggaagtctctgagacaaggtgccaggagaaagatgaattcaatcatctatttctgccaggaagaaaagcaggaggaaggaatcagatgcacagtttgtcctctggggacctctgccttgatcctcaataaatctccttttagatgtcacctgcagcaattcccacagttcacaatgatctccatggcttccgttggccttatggtgagctctgccaagatctgtattcttgggcaagacagaatccttctgaatctcagtctcttcctctataaatggaaataattttgctctgcacaaatcacaattagcatgtttgtgggaagtcaaactgtgaaactcagcataactgaaaagcaatgtaccactgttgcttatgtgaaaactcttgtaaagctgtcaggcaccatgcaccatctaagtacagcagtgttaggtatgagcccatcagtgattagaggggatgtggggtggagagcgggtctctgagcagtggatctcctggctttggggaagctggctcgttggccatgccaggagctgaacctgaaggtactctgtgtgtcctctcaactccacgggccccacattcgcattttttccaattccctctggtttccatttgcttcctccctctagccccctggccatgtccgatctcaacacgaagtttctgagcttttctcattttgttcaccatctccagaacatctctgcttcttttacttttcaaagaatttaaacttgaactctgctcactcctgcccatcaccaacctgagctcagagttgctgagaagggaaagcaccctcataaggaagctcctcctttccttacatcattagacttgatcacagacagcatctccatctccacactactctggccaggttgtgcctcagtcaattacacaactgtgtcttagtagccttggtagggcccaaatcaggatattctctgggaagattcacttgatactaagcccagcataatctcactgcatctaaaatagaaaattctagacccacccctccacatcttcttattgatcccaatatgtgacccatttaccatgtgctaaaatctctacctactgctgattctcagatcagatggtaacccagatttaccatggtccaaactctgacatctgatcaggggcatgtcattctggttcaggctgtcagccctgagcaggtgagtcagtttgcatcaccctaagtgcaggttgccaggacaaccgtgaggctgcataaaaagaacctatgacaggatgcacatgagagagacaagtggcttcacattgaagaaggggaggagtgcgccattggttttccatcctccagatgcactgagtaagctcctacctaacctgtgtcccctccttctttgaaacacttcccatccttttaagccttggtaggaaggagagccatctggaagcccagaatcctatggaatgctaagtctcccttctccttaccccttagtgttggaattctggatacccaaagtcttggatttgacctttgtgcacagtgactgcaaagaagcatattcatattcacaaaaatgagccttagataagactttcctcctctcgtgggggctccaggaaactgaaaagccaagcttgttaccaatgcttgcccttccttaagtacattattaaatacatccccaatagttaaaaggactcctagacacccaggccattctccctccttctaaccctcatctcctcggcctacgaaagcccagctgtgtgatccggggattggtttcccctgtcttccccatcccagcatccttccaggaaatagccagtctccctctctgctctcagaaggcaagtttccttatcacctgtgaatcacaaacccacagagtggccaaacgtagccgagctgatgcaagaccctggcaaggggaaagctgcaggtgtgtttgtgctgggaagaactgtgaccctcacctcacagacacctcctctcctgattcttggaagggtataaggacaggccttccaccaccagtcaggcacactctaccaccatgaatccattcctgatccttgcctttgtgggagctgctggcgagtttcatgacctgcctcaggccccacccaccccctttcctggcagacacatgccctgccattcttgccacctctcctcttttgactgcgctctgatattctatttcctccatctgacatatctccttcccatcctccttgggc

SEQ ID NO: 41708 - DNA, 2300 bp, Homo sapien
aatcccagtctaatcatgagaaaagcatcacaatcccaattgagggacagtctacaaaatacttgaccagtattcttcaaaactgttaaggtcatcagaacaaagtctaagaaactgccacagtcaagaggaatctacagaaacaggaaaactgaatgtagtctggtatcctggatgagatcctggaacagcaaaaggtcagtaggtaaaaattagggaagtatgagcttcagtcaacagtgatgtatcaatattagctcattaattgtaatacatgtactctactaatgtaatatgttaataaaagggggaactgggcgccaggtgtaggggaacttgactatcttttcaatttttctataaatctaaaactgtccttggctgggcacagtggctcacgccagtaatcccagcactttgggaggctgaggtggacggatcacctgaggtcaagggttggagaccagcctcgccaacatggtgaaatcccgtctctactaaaaatacaaaaattagctgggcatggctgtgcacacctgtggtcctgctacttgggagactgaggttagaggatggcttaagcccaggaggttactgctagagtgagctataatcactctactgtactccagcctgggcaacagagtaagaccctgtctcaataaaaggggtgggtagtggtggtatccagaatacagctatgccttaaagtttttttctttcaagtttctatgaatcattaaccatgtgccagtcactacgctaaatgctgtacatacatttaatcattacaattgcttgtgttgggtataattaatccccttttacagaagctgattaaacagccgggtgtggaggcatgcacctgtagtcctagctacttgggaggctgaggtgggagaatcgcttgaacctgggaggcggaggttgcagtgggccatgatcgcgccactgtgctacagcctgggtgacagagcaagaccctgtctcaaacaaaacaaaaccaaaaaacaaaaaactgatgatacagggagaagtaatggaactagggttggaaccaagatctgtctagttccgaaactgtgtgtgtagaactctcacaatattctggcttttctaggaaatgttttttaggcagttatcctaggacatgccttcctaggagaaaggagtactgtattctgaaccacggggggaccaaagactgtccccacatctcacttcggttatgattatctcgaaagtccctcagttccagggtggacattcaagccacaagcacctatagggaactttgacccctaagttcaaccacagtagtttattttacaaatggcgaaggcgaagggcagcctgagcacttgccccaaatcacaatgagaagggctagagacccagtttgttattgtctttttcctcacaacttcctctttgtagttaagaagggaagcagaagctgacctttttgtctcaccccgtttctcacgtggaactgccgcacccagggtgagtaacgtgccaaagggcacacttgcctgtgggctggcctgcgggaaggtctgttcccaccgaaaagacccacattgtcagcacatcctaatcaagtagctactaagtggagggaccgcagactgggtgtcacggggaggggcctgcagcgaccaggcccgtcccaggatggctgcggaggcccctggatccacagtggggagggccccgagagccgggagacctgggttcccttcccgggcacgcctttggaactgcggcgtccagccgcacaaccgtcactctggggccacggcaatccctgcgcccgcccttggtccccgctgcttctgggatctttatgggcgggggacacgcgccagcgtcacaaagcgccgcgaccgcgcgggagaccgagaggaggcgtggaaacgggaggaggaggaggtggtagtggaggagagccaggcacggtggggggaggggagggaggggcacgcgcacgcgcgtcgggccgccagccgctgagagccgcccagcacccggcgtgcgcccctcctccctctctccctccctccctccctccctgcttctcggctccgttgctcccgcggcgcgaggcgctctcgctctcctcctcctccgccgtcgcccctccccccgcgcagcccccgccgccaccgccgcgagacccccgcacgccgctctccccccaccctctcctgccccgcgcgccctccggcccctgcggcccccgaagagaacgagagggcgagcgagcgcggcgttcccgggccggcccggccccctcc

SEQ ID NO: 41709 - DNA, 2300 bp, Homo sapien
attctgtgaaatacaggtctcacaaatctccaatgcagatcctgtgggtaagagacaagagccaactatttcagggtgaaaaagatcagttagaaacctattaatatataaaagttaaaggaattacagtatgaaaaatgtaaagaatgactggcagtcccactgccttcacgaatgactatgccaaaaagggaaaagagtttaacttgaaaataaattatactaaatgttcaaggactaacatttaataagggagaagagtgatatggtagggaaagctttgtgccaactttcaactgcagctgtagtgaaatacactaaaagccttgtcttaagacaaaagcagtaaaataaaaacaatggttttaaacatatccccagtgtcaactgctcatgaccataaatttgcctttttctaatgaacaactaatgggataaaaggccatataagggaaaaagtagtcgaaaatacaatcgaacaaacttctcacacaagactaaaccataaaacctgtttacaaattttcatacatgtcagaattaaaggtaaaaacactcaaagcttaagaaatctaacatcacaaagcacgagattaaatcattcttttaaacaaggactgaagttcagaagcatttaatttaaatcagtgtattaacacaaggaatccttccatacttcctatttcagagagggttctccacactcctttcccagacttatgcacaaatattacaacttgcaacccattattttctctcatgtacaagttttgttttgttttgttttgtttgctcttgtttttaactttattggagtgagattattctaactagtacccatttatttattttaaatatcggttgtaccaaacaatgacactttttggaaatcaaactttattccactaacattagccagcagattttgctaaacaatgttttgtcagaaaaggcatcatggccgggcgcagtggctcacgcctgtaatcccagcactttgggaggcagaggcgggttgatcacagggtctggagttcgagaccggcctggccaatatggtgaaaccccatctctactaaaaatacaaaaattagctgggcgtggtggcgtgcgcctgtagtcccagcagcttgggaggctgaggcaggagaatagcttgaatctgggaggcggaggttgcagtgaggcgagatcgcgccactgcactccagccagggtgacagagcgagactccgtctcaaaaaaaaaaaagaaaggtatcacatacattcaattttgtacaactaatttttccagtatgcataaaaatttatatttgacaacagagaatatgcttcatcataaacacagcaatatcttttccactttgttactaataagttgcatgttttcttagtaattttaaatacctccatctgaaaagtatagggtaggctgaccacaaaagatgaagcctaacagttggtaggggtaccgcacttacataatattctaaaaacgtgcttttcctaggtactcagtgactatatacagtagtgaatattaaacattcctgtatcaatcccatttcctacaaagttgacctaatttcaagcataaaactgaggtttccacctttagaagggtagaaaacaagagttaagtaattgggtagtcctaaaaatacacatcacaactacatgactaagatactcatttaaaacttgtgccaagataacccctcccttccaaactaaaattgactcactggcctattttacttaattttgaaaataaaaaaataaaactaaatggattcctaagcactcatttcctctctctgcccccatcatttaaaatattcagactttcaatctgtgattcctccctgcaaaaacactcaagtaaaaacaaaacaaaacaaacactcattatctccaagttaactaccttggagttaaaaaaaaatcattagattctggaatgataaccactgttctaagaccatataaaacaacagaaacaatgtctgtggtcgctaaggaaccatacatcccacccagagaaacgatctcgcctcagatgatacttgtcatctgtgagaccacccctttagctagagttaaccacttgagcaggtttcaattttgtctctgaaagtaggaagctatcagtctccctacatgactcgttccaccctttgtggatacttctacctgtagaaaaaaaggttggcaaacttggtggcatggtgaggacaaagggcattttgaaagaaccagtgactgaggtaagcagagaatgtgaacggaaagagggtt

SEQ ID NO: 41710 - DNA, 2300 bp, Homo sapien
atcttgttttctctctcttttttaaaaagaaaaaccatatgacacaagacatggaggttgcttacgtggccctggagttttatactgtcttcctcttcctcagagtaccatatagtgtctttggtctgagatggccagtgactgctcttctgcaatcagctgagtgagtggcttgagctgatggtctttaaggtctcttctgggtctggcctcccatctagatttgtgagaatgcctgccctgggacgtccctggtggttgcagccttactctgagaccagggttgcctctttcttctgaccgttggtgccagaatgcagtgtgggcctttcctgggatagccacatgaacagaactgtggggacagaggggaataggcccgctccttgccctgcccatgggcaggacttcctcctgggagccactgtcttcttgctctgccatttcccagggcacttgtcagagagttgcaggcagtttggacaccacctctgctggatacagtctttcctgttgctggaggaagaggctttctcccttgtgcagtgatgccttcttccccgtgggtgttgctcccttctctgctgcaccacaaagagctgacggagctgctcttgtttcagaagagtagccctttccactggctggccgtatttccagaagcagaggcctagcctgggagcggagcggcttctccccactgtgcaaaccagcagccctttaatctgccggccaaaggcccaaactgcaggaggtggtgctgagccccgggattcattctgcttcaggggctctccgtggtctccacacttattcacagcactcttttggcttttatcactttgtgccttagagaaaacaccctctggagcccaccttttgagatatgttgctctttctatccctcgggttgtttgttcacctctgctgcttgtgagcctagttcctgcctggagaattctcgtgttctgtgaaagtgctcccccttctgggctttctctgctcccgtcctcagttgtgcagctctgtgtgttcccagctctgcctcttccgggggttctaggctgctatgggtttccgggaggtttcctggagggtgtgagtgccattcccagccaggatggctcctttctgggatcgggcacagcccaagggctttgcctttcctcaggggccaggtgtgtccaggagtgcgaggccctggatggtgagtgagggtcaggtcagacctcccctcctccacgaagctccactgtgctttgccgtctctgtctccacactttgttgtatctgccatacttcccccaagtcctgggccaggggtgtccaatgttttggcttccttgggccacattgaaagaataattgtcttgggccacacataaaatacactaacattaaagatagctgatgagcttaaaaaaattgcaaacaaatttcatgttttaagaaagacgaatttgtgttgggccacattcaaagctgtcatgggccgtgggttggacaagcttgtcctaggccatgtcagtgttttgagagcagtgtaggtggtgacaggccagttctgggcttcacctggggtcctgcttattcccgtgcctacctggcactgccccctgtccccccttaaacctttcaggcccctgcacttctgttgcctcctttttcaggtctgctctgtttagtcagctttcctagctgctctagtctctcacacagaaaagccagcgaagttggttcagcccgaggcattcacacaagcacctgcctgtggtgtcaaatggatgtgtgaggcttggtctccagcagctctgcctggtgaagctgcagggttggccggtctgtgtgcttatgtgttaggcaggccgcctagttgcacactcttccgaggggcaccatttacttggcgttccctgggactgctggctctcaggcatggagtctgtttcaggagtgtggcgtcaccacttccatgtgctggttctgctctcctgggagtcaagcagggccagtcgctgatcaagcctccctggtctctcctaggactactatggaattccctttgctgcacccacagcgcttgccagccgagatgggagcctagctaataatccatatccaggtgagtttgctcaatggatgaggagtagcccggggccggcctagcgcgaactccaggagctgggaagcagcaacagcaagctgagagaggcctcttagtagcctgtgctgagctggcagccagacctgttcctgtttgcagaagccagtgtggcctttctctggttggaggaagggca

SEQ ID NO: 41711 - DNA, 2300 bp, Homo sapien
ccgtctctgccccactgagccctggtggtcttcttccatctagactccgtgaaggcaggatctgttcccgtaacagctaatccagatcccattcccgggtgtgttagagccccccaaccttgttttgactcctagatggacctgggcttcccagggtgtggtatgtggttcctaaaatacactttctggttctcacacagatctatggctatgacgagctccagatgctgcagtcacggctgccagtggtgagtggggtatggactggtcggagcagagggttcagaatcttttacatgtcccccctcttatggtcttggctgccacactctctggcccttaggatcctctgcctgaggaacctctcagcaccactactgagaaagctgttttcatctggcggttgtgccaggcgtgaccatagctttagcacagagtatccagtgctcatccctgggaaacatgaaggcctttgggacctggggccctggtaggccatgtcccctgttaaatgttggtccttatcttccctcctccatcttgttttctctctcttttttaaaaagaaaaaccatatgacacaagacatggaggttgcttacgtggccctggagttttatactgtcttcctcttcctcagagtaccatatagtgtctttggtctgagatggccagtgactgctcttctgcaatcagctgagtgagtggcttgagctgatggtctttaaggtctcttctgggtctggcctcccatctagatttgtgagaatgcctgccctgggacgtccctggtggttgcagccttactctgagaccagggttgcctctttcttctgaccgttggtgccagaatgcagtgtgggcctttcctgggatagccacatgaacagaactgtggggacagaggggaataggcccgctccttgccctgcccatgggcaggacttcctcctgggagccactgtcttcttgctctgccatttcccagggcacttgtcagagagttgcaggcagtttggacaccacctctgctggatacagtctttcctgttgctggaggaagaggctttctcccttgtgcagtgatgccttcttccccgtgggtgttgctcccttctctgctgcaccacaaagagctgacggagctgctcttgtttcagaagagtagccctttccactggctggccgtatttccagaagcagaggcctagcctgggagcggagcggcttctccccactgtgcaaaccagcagccctttaatctgccggccaaaggcccaaactgcaggaggtggtgctgagccccgggattcattctgcttcaggggctctccgtggtctccacacttattcacagcactcttttggcttttatcactttgtgccttagagaaaacaccctctggagcccaccttttgagatatgttgctctttctatccctcgggttgtttgttcacctctgctgcttgtgagcctagttcctgcctggagaattctcgtgttctgtgaaagtgctcccccttctgggctttctctgctcccgtcctcagttgtgcagctctgtgtgttcccagctctgcctcttccgggggttctaggctgctatgggtttccgggaggtttcctggagggtgtgagtgccattcccagccaggatggctcctttctgggatcgggcacagcccaagggctttgcctttcctcaggggccaggtgtgtccaggagtgcgaggccctggatggtgagtgagggtcaggtcagacctcccctcctccacgaagctccactgtgctttgccgtctctgtctccacactttgttgtatctgccatacttcccccaagtcctgggccaggggtgtccaatgttttggcttccttgggccacattgaaagaataattgtcttgggccacacataaaatacactaacattaaagatagctgatgagcttaaaaaaattgcaaacaaatttcatgttttaagaaagacgaatttgtgttgggccacattcaaagctgtcatgggccgtgggttggacaagcttgtcctaggccatgtcagtgttttgagagcagtgtaggtggtgacaggccagttctgggcttcacctggggtcctgcttattcccgtgcctacctggcactgccccctgtccccccttaaacctttcaggcccctgcacttctgttgcctcctttttcaggtctgctctgtttagtcagctttcctagctgctctagtctctcacacagaaaagccagcgaagttggttcagcccgaggcattcacacaagca

SEQ ID NO: 41712 - DNA, 2300 bp, Homo sapien
atttcttattatttttctgagacggagttttactcttgtggcctaggctggagtgcaatggcatgatctcagcttagtgcaacctccacctcccaggttcaagcagttctcctgcctcagcctccctagtagctgggattacaggcacacgccaccaggcccagctaatatttttattattttaatagaggcagggtttcactgtgttgaccaggctggtctcaaactcctgatctcaggtgatccacctgcctcggcctcccaaagtgctgggattacaggcgtgagccaccgtgcccggcctatgtgagctatttatattcttggttcctttttttgtcaggtctttggtctctatttctatattagggagcccttggtgatgggaagtacaggtatttttccctaagtttgctgtttatgatttttttttacatagatctgtgtattttcttccattttcttgtagttatatctttaccactctccatcaatacataaaggaaatcttagcatcttctcctgcctttacttctctgggcctgtcctggggagttgactgcatagggcccattggatggactgagcgaagccttgaaaattagtgttgactttttaattcagcaggttgatgtactcccagttctggaagatgagggccagagacaggaaccctgtcaggcagctaagggagaagagacttgccagatgactcttgagtccctttcagcaagtcaggacctagttccctagtgagcatctcttagcgatggagaatgttcatttttccttccgagattaaaaggttgtatatatccaagtacacttgcgagcactggtcagagctgctccagatttctgtggcagttggtggggagtctgcctccttagtgagaacctagttggtgggcaggccagtgcatcctttggcccgctcctggtggggctctctccggcctggtcctgcccatctgtgctgaaggaacaagacgccttggagccccaggaaaccatgtttttggctgtctttaccttggtgaatctgttctggatgttagctctgtaaagccagtgcccaggcgggtagtgacctgtgggcatgggatggcggcggagagttagtctgcgcaggcaggttgggtccttctcctgggcccttcccgttctttggcttttcttctacgagtttatatgctgctttctatgtcctggtttggagactggtctccctcttacagagcttttcttcccttttttgagacttgccttgtccacctaggtgtgccccccacctacctgctcggagcttgaagttcttcataggaccctgttgctagggttgggcagctaggcagggcttctgggactcggggctgatggagcatccgctggttcactctttcttcacaggggtaccttgtcaaacaggcataagtggcaggccatgcccttttaggtgggcactggtgaggcattggtggactgaaaggtgtcaccaggttttggagcaaaggcctctctcagcctcctgtttccagaccacagtggctgagaatcccaatagaagggaaatctccaaaagattgagacttacgctgggcttcctgtggcctgtgctcgcctcttctcagactgtttgctttgctctgaggtaggtacttgtcccatattcagatagtctgtgttcatttatgatccgaagttatcttgggatttctatgccctcattttggatgccaagcatgagcaacttgaaggatttttacagagagttgtggtcattaaagcttaatgttaatagttttgatgttcagtttatgtattgtatcctgatggctggaaccagctgctatgtgaggggccgcagtgagcactgagcacagagcctctcaccttaagggagcctgggtggttacatcattgcctgcctgctcagccttgagacttgggcccaagcgccaggccaggctctccccagcaccctcctcctctgcctccagatccatgtgtcctggcttttcttttgccagcatgccagtgtggagagcgcctcttcccaccagtcctcagccaccttctccacggcagcgacctccgtctcaagttccgcatcctcaggcgccagcctgtccagtagcatgaacaccgcgaacagcctctgtctgggtgggacccccgcgagtgcatccagcagcagtagcagggccgcgcccttggtgacctcaggtatttgctccagaggcctttcctgcccacccctgagcccctcaaaggtgcctgcttggcgtcccaggaaggca

SEQ ID NO: 41713 - DNA, 2300 bp, Homo sapien
tccccattatcatccgctttttttttttttttttttttttgagatgcagtctcactctgtcgcctaggctggagtgcaatggcgcaatctcagctcactgcaacctccacttcccgggttcaagcgatcctcctgcctcagtctcctgagtagctggggttacaggcgcataccaccatgcccggataatttttgtatttttagtagagacgggatttcactatgttggtcagactggtctcaaactcctgacctcgtaatccacccgcctcggcctcccaaagtggtgggattacaggcgtgaaccaccgcgcccggccatcatctgccctttttattctttttctcttgttacataaatgagagtattttatgtacagtgtccttcaacttttttttccccacttgtgtatccccacaagtgtatcttgatgtttccatgttgaaacttaagggttttttgttgttgttgttgttgtttccccacagttctgctttatgatgttatttaaggttatttaagcagccgtccatttagggtcgttttcagtcttgataccacagagaatgttgcatttgataacctacatatgttgtttcatgtgtatagctgtatgtagcgggtcagtacgtgatgtggaacagcaaggcatttatgattttatacacatttgcagattgccccgcatagtgattcaaccctgtttacctcccactggcggtgaatgaaatatcctattacaccatggcatcctcaaaatggtgttattaaacatttgtatttccttaatatgttagcagaaaaatggcccatcagtctagtttttaatgaggttgtacatccttttttttatatatttgaaaaccatttgatttcctttatgtgagtttttaatttttattttatttatttatttcttattatttttctgagacggagttttactcttgtggcctaggctggagtgcaatggcatgatctcagcttagtgcaacctccacctcccaggttcaagcagttctcctgcctcagcctccctagtagctgggattacaggcacacgccaccaggcccagctaatatttttattattttaatagaggcagggtttcactgtgttgaccaggctggtctcaaactcctgatctcaggtgatccacctgcctcggcctcccaaagtgctgggattacaggcgtgagccaccgtgcccggcctatgtgagctatttatattcttggttcctttttttgtcaggtctttggtctctatttctatattagggagcccttggtgatgggaagtacaggtatttttccctaagtttgctgtttatgatttttttttacatagatctgtgtattttcttccattttcttgtagttatatctttaccactctccatcaatacataaaggaaatcttagcatcttctcctgcctttacttctctgggcctgtcctggggagttgactgcatagggcccattggatggactgagcgaagccttgaaaattagtgttgactttttaattcagcaggttgatgtactcccagttctggaagatgagggccagagacaggaaccctgtcaggcagctaagggagaagagacttgccagatgactcttgagtccctttcagcaagtcaggacctagttccctagtgagcatctcttagcgatggagaatgttcatttttccttccgagattaaaaggttgtatatatccaagtacacttgcgagcactggtcagagctgctccagatttctgtggcagttggtggggagtctgcctccttagtgagaacctagttggtgggcaggccagtgcatcctttggcccgctcctggtggggctctctccggcctggtcctgcccatctgtgctgaaggaacaagacgccttggagccccaggaaaccatgtttttggctgtctttaccttggtgaatctgttctggatgttagctctgtaaagccagtgcccaggcgggtagtgacctgtgggcatgggatggcggcggagagttagtctgcgcaggcaggttgggtccttctcctgggcccttcccgttctttggcttttcttctacgagtttatatgctgctttctatgtcctggtttggagactggtctccctcttacagagcttttcttcccttttttgagacttgccttgtccacctaggtgtgccccccacctacctgctcggagcttgaagttcttcataggaccctgttgctagggttgggcagctaggcagggcttctgggactcggggctgatggagcatcc

SEQ ID NO: 41714 - DNA, 2300 bp, Homo sapien
tagcctggtgtagtggtgcgcgcctgtaatcccagctacttgggaggctgaggtaggagaatcacttgaacctgggagatggagtttgcagtgatctaagatgcgccattgcactccagcctgggtgacagcgcaagacaccatctcaaaaagttacctttaaaaaaaaattatttgggtctgggtgtggtagctcatgcctgtaatcctgtgcttttggaggccaaggcaggaggattgcttgagcccaggagttggagaccagcctggtcaacatggcaaaaccccatctctacagaaaatacaagaattagctaggcatggtaggatgcacctgtagtcccagctcctaggcaggctaagggggaggatcacctgaacctggggatgtgaaaaaaaatttttttgaacatttttgttcttgcatgagagtttgttgtttatcttccctttattaaaaaatagaataaaagagataattgtttcttgattaagctacatgttgtagaaagtataaaaagccactcaggtaatgatttcattttgtaagtttatattctcttctcttcttttccttatagaatggacatggtggtggtcgaagtcagcagacactagacagtaagtatagcagcaagctactcttgtcatggctggtgccaaccaaacagaggaagaggatagctcacgtgatgtggaaaacaccagttggtcaatggcttattcgttaaaaagcagcccttttgcttttttgtttttggaccaggtgttggctgtggtgttattagaaatgtcttaaccacagcaagaaggaggtggtggtctcatattcttctgccctaatcagactgcaccacaagtgcagcatacagtatgcattttaaagatgcttgggccaggcggggtggctgatgcccataatcccagtgctttggggggccaaggcaggcagattgcccaagctcaggagtttgagaccaccctgggcaacatggtgaaactctgtctctactaaaatacgaaaaactagccgggtgtggtggcggcgcgtgcctgtaatcccagctacttgggaggctgaggcacaagaatcgcttgagccagcttgggctacaaagtgagactccgtctgaaaagaaaaaaaaaaaagaaagaaactacttctaaatcaaaaatttactattcttgttcaggaaagataggctcattgtctttaggacctgaaggactgttgcttagaaagagagataaatgttcactgtggacatttgggagaaaatgagaccccccccccccgccacttccaacagctcagtgattaccaaagatagtgcaggtaaatccgttaattgcttcttttctgtagttggccagcttgactgatggtttatagtagttttctttctttattcaggaaggcaaatgggtggggaagccagaaagactctttaaataggatttcctgggagtgcggatattgaacttaagcagaccgaggtgagcctcagttgaaactgtaatgacagatttggagccccaggattttggtttgacatttgctggtattgttgggctgccaaggctgtttggagattcgttggtcgttctgagcttgttggatgacagaggaacttttgactctagcagtggtagtggcaggtttcttttgtctaggcatgggtcgagaactaaagtatctgggaagcagtgtacattaacctacttttcatttcccatactctcttctccctcacttcctcctccccttccctccccattttgtttgtttgtttgagagaggcttcctgtgaagctgttagcatcataatacaaggcccagggcggtatgttttggggtcttagttttaggtgaggtgtatctgtggtgtctttatacagtttatctatgaacaaggtttatatatggaagagactgccaataaaaagaaggcctctgtaagaactgacctaggtgtaagttgaccctttcattgcttatgtttgtttttgacctgcccttcctttagagactcaagtgctttccctgggttttagaagggtcaaggttgctcctctttcctaactggaaaagacaatgatgttttatttccaagcacatatctgagttgtatgtgtggacagcactgagactgagtctttccacagctaggactgagtgtctccacatcctttctgaagcctacgaagctcatttatgtgctctgagatacatctattcaagcacataccaaggaaatgctcactgtgcatttggaagtaggtgttggacagttggactg

SEQ ID NO: 41715 - DNA, 2300 bp, Homo sapien
tttacaccccagacgcagttaaattgaacctttgtcagacttttccctctgtatattgctacttgttgattttccatcctggttttagacattagttcttgatgtgctaccatgcaatataattttcactttttttttttttttgaatcaccaccagtctcactttattttttagaaagagtttgtgttggattgttctccttcctaccttaaatatttagtagcattcaccagtacagctgtctgggccagaagttttctttgcaaggagttttgtaattgtaaattcaattccttcaattggtagagggctattcagactgttttttttttttttttttttttttttgagctggagttttgctacagtgcccagggtggtcatgaactcctgggcgcaagcagttctcctgttccagcgttctgagtagctggattacaggtgtgggccactgtgcttcagtttcttttgctgtttgtgtatgtcaaggaatttgtccatttcatctaagttgttaatttactggcataaaacttcaatgtatttctttcctgtccttttaatgtttctgagatctatagtggtattgtctcctttatttatttatttgttttgttttgttttgttttttgagatggagtgttgctctgttgcccatgctggagtacagtggcgcaatgtcagctcacatggtggctcacacctgtaatcccaacattttgggaggctgaggtgggtggatcacttgaggtcaggagtttgagaccagcctggccaacatggtgaaaccccatctctactaaaaatacaaacattagcctggtgtagtggtgcgcgcctgtaatcccagctacttgggaggctgaggtaggagaatcacttgaacctgggagatggagtttgcagtgatctaagatgcgccattgcactccagcctgggtgacagcgcaagacaccatctcaaaaagttacctttaaaaaaaaattatttgggtctgggtgtggtagctcatgcctgtaatcctgtgcttttggaggccaaggcaggaggattgcttgagcccaggagttggagaccagcctggtcaacatggcaaaaccccatctctacagaaaatacaagaattagctaggcatggtaggatgcacctgtagtcccagctcctaggcaggctaagggggaggatcacctgaacctggggatgtgaaaaaaaatttttttgaacatttttgttcttgcatgagagtttgttgtttatcttccctttattaaaaaatagaataaaagagataattgtttcttgattaagctacatgttgtagaaagtataaaaagccactcaggtaatgatttcattttgtaagtttatattctcttctcttcttttccttatagaatggacatggtggtggtcgaagtcagcagacactagacagtaagtatagcagcaagctactcttgtcatggctggtgccaaccaaacagaggaagaggatagctcacgtgatgtggaaaacaccagttggtcaatggcttattcgttaaaaagcagcccttttgcttttttgtttttggaccaggtgttggctgtggtgttattagaaatgtcttaaccacagcaagaaggaggtggtggtctcatattcttctgccctaatcagactgcaccacaagtgcagcatacagtatgcattttaaagatgcttgggccaggcggggtggctgatgcccataatcccagtgctttggggggccaaggcaggcagattgcccaagctcaggagtttgagaccaccctgggcaacatggtgaaactctgtctctactaaaatacgaaaaactagccgggtgtggtggcggcgcgtgcctgtaatcccagctacttgggaggctgaggcacaagaatcgcttgagccagcttgggctacaaagtgagactccgtctgaaaagaaaaaaaaaaaagaaagaaactacttctaaatcaaaaatttactattcttgttcaggaaagataggctcattgtctttaggacctgaaggactgttgcttagaaagagagataaatgttcactgtggacatttgggagaaaatgagaccccccccccccgccacttccaacagctcagtgattaccaaagatagtgcaggtaaatccgttaattgcttcttttctgtagttggccagcttgactgatggtttatagtagttttctttctttattcaggaaggcaaatgggtggggaagccagaaagactctttaaataggatttcctgggagtgcggatattgaact

SEQ ID NO: 41716 - DNA, 2300 bp, Homo sapien
aaacgctttattaaaaccgtttgaaaaatgaagttggatctctatgccaaaatgccagtgggtcagatagttaaacataaatagtgaatctagaactataatagagaaaacacaggagaatttttttgttgttctgtgtgagggagacctttctgggtatggcagaaaacaccaaattaggcagacaaacaatgaaaaaaatactcaaaatttgtatcatagacaaaaagagttaatttccttaatataaaaagagtaaaaataaagcagatcaacaaacaggttaaaaaactggctaaagagataagaacagtctataagtaaagaacacttaagtatatgaaatgatacttagcacatttgtatcattttagtttgtattttttaataccattttccaccaattaaaccaggagattcaaaagtgtttgatattagagtgtgttaaaaaggatgtgttctatctgtggacagtaattttataatatttatcaaaattcaaaatatatttaccctgtgaaggggcaactttatcctaccagttgatcctacaggtatacttgtacttgcacaaaatatcttacatacaaatgtattcattagtgcattgcttttaatagcataagatttgacctaaaagtccattaatatagtactggttttataaaatgatacctatgtgtactagatttctgtgtagtcaccaaaatgagtatgaagtagctctttgaacattaatgtgagacactcaatggaaattaaatgatttgtgagacagtaaggtatatagtgtgtgtatatatatgtctgtctgtctgtctgtctatatatattgtgatatagtatctctgaaagagacattcaggaaaaccgggtacagtgtttgcctttgtggagcaagtatgggagagtggtgtggaagagaaacataatattcgtcatacatattcttgtatctattggattttgttttttgtttgtttgtttgtcacccagtctgtcacccaggctggagtgcagtggcgccatctcagctcactgcaagctccgcctcccgggttcacgtcatagggcctgcctcagcctcccgagtagctgggactacaggtgcccaccaccacacccggctaatttttttgtatttttagtagagatggggtttcaccatgttagccaggatggtcttgatctcctgacttcgtgatctgcctgcctcggcctcccaaagtgttgggattacaggcgtgagccactgcgcccagccatcttttggattttgtaacatcatatatatatatatatcaattagtccaaaaacttaataagtttttttttttttaatttttggatgaagacatggtcttgttttgtcatccaggctggaatgcagtggtgcaatcatagctcactgcagccttgtactcctgggctaaagcaatcctcccacctcagcctcccaaagtgctggcattataggcatgagtgactgtgcctggctcaaatttttaacagttatgtagaaaatccataaaataataaaagtatgattctctgttagctaatggtcaggtgtgtatagcaccataatattgttctcacgagttcatcactccctatgcttaaacataaaccaaatctctctggataggaaacaaggtgtgtacccatttaggaacttttcccgtttatcataaatgaagtgttacacatagtgtgtgtaaaacctaagaaattcaactggaaatgatttggagaaattggtggtaatagaacacttcatgttctattgaagaacattgtgaagccattatgcctcattaattgctgcttactttttttagacttcaaatctcaacctgagccatccccagttcttagccagttgagccagcgacaacagcaccagagccaggcagtcactgttcctcctcctggtttggagtcctttccttcccaggcaaaacttcgagaatcaacacctggagacagtccctccactgtgaacaagcttttgcagcttcccagcacgaccattgaaaatatctctgtgtctgtccaccagccacagcccaaacacatcaaacttgctaagcggcggatacccccagcttctaaggtgggcatttcatcatgaagtcaccgtcctaaagctggaattatttttacattcagctctagtgggatactaagttttggaaactggggtacagtgtttttcaagcacatagcttattgattgcataataaggatatggccatttctgagtgaccagactagtattagagggaatgggtttgtg

SEQ ID NO: 41717 - DNA, 2300 bp, Homo sapien
gagttcaagtgattcttctgcctcagcctcccaagtagctgggactacaggcgcctgccaccacgcccggctaatttttgtatttttagtggagacggggtttcaccatattggctaggctggtctcgaaatcctgacctcgtgatccgccagcctcggcctcctaaagtgctgggattacaggtgtgagccaccgcgcctggcctaaacttttttaatggttgctattttcacttttgtagacctgtttttttttttttttgacagaatgaacttaatacattgtattctttggtttcttcatgtaccatttatttagatcttctgaaactaatacagatctcttattttatttgagttctactagttttactctgctagattacagaaaaggaaggaacttatgggataaccacattcttagaatgtacactgaaacaaatgactgaagagcatttatttatattctagttttcacactaaacacctttgaaagtggtttcaaagtgtagtgatctggaaagataaaagactggttacatatgataccttagaaatgaaggcagttttgaacctaacaggatcaatctcatgctaaatgagatggtgatgagatttcattgtagggaaataaaaatgattaatgattatgtcttatagtatattgttttgagattgtttggagtttgttgttaaatgcacatattctctattgtatttatgattcagtgaatttactgggatcattgtcatgaaattcaacttggctatagtctataagggagaggaactcaggctaggaactttgccatgtgtcaggaatgagtcttgaattgtcctgtaatctgcctgtcttattggcatggtgagaatgtcagttaggagaactgatgggaactggcctttgaaaggattcaatggcattcattacaaggttaggtaatacggtgcatctggcaggtcctactacactaggtaagtttagaaaagagttggtacaggaagtttgtagctcattgttgtcaggtagtccaaattggaatatctgtctggggggtgttttaagagttctggttaacagtatatttgttattatactgtgcatttattcctgaatattttaaagataaaattatatgggcgtgtgtgtgtgtgtgtgtgtgtgtgtgtgtgtatatacacacacttaaatgtattatgggatagaatgtaaaaatttaagataaatatgaaacttggccaggtagggtggctcacgcctgtaattccagcactttgggaggccaaagcaggcagctcacttgagagcaggagtttgagaccagcctgtccaacatggtgaaaccctgtctctactaaaaatacaaaaattagctgggcatggtggcacacgcctgtaatcccagctactcgggaggctgaggcacgagaatcgcttaagcctgggaggcagaggttgcagtgagccagggtcacaccactgcattccagccttggtaagagagtgagacactgtcttagaaaaaaaaaaaaagtgaaacttattgaattgcttactgcaggtgaggtcttcattccctagaaatatggatttattaggaactctggttttaggtaataaatgggtaaaatattctaggtaaaatgaaccaaacttgagaaaattgtttaattttactttattgctccaggttttcaaatcagtttataatgtgttagtcattactttgaaaatttctcaatacaccttttgattctcttctctgcaaaaccctgcttcagtctctgtggcttggtatgttcttttgtgtggatgatgccctccttttgcccccttaaaccccattttccaaaggttctcctcatttgatttttaatgtaaattcactatatattgattgacttctcacattcatttgttggtaagatttgcttatgactggttcctcattgctttttgtctgcttagcattgatctggtagccttgctccagaagcctgttcctcacagtcaagcctcagaagccaactcctttgaaacttcccaacagcagggctttggccaagcccttgtcttcacaaattcgcaacacaacaatcagatggcaccagggactggcagctccactgccgtcaactcctgttctcctcagagcctggtaactcacttttatttcagtgtgggattttaagaaatatacccattagcaaatgtattctagaatatgatacatgctttataattactttctaaatataaaaatatctacagtaaggccgggcatgatggctcatgcctg

SEQ ID NO: 41718 - DNA, 2300 bp, Homo sapien
tggtctccatctcctgaccttgtgatctacccgcctcggcctctcagagtgctgggattacaggtgtgagccaccgcacccggcccacactccctgattttaagaactgctctaacactgcagtaagcaagacacataaatcaatagcatagtagtttagaaataaacacatatacatatggctaattgttttttgtcaaagattatgaggcaattcaatgccatacattatactgtatacaaaaattaccctccaaggttacacttaaacatgaaacctgaaagtacaacttacaaagaagatatagtggcaaatcctagtgattttaggttaggcaaagatctcttatatagaatccgataagcctgagtcataaaagagaaaattgacaaagtacattttatcaaaaattgtaaaattcttctgaagagaaaaatgaaatgatagaatgagacgtagtcttggagaaaatgtttatataaaatccatatttgataaggacttatatacaaaataaataaagaactctcacaattcagtaataagaaaacaaccccctaaaacaaatgagcaattaaaaatggggggaaaaaatggaagaagttctagaaatggatagtaatgattgtacaacattgtgaatatactctgtgccactaaattgtacacttggagagggtcagaaatggtaaattttctgttttaacacggagactggtgaaggataattcctgtgactctataattattttaagataaaaagttaattaaaagcaaaatatttgcatttataagggaacatgataaatggatagcaaacaaatccgtgagtgtgctcatcattattagtcattggagaaatacaaagtaaagccacattgagttacccccattcacctattaaaatggctttaaaggaaatgaaaaattccaagtgctggtgaggattgtggaataacaggtactcatatacatgcctggtgggaaagcatacctatcatacaatctgacaatcccattcttagatttttataaaagtggaatgaaaacacatccaaacaaaaatctgtatgtgatattatagtgcttttattaatacctccactgatgtttttttttcttgcttcttttttttttaagagatgggggtctcaatttgttgtccaggctggagtgtagttggtattcacaggcgtaatcttagtgcactacaacctcaaactcctgggctcaagtgatcctcctgcatcaccttcctgtgtagctgggactacagccctgcaccactgtgcacagcttccacacagtgtggaagaactgtgtgtggaagctgtgctggcttccatggctttgaagccgaatgttgtgcaagtgttgaagcagaatgttgaattagtcaattagttactttttttaaaattttctctttcctcctctctcttttctttcatctcctcccacttattatttaaagtagcagatttcttgctgaaaagcatttagataagcaaaaccaatttgttgtagaatacagttaaaggatgtcagctgatggtgctggctgtttttccagaggcctcacagaatggtattggcttgttgataagagagttatgagtccaggactcagccttataggctcagaaacccaactgttgacagtataataaccacaaatctattcctgatatgagggaccctcaaattaaccaaactagaaagacttgtgtatactcagaaggctaatttataaattttctaaaaactggtacctgttgaacagattagaatactctctttgatgagtgagaagggagcttggtaaacatgggcgtgagaatgagaataattgaagtgatttgagtgtccaagagccatcaaggataagattcataacttgatttgcagtgacctgtaagagtatggatttcaattacatttcactatccttgggcagtaacgcagcatatacatagctttgacagtgaccatcttctctgtgatgaatactttcattcttttcatatgtttaaaccctcaattttacattggtccacagaactggcatcaaatactcacaacatagctcaggatctgtcaaacaaaagttcttatggactcaaaggtatgaatacttaattttttaatttttaaaattaagaatcttataaattgcttgcaatatctttcattttttatcaaagctagctaataaaaatttatcagataaatgtttgtaaactatacctatttatttggtaatcagatttgcagtttgctaatggaaatgttttattga

SEQ ID NO: 41719 - DNA, 2300 bp, Homo sapien
ctcctgagtagctgggattacaggcgtgtgccaccacgccaggctattttttttttttttttttgagacggagtcttgctctgtcgctcaggctggagtgcagtggcgcgatctcgacccactgcaaactccgcacgccattctcctgcctcagcctcccgagtagctgggactacaggcgcccgccaccacgcccggctaatttttttgtatttttagtagagactgggtttcaccgtgttagccaggatggtctcgatctcctgacctcgtgatcggcccgccttggcctcccaaagtgttgggattacaggcgtgagccaccgcgcccggacatttttttgtatttttaacagagacggggtttcaccgtgttggtcaggctggtctcaaactccgtatcttgtgatccgccctcctccggctcccaaagtgctgagattacaggtgtgagccaccacgcccggcagcattctttaattcagatgaataacaaaggctttatttgaactagatagggctgtttaagatgtcaattgttttacttaataactagcaaattagtaattagcatagtgccctgtacaaagttcagtataagctaatttcccctttctaccttacttagaccttttgggcccgatgggtagagtgtgaaaatgattactgatacttactgagggtttattatgtgtcaagcaggcattttacataatctcatttaattttcacaagccggtgaagtgttattacagaggaaagctccaattgagataaggcatgccgggactgcaaagtccttgtatgtaactagcttgggataaaacaggccagtaagtagaccttgagagcttgtttagaggaccttgagagcttgttaacacgggcgtgcagctactcctatatccttgacttgtcctcttctatgggggatgctcctccttttcgaccgaatatgcagcttcgggagggacgcacatggagaggtgcgggaggaaggggccacccgcctagacagccagatcagccgaatcagccctggcgatctatggggtgacaagatagccagaacgccctcacatccaaacaggccagtaaatggaaaatactttaaaacaccatgctacaattataaaccatcatcttatttattcgtaattcttggagttgacaacaggtcagatcctattgagaggaggtcattaattttctaaagacagaaaacctgggtctcttcggtcaacaaacaactctaaggttctttttttaaatccttaaatagggaaaatcctggactcaaggagttgattatatgatataacagaaataaacggctgacttggagtaggcgttcagtagattctagtcttttcacccagaaggggcttgggagggcaaaagtaaaaccgcactgaaaaagactaaaagtgggcgcaccttccgccttgccgaggctctcgctgctagccgttggcgttttcccgcgcagggggcagggcgcagagcgagcccaggaacgtgggagcggaaccccaccccccgccaggactacacctcccagcaggcaccacgctccgccacatggcgggcggcatccaatggtattagtccttcaagccagcttagtccgctttccgtcccggccttccctcggctctaaggtctctagggggttcgtctagaagcccgctggagaaaggctgcggtaggggtcgccttggctgtgcagcatgttgggagtcgtggtcccctcgtgcaacatttgggaggccaggcttgccctgagtggttggaccacatcacgtgatgagcacagggcggccacaggggagtaacctgtggtgctttgtgaggtcatcacggcgcgacgacgagctgcagttgtgggcaccttgtatgcggtgggtaatactctcctgatgactccgagtacaatacatattatcaagtctcccttatttgttcctttctgtggtccccacctccacgcggttggcttcgcggggttggggtggaggtggtggctggaagaggccgcgcgccgcctaggctgactctgaagccgcgcacgagcgacgtgttgtggctcctccttcgcccgtgacgcgaggtcacgtgacgggttgggcagcctgtgccgccgccgccgctttgtaagaggcacattggcaggtaacgagcggcggcggcggcagcgggtcttgggtcctccgagagcagcagcggtaattgccatcctctccctctccttccctcttccagggccctgagcgctgcagcgtgtgctttctaattctggg

SEQ ID NO: 41720 - DNA, 2300 bp, Homo sapien
gaaggtgactgaggagctgaaactgactgaggggctgaagcatttcggacaggagaaaggatcaggaggagacagagcggagaatggagcctcagggctacccagcggtgggaagagggtagccagagactcgtagggcggcctgggttggttgtgctgggcaggttctcagtggtgggaaagtctggccacactgccctgacttcctgactggacttcacctcgagggtgggagcggttcctgccccccacccccccacccccctgtccagcccttggagccagggcacggtttgtgacagattcagggaaacgtttggtgccagatgggaggtaaccgggttaaggcctgcactagggaggattccttcccccagcagcactggtggtcctcacttccgggtgcctgcggataggcgggctggggtcggaggtcggcggccagaagccagattcccttggccccagctcgtccacttccatccagcagtagccaaacaaccgttgaaaatggcctggcggcggccgggaaacaccagagaactatcttccaacccctagatcccgcccatctcgttccggcggtgtttccgtggcgacgctatccgaagtgcggctgcgcaagggtgacggcgcgcgagcaagggggagggggtgttttggttctagccgctcgccgtccttgcaggctctgccgtcggaaagccgctcattctcgcttccccttccctttcccggctcaagtccttcctctctctttcctttctttccgcctatcttttttctgctgccgctccgggtccgggccattttccgggccgggcgcactaaggtgcgcggccccggggcccagtatatgacccgccgtcctgctatccttcgcttcccccgccccatgtggctgcggggccgcggcggcgctgcccactatggcccggaaagtagttagcaggaagcggaaagcgcccgcctcgccgggagctgggagcgacgctcagggcccgcaggtgagggttgagaggccggcacctgggtggtgaggctgaggaaccaagatgggcttagggtccgcagatcctgcgacgggaatcggggtccagggtctgcagtcagaggcaaaacaggaatgggttcagggcctatagggtcaggactggaccctcgttaactggagggcagataggccagggcggtgaggagccaaaggggaactcaggaatgggacataatccgcgggaggcctgcattcgtggatagggcttgaaaagaaaccagaatcttggctttggaggaaggggaaaccgaagttaagggaatcggaaacaaactctggtagagtgaactctaccttccatgggccctaggaagctgggatgattgcgtccctcctggaagaaggaagtagtctccctatatgtatacccaaccctgagctgggcctttcggcgtttggaccccaaaagaaacaacagttcccaggtatcatctctatgccgccccctttggaggggaaggccttcttggacatagatatggcctctgatttcccgggggcctactaccccgttggcggttgatttttcgaattctgcaactgcctggagcgcgggcatgatgacagaggaacggtcattgatgatgcatccctggaagacctgggagccaggtctggctccttggactgtatcttccgtgctccagtgggagtacagactgagagggagaagggggctgggtagagatgcagcccatgtcggtatgggaatcactctacctctcatttccttcaatctttcactcctaaaatgtctagtaaaccttttagtctgttctattctgcattcattcccttgactttcagcccttgtaattcacattggtaagtttgactgtgagcaacatctttttaatgttggaagagttaaacgactttctggattgagattcttgttctcttgtgtttgtatttgtgttgtttgtaaattctgcagtatgagttatgagttggtgatttctgtaatacagtaggatctgttctgaagaagagtagccaaagccctgatttctaatgttgtttccacagtttggctgggatcactcgcttcacaaaaggaaaagacttcctcctgtgaagagatccttagtatactacttgaagaaccgggaagtcaggctacagaatgaaaccagctactctcgagtgttgcatggttatgcagcacagcaacttcccagtctcctgaaggagagagagtttcaccttgggacccttaataaagtgtttgcatctcagtggttga

SEQ ID NO: 41721 - DNA, 2300 bp, Homo sapien
ggccagccgtggtggctcatgcctgtaatcctagcactttgggaggccgaagtgggcggatcacctgaggtcaggattttgagaccagcctggccaacatggcgaaaccccatctctactgaaaatacaaaaattagtgggcaaccatcctggctaacatggtgaaaccccgtctctactaaaaatacaaaaattagtgggcaaccatcctggctaacatggtgaaaccccgtctctactaaaaatacaaaaaattagccaggcgtggtggcgggcgcctgtagtctcagctattcgggaagctgagccaggagaatggcgtgaacccaggaggcggagcctgcagtgagccgagatcgcaccactgcactccatcctgggcgacagagcgagactccgtctcaaaaaagaaaaaaaaaaattagctgggcaacgtggcgagcacctgtaatctgagctactcaggaggctgaggtaggagaatcacttgaacccaggaggcagaggttgcagtgagccgagatcgtgccactgcactccagcctaggctacagagtgagactccatctcaaaaaaaaaaaaagaaaagaaatcgcgagctctgctataaggtacatttggggatggttcctaggttgtgaagatgaagtaaaggaactttgagaaagagactgcagcagtgcccagtgtgcccctcttggcactgacagcccaatctgagcctagagattctcaaaggattccagactcttgcccaggggctcttgggtcatccagagcattgcggggcaagacagaattagaacagactcaaaaaagaaagctgacccactcctgacccactcactatgtgcatatctctaaagggacaggcctgaccaaataagatggagctgcctttcgcaagacattaggggttagtggtagtgccgacttgggatggcaggagaccctgcttcaatctggtctttgattcggcttggaaaacaaatccaaatctccttgttgacagaacttgagatggtccaacagagctccttggaggtatgaggcctgaggcctgaagcctgaagtgaccagcaggtaactgggcaccacagcctgaggccaatcagccccaagcaagagcatcctgcttcctcagagggtttgtttgcttgaggaaagcgaaggctggcagtcatattccttcaggatcttccaaaaatgttggcaagggtgatcctgatgaagcccccttgtttggaggccaatgccagctctaactggactggcaagccaaaaatgaccactctctttcctgtagttcagaattcccgacctgccctaatggagacgcaacctgaatccaagagtgaggcaggcagctacagataagtttacagcgtgatgactacttcataaagcacaaaagaccatgtggtttagatggcaggtcatggaaatctaaagggaatggtgaagttgcaccgtaaggggaaggtgactgaggagctgaaactgactgaggggctgaagcatttcggacaggagaaaggatcaggaggagacagagcggagaatggagcctcagggctacccagcggtgggaagagggtagccagagactcgtagggcggcctgggttggttgtgctgggcaggttctcagtggtgggaaagtctggccacactgccctgacttcctgactggacttcacctcgagggtgggagcggttcctgccccccacccccccacccccctgtccagcccttggagccagggcacggtttgtgacagattcagggaaacgtttggtgccagatgggaggtaaccgggttaaggcctgcactagggaggattccttcccccagcagcactggtggtcctcacttccgggtgcctgcggataggcgggctggggtcggaggtcggcggccagaagccagattcccttggccccagctcgtccacttccatccagcagtagccaaacaaccgttgaaaatggcctggcggcggccgggaaacaccagagaactatcttccaacccctagatcccgcccatctcgttccggcggtgtttccgtggcgacgctatccgaagtgcggctgcgcaagggtgacggcgcgcgagcaagggggagggggtgttttggttctagccgctcgccgtccttgcaggctctgccgtcggaaagccgctcattctcgcttccccttccctttcccggctcaagtccttcctctctctttcctttctttccgcctatcttttttctgctgccgctccgggtccgggccattttccgggccgg

SEQ ID NO: 41722 - DNA, 2300 bp, Homo sapien
aactcctcacctcaggttatccacctgccttggcctcccaaagtcctgggattataggcatgagccactgcgcccagacttttttttttttttttttttttgagacagggtctggctttgtcacccaggctggagtgcagtggcttgatctcgctcactgtaacctcctcctcttgggttcaagcgattctcatgcctcagcctcccacatagctgggattacaggcgcccacctagctaatttttattttgtatttttagtagagatggggtttcaccatgttgggtaggctggtcttaaactcctgacctcagatgatctgcctgcctcagcctcccagagttctgggattacaggcgtgagccaccacacccgaccttgttttttttttttttttttttttgagacagagtcttgctctgttgcccaggctagagtgcaatggcatgatcattgctcacagcagccttaacctcccaggctgaggccattttctcacctcagcctcctgactagctgggaccacagatgtgtacaaccatgtctggctaattttttacaattttattttatttttagacagggtctcatttgcagaacccaatagctgggactacagtcgtgtaccaccatgcccaactgttttttgttgttgttagagatgaagattctccacgttgcccaggctggtctcaaactcctgagctcaagagatctgaccatcttggcctcccaaagtgctgggattacaggcgttagccatcgtgcctagtcattttattttattttattttattgcgacaagatcttgctctgtcacccatgtttggagtacaccagcacaatcctggctcactgtagcctcgacctctcaggctcaagtgatcctcctatctcagcctcctgaatagttaggaccacaggcacatgccaccacgcccagataatttgagtttttgtagagacaaggtctcactatgttgcccaggctcacctaatttttaccaaactttttgtagagacgggggtctcatgttgcttaaattggtcttgaactcctgggctcaagagtcatcttattcaattaataattctctgtctcctaattccagcagacatagaaagacacagaaggccagcgccatggctcacgcctacaatcccagcaatttgggagactgaggcttgagcccagaagtttaccaccagcctgggcaacatggtgagaccccgtctctccatatatatatataaaataataaaaattatccgggcgtgttggcatgtggctatagtccaagctactcagaaggctgaggtgggaggatcacttgagcccgacaggtggaggttgcagggttgcagtgcgccaacatcgcgccactgcactccagcctaggcgacagagcgagaccctgtctcaaaaaaacaaaaaacaccccaaacagaaacaacaacaacaacaaaaacccccacagaaggcagtgaaggcttgggataggattacctggtttaaacccatagaatgtcagaattgaaggaagacttagaggtcacctttgtttttttttcttttgatacagagtcgcgttccgttgcccacctggagtgcagtggcgcgatcacggctaccgcagcctcgacctcccgggctcaagcgaccctcctgcctcggcctctcaaagtgctggagttacaggcgtgagccactgcgcccggcctagaagtcacctttcaacttagtcctctatacatgggaaaagtgaggtccagaaagggtatgagttgtaccaggtcgctgaccctgaacagaagctagatgtcttaattcccaaataggactcgctgctaactctttgggcataccttcgcgattcaaggctcttgggtttcccgctttggccgcctcgccaaacccaagtcttacactcttagtgaccccctcctttcctccttcccccttaggtcagcagggtttactcattccaattgcaatgctccatgttgccggagtagctcctcgctagaagagagattagttatgtcaccgtcggctcctcccattggtccgggcgtgtggagcgcggcgccatgacgtcagacgcccaaatgagtggggcggtgaggggaaggaggagggaagtaggacttcaacatggcggctgcggcactggcggtggctacggtgacggcctggcccggagcgggcagagttggaggtggtggcgttcgctctccctaggggctgtcgggagctcagcggggaccgagcctgggaggccggccggtgccagcacct

SEQ ID NO: 41723 - DNA, 2300 bp, Homo sapien
ttcctggtgtcagcatattctaggtgttgtttggaaaattatttattaaatcaaagactcagcctctctcaagttctttacctcaacaacagttgcttcttcaaacagctgatatcacacaatttttattgtggttatagaaatgaaacactaattttctgcatatgtctgtgagcatattcacaactcattgctggaagtttagataccgctactttcccaatttaggaaaacagatttctggtatgtgcctacgtgggaaggttgaggctgctaagagtcttgcttctgggttttagaagtctcactgtgagaccgggtgcagtggctcatgcctgtaattgcagcactttgggaggctggggtgagtggatcacttgagcccaggagtttaagaccagcctatccaacatggcaaaaccccgtttctactaaaaatacaaaataattagccgggtgtgatggcacactcctgtaatcccagctactcagggaagctgaggcatgagaattgtttgaacctgggaggcagaggttgcaataaagattgtgccactgcactccagcctgggtgacagcaagatgcctgtgaatgttttctgcacatataaaaaggttaaatcattttcagtatggtttgctggttctttgaaaattgataatacatacactttataaatttaattctccatgaactacaatatcaaacagaatacactctatctctacaccatgctgaaaaatggaaactttttttttttctttttggtaacaggatcttgctgtgtcgcctaggctggagtgcagtggcacaatcactggtcactgcagccttgacttcctgggctcaggtgattctcctacctcagcctcccgagtagcagggactacaggcatgcaacaccacaccggcaaattttttgtatctttgtagagatgaggtttcaccatgttgcccaggctggtcttcgaactcctgggctcaagtaatccacctgcctcagccttccaaaatgtgggattacatgtgtaagtcaccacgcctggctgaaaacagaaacttttcaagaaaagttttaaaagaaactaccaaattaatagatgttaccatataacgttcagaaatacaaatattttatgaattatttccagtcctattacttggaggcaaccattgtaaatattttttatgtacaagttgagtatccctcatctaaatccttggcaccagaagtgtttcagatttcagattttctaactttttgcctcatacttattggttcagcatccctaatctgaaaaaaatgcccctgtgaacattgagttttgtcttgtctccctcccctcccctcctttcctctcctctcctctcccctcccttcccctcccctccccctcccccttcccctcccctcccctcccctctcccctcccttctcctctcccctttcccatctccactttcccctctcccctcccccttccctctcccttccccttcccctcccccttccctctcccttcccctcccccttccctctcccttcccctcccctctcccttcccacctcccccctctcccctcccctcccctcccttctcccctctcccctctcccctcccctcccccttccctctcccttcccctctgctcccctcccacctccccctacccctccccctcccctcctctcccctccccttcccctcccctccccctcccctctcccctctcccctccccttccctccccctcccctcccctcttccctccccctcccctcccctcccctcccctcccctttcctctcctgccctctcctctcttttcttagacagggtcttgtgctgttgcacaggctagagttcagtggcaccttcttaactcactgcagcctcaaatcctgagcttaagtgatcatctcacatcagcctcccaagtagctaggacaataggcatgcgtcaccacgcccagcgaatttttgattttcattaattaattatttttgtgtgtgagacagggtctcgctctgttgcccaggctgtagtgcagtggctcactgcaacctcaatctcccgggcacaagcgatcctcccatctcagcctcccaagtagctgggactacaggtgtatgccaacacacccagctaattttttcaattttttatagggacagggtctccctatgttgcccaggctggtctcgaactcctgtgctcaagtgatcctcccagctcggcctcacaaagtactgggatataggagtgagccaccaagcctggcctcggctaattttta

SEQ ID NO: 41724 - DNA, 2300 bp, Homo sapien
tgggaatagacaagtcatttttcctttcatggaatgagcacaagcctgtgtatttctggaggttttgcttcctgaggtcccagcaggtttgagggaactcatcttcctagagaagcctgaaagggggtggtttgcagaaaaagaggactctgtggaattgcaggtaagtggtggacacgaactcctgagttggcctctctccaggaagcagtgtgggccctgcataaacacagtgcacttctgagactggcgtctctggcctgtcccttacatggggctgtggtgatttccaaaaggcttcttctgatcatggaatgttgggtgcatgcttacatcctcagagaagacactgttctttctcgtttgttttttaaagacagagtctcaccctgtcacccaggctggagtgtaatagtgtgatcatggctcactgcagccttgaactccagggctcaagcaatattccccgcctcagcctcccaagtagctgggcctacagacacgcatcaccatgtctggctaatttttttatttctagtagagatgaggtcttgctctgttgcccaggttggtcttgaattcctgggctcaaacagtcctcctgcctcaacctcccaaagtgctgagattacagatgtgagccactacaaccagccaacactgctctttttcattcaggtacagagggatatctcatgctgaaacagaatgttcccttttcctcttattctatcccagataaagaaataactcccaatccttgtaatacttttctttggtttttgttttcccagaaagctatagaaaaggaattgcagaacatgtgaaaatacacatttaacataaaatgattatttacagggtcaaagaactaaagaaaggcattaagtgttgcacttcagttaccagtcgaaatcggacatctggaaactcctctccaaaacgaattcagagctcccctggggctttgtcagaggacaaatgttctcccaaaaaagtcaagctgggatttcagcagtcactcacagtggcagcccctggttccacgagagggaaggtccatcctctgaccagccacccacccaacattccttttacttctgcacctaaggtctctggtaaaaggggtggctccagagggagtccttcacaagagtgggtcattcatgctagccctgtgaaaggaactgtgcgctctggacatgtggccaaaaaaaagccagaagagtcagcaccattgtgctctgagaaaaatcgaatgggcaacaaaactgtccttgggtgggaaagcagggcctcaggcccaggagaaggcctagtgcgtggtaagctgtccaccaagtgcaagaaagtgcagacagtgcagccagtacagaagcagcttgtgtctcgagttgagctctcctttggcaacgcccaccacagggctgagtacagtcaagacagccagaggggcacgcctgctaggcctgcctctgaagcttggacaaacatcccgccacatcagaaggagagggaggaacatctgcgtttctatcaccagcagttccaacagccacctctcctccaacagaagttaaaataccaaccactgaaaaggtctttacgccagtacaggcccccagagggtcagctcacgaatgagactccgcctctgttccactcttactctgaaaaccatgatggagcccaagtagaggaacttgatgacagtgatttcagtgaagattctttttcacacatctctagtcagagggccacaaagcaaaggaacaccctggagaatagcgaagactcattcttcctgcaccagacgtggggacagggtcctgagaagcaggtggcagaaagacagcagagtctgttttctagccccaggacaggtgacaagaaagatctaactaaaagctgggtggactccagggaccccataaaccacagaagagcagcactcgatcacagctgcagcccaagtaaggggcccgtggactggagcagagagaactctacttcctcagggccttctcccagagacagcctggcagagaagccatactgttcacaggtagatttcatatatagacaggaaagaggtggaggctcttcctttgatctcagaaaggatgcctcccaaagtgaggtttctggggagaatgagggcaacttgccatccccagaggaagatggtttcactatctcattgtcccacgttgcagttcctggatccccagaccaaagagacacagtcaccacacctctgagagaagtcagtgcagacggcccaatccaggtgaccagca

SEQ ID NO: 41725 - DNA, 2300 bp, Homo sapien
atgagctagattttctatatgtactgataggaaagatgaccaagatctattgtgatgtgaaaaaagcaagctgtagaacaaggtaataatgtgattgcctatatgatttctactattacgcagccacacagggaaaaacgtttaaaaagatgcagaagaaacagcattggatctatttggaagtaacaatgggagtaaaggtgaaactgcaacttttcatgttaaaagatcatgtactgtatgaccactttctgtttttatcatttttaaaatgtgcgacatggaaaaaaacactacacaaaaaaatgacataaatgttaactatgattattcttagtggaacaaatagggtttttgttttgttttgtttttctgtcatgaaagtgtgcctctttattaacaaaaaactccagtagatgttaaatcagcattcataatggctgcggaagagtggcatgggagggtgtacctaggtataaacagctgtgaagacagttgtgggtgtcctgggttctttttcgccttgtgtcctgtgcacagtggaagacagacaaggtagagagatgtctaggagaagatttttttgtatgctgcaggatgaagccagccccgcacatgggcagagttttattctgtgcagctagagtagcggctccatagtacttgggcagaacctgtaaaaacatagttccttacccatcacagttggtgatctgtaggttaggtcttctcaaacatgattttaaccagggacccaggaacctacttataggtggttagtcctgattctggcattggctctgttgctttttacttatttatttatttatttttgagagggagtctcactctgtcgcccaggccggagtgcagtggtgtgatcttggctcactgcaacctccacctcctgggttcaagcgattctcctgccacaagcccctggagtatctgggactacaggtgtgtgccaccatgcctcactaacttttgtatttttagtagagacggggtttcgccatgttagcgaggctggttttgaactcctgacctcaggtgatctgcccgccttggcctcccaaagtgctaggattacaggcatgagccaccgtccccagccagctctgttattttttaagacaagttccccatttccagaaaatgtgtttctttttaattaaaacataagaattccaattgtacatacaagtataaagaagaaagtaaaagataaagtcccagacctcagtgataaccacacactgctacgttagtgaacttccttctagtcatctctctgcccgcatagcctcatatggatctgcttacggagttatggagtcatacacctttttccctcgaagatagaagctttagatatctttctgtgttcctaagtacaggtataatcatttttaatggttttattatattcagtgtataattatttagtttgttccctgtttatagatacctagatttttactaaatattactattataaataatgtaatgaatatcatatatactttttttggtcaattgggcaattatctccttaggataaagtcctagaagtgtgattgccaaaccaaaacatactttttcctgtttttgagacaggttcttgctatgttgcccaggctagtcttgaactcctgggctcaagcgatcctcctgcctcagccttttgagtagctgggactacagacaggtgagtgccactgtacctggcttctttttacattttgatacatattgccaaactgccctctggaaagcttgtccagttcatggtacatgctagcgtagaagagtactcatttccctggaccctcaccaaggaatggcatcgttagtctcttaatctaatgagttaaaaatattggtttttttaatggtttgtttgcattttttggattagtgatgtggtgagtacctttttctgtgtttattggccatttgtattttttcttttgttaatgttaattacctttttgtggacagaagggaactatggcccagcatcctgcacctagtaagtagtcagtatgcactttgttaattgacttcactcattgacctgccttctgttttggacaggtcctgaaggactctttcatcggcaatgccaaaacctgcatgatcgccaacatctcaccaagccacgtggccactgaacacactctcaacaccttgcgctatgctgaccggtaagtcagctcccagatggcaggttgtgtgtaagtgtgcatgtgcatgtctgtgcagcacgcgtgtgtgagcatgtgtgcacgcgtgtg

SEQ ID NO: 41726 - DNA, 2300 bp, Homo sapien
taccttaggttgccccaaggacacactctgaataactaaagattttcattaacaatataaaaccacaaattttaaataaaatgctatcttagcagtaatgtgctacactaagaaaaatgtaatatgcatataaagccctggatacagtgctttgtacggggtgaacactcaataaatggtaactactactttcagcagctaaaaaaaaagtctgtatggtctttggaaggctgagagtgtgtggtctacctgacatcaactacttgacttgagagtagagccacaggaattttaatctaattcaattctttgattttccagatggaaaaaatgaggtctaaaggggctagattcaggcgttcaaggctgcggtgagctattatcatgctagtgcactacagcctgggtgacagagcaagacattttctctaataaaaaaaaaataataataataataaagggactaaatgacttgcaaagccacccacagtgaattagagacagagacagagccaaagccaaacccacatgtagtgggtttccactacatgtcacagctataaggtagtgtttcaaacttttataaaagggtaacaagaacatagctgctgtactgaactttttcactccttttattaaggccaccagtgagctatgaatttgatataaggagcaatcacaccaacaatcaggctgtgaatatataatccatgagttaacaacgaaacagtcttaggaacgcaattctatcatagacacctgatgaatagatggagttcacctgagcagctgttatatgcacttcaatagagagactacaaagcctctctacttgtagaatacaagtacaaagaagatgctttaaaacattttccaaagcacacttaaaatgtgacaatagctgccggtcactaagaagctaaagggagataaattatcttggcatacagcaacagaatggtttattttaagcaaagactaaaaggagtctaataaaattattgggagaccaaggctaaaagccacagatgcaggaagagttgcagcaaccaatccaaaaaagtttagcctttcacaaagagtagaaaggccagctgtggactgtgtgtggacttttaggtccttttgcattgaagattagggtggcctccccctagcctcgaaataaaaaatcgtctctgaagcagagagacaacaaggcagggcatgaagaggaatccaatctatttcttgtaaattaaattcaactcaacaaatatttcctgaaaatctactatgtgcaagacattgtgaacgatgcttgccttacctcaaaggcttcaaaattttatgggaaaagggaagcgaacgggcttcccggaagtaaacaacccaagggcgaatagaaatgccctaaaagaggtgccggtcaggcttatcggttcaaaagcaagaaggctttgggactcaagagtttagtctcccaaagtgagagaagtggcgttcaagataattgctgaagaaaaggcagagatatggggatgaaagataggaaagtaggtgaactttaggaagagccaagaggggccaactctcggttccctcacaactgccagtttcctcccgcgctcagccgacgtcacgcgcacccgtgtccgcgggcaggcgccacggttccggaccagacctacccctcctctattctccccgccctttctcacctcggtccaaactcctcggtctgccctgtctgagaagaggagaagacaatgccgtcgggagtgagccccaaagcccgcaacctaacagtcccgtcaacccgggagccaccggcggcggccaggccgcatctccatggcaacgccgccaagcgccagttcgaacgcccgcgctgtggcccgcgcgtcgccagtcccgcaccgcccaccaatgggcatccaaggaatcggttgacgttcgttgacttctcctctggaagaccaatcagaggtctgaagaaaccgtgggcgtaactctcaatttccgaccttcagccaatcgttccgcttgagggaagatctcgcgacgtttcagtgtgagacgcgcacctttgaggcgggtcgaagatccttctgccgaattctattgatgggcccaagcgtaaccaggctcttctgattggccggtgtacttcagtttccgtccaaggtccgcctcctacctccttctgcttcgggtgagtacccttaagggcccacttgattttagttctcagtggaggaaatgagccttggagcgatgggaatctgcctctggcaaacctctggtcgctgcagggcccg

SEQ ID NO: 41727 - DNA, 2300 bp, Homo sapien
gctcactgtagcctcaaccttccaggctcaagcaatcttcccacgttggcctcccaagtagctggaagtacaggtgcatgccaccatacctggctaattttttttctattttttgagagacaaggtctcactgtgttgtccggactggtctcaaactcctgggctcaggcaatcctcctgcctcagcctcccagaatgctgggattaaaggctcgagccactgaacccagcctcgacctcattttttttaatgacttcatgctatttcatcatatagatatactgtactttttgcctattcccatattgatggatatttgtttctggctcttttcctttttgatattgcaaacaaagttgtagtgaacattgttatatgtacatcttttttttttttttttttttgagacagagtttcgctcttgttgcccaggctggaattcagtggccccgtctcggctcaccacaacctccacctcccgggttcaagtgattcttctgcctcagcctcccaagtagctgggattacaggcgtgtgccatcacgcctggataatttttgtatttttagtagagacggggtttctccatgttagtcaggctggtcttgaactcctgacctcaggtgatctacccgccttggcctcccaaagtgctgggattacaggcatgagccactgtgcccggcccgttgtgtgtacatcttaaacctatatttcttatgtgagagtggctagaaatggaattgctggctcttagggaatgtgcattttatgttttgataattattatcaaatggccctcctaaggggatatgctaatttacttttctaccaacagtatatgagagcacagaccatttcagaaatcccctttgagattatttccagtccttaaaaacttttgttacaggtttagaaaagcttggaaaggtcttggtgttgggtgtttggtttttggtgagaaaccgctattctctagagtaacattaccatctgttggcagtcttgagaattgccctggagtaggtttctgtttgggcctgatttttatgcctttgatagctgcaaattcatcttgattgagcaccagcaaagggactgtggaggatagcagctcctgctccagctgccctctctgcatcagctgtgcaacccccgggcaccagcaatgtcaggcaatggtggcatgtgcctgtattgccagctgctcaggaggctaaggggggaggaccacttctttttttgagacagagtctcactctgtcgccaagctggagtgcagtggcccgatctcggctcaccacaaccgtaacctccgcctcccgggttcaagcaattctcctgcctcagcctcccgagtagctgggattacaggtgtgtgccaccacacccggctaatttttgtatttttagtagagacagggtttcaccatgttggccaggatggtctcaatctcttgacctcgtgatccacccagggagaggaccacttctgtttgggagtttgaggccagtctaggcaacatagtaagtccctgtttcttaaaaaaaaaaaaaaaaaaaaaaaaaaggataaaataaaagactaaaaaaaatcagactgggcatggtggctcatgtctataatcccaacacattgggaggctgaggtaggtggatcacttcagcccagaagttcaggatcagcctgggcaatatagtgagaccctgtctctaaaaaaaaaaaaaaaaaaaaaaaaaaaaaattggccaggcatggtggtggcatgcctgtagtcccagctacttgagaggttgaggtgggaggtttgcttgagcctgggaggtcaaggctgcagtgagccatgatcacaccattgcactccagcctggtcaacagtgctagaccctgtctcaaaaaaaaaaaaaaactcaacgaaatatttttttctatatgaagttactctctgtagatgacctctctgcattgtcagaaaccacactgctggggggttctgtgcttcaggggctcaggatatgggctgggggaaatggggttacaggtttgacgataaaacttgtactgcctctctcccattcccaacatctctcttgtttcagtgcgtttgcttctgaggatctccagtgtcacaacaaacacatgccagccctgttttacagggagccctggaggagttgggatagaggccacattgactgagggtagttgccagggtcctgcagttatacacaaaggtcagtctctgattcctggatgccttccattggtcctgggcatgctgcctttttctgtgggcta

SEQ ID NO: 41728 - DNA, 2300 bp, Homo sapien
tcaggcctctatcaaaccccttcaactgagatgcaatttttctcaaagtcacccttccctgggcccttccaaccccatcatctcagtacatccctgagtgccctcctgacacagaacagtagccttatatccagctgctatcctcctcccctgaatcccagagcccaaacggatgggtccaccctgcaatgcaggcaggagccatctactttccaccccacgaagaccctccagctaacatttcttcagtatgctcccaaacttagatgccctcccactcatcagaggacccagaatccttccttccacagtcaaagacctatccctacacccaaagctcttgatctctgcttccaggagtccccatcacagcctcccaaaagcctctctgtgctcagacacccttgctgcacaaggtgtgtcccccattccaagtccaactggtcaaaacataattttggagggtctcatgacaaagaaatttcaagttgcaaaacaaagccctgtttctctgcccctcagggagcgagaaggggccattctaaaatctctgtgatcttcagtatttttatttctgcatcaaatagatatgaaaccagctgggtgcagaggctcacacctgtaatctcaccactttgggaggcagaggcaggaggatcacttgagcccaggaattcgataccagctggggcaacataaagagaccccttctctacaaaaaaatttaaaaattagcagggtatggtggcacacacatgtggtccaagttactcaggagcctgaggcgggaggggatagcttgaaccaaggacattgaggctgcagtgagctatgttaacgccactgcactccagcctgggcgacagagcgagaccctctctcaaaaaaataaagaccggacgcggtggcccacacttgtaatcccagcactttgggaggccgaggcaggtagatcacctgaggtcaggagtttgagaccagcctgaccaacatggtgaaactctgtctctactaaaaatacaaaattagccaggcgcggtggtgcgtgcctgtaatcccagctacttgggaggctgaggcaggagaattgcttgaacccgggaggcggagtttgcagtgagctgagatcgtgccattgtactccagcctgggcaacaagaacgaaactcaaaaataaataaatataaaaataaaataaaataaaaaagaaatgaaacctcagagtcttgcccagcccccggggagaggggcatggcggggcacacccactttcccgcagcttgggcatttctaactaaaggctgtaacttaggaggaggggctggaccctataaataactagtctgggggtagcggtctgggaggcgggtgacgttgcaaaacaccgagcagaaaccggtcttctcagtccctgacctcggacaccgctggtttggtccggtgggaaccgacagcttggactcgcggcgggttggaactacagctccctccgtggggccctcgattggaagcacctgcattgggagctgagatactcgcggaattccgccaccacttttccgtatggaaagctgagggcttgtgagagcgttataccgatatggcctccacctgtccaaaccgggaaggaaggaattccaatggccagctctgctcctttaccctgcagctctctccctctcatcctcattccaaacctagcctagaggtgcaagaaccccaaccttccgcagctgctcctttctgcagaactacatgtcccagcaggcctggggccgagccccgcccgcttgcgggttagcagtggcccaggaggggcgggcccgccggcgggagtcggagccgcggggcgcaggactgagcaagcctgaaatgccaggggcagagcacagagcggtgggaggaaggtggggctgaggggcggggccacagatccgcctgataacctgggaggaggggtcgaacgtcaagggcagggctggactctgaggcccgagacgagactggatgactggggcgtggccgaggaaccccagggcgggacccgaggaggggctgtgccctgccagacagagccccgcgcggcgcggcggcagcttcactctggttcaagcgcaggggatcggcgggaagctctttcacccccgcttctgccgggctgtaactgcaatgggtgagcccagcgggagggctgtggggggcggggggctgctgaaggagcacgattcctgaactttcgctcccaccgatgaatgggtggagcgagcctgaacacctgggcccatcccacggccgcgatt

SEQ ID NO: 41729 - DNA, 2300 bp, Homo sapien
gtcacacagataataattgtaaaactgaaatttaaacacaagcagtctatctgcagagataggtatctattaaccaagacattatattgtcttctggttaaggtgctgcaaagatatggaagtgagatcatggggcactggaagaggaagtagattcaagttatttatctatttattgagactgagtcttgatctgtcacccaggctggagtgcagtggcatgaccttggctcactgaaacatctgcctccctggtttgagctattctcatgcctcagccccctgagtagctgggtttacaggcgcacaccaaccatgcccaactaatttttgtattttagtagagacaggattttgccatgttggccaggctggtctcgaactcctgacctcaagtgatctgcctgccctggcctcccaaagtgctaggattacaggcatgagccaccttgcctggccagattcgagtgattttgaaggaggcagaataggcaaaccttagagcctagagtagaagatgagagagagggaggaattgggaagaggctccttgtccaggctggctgattcaaaaagggtagtggcaggatgaaaagtggctggcacagtggatccagactaaactcagaaggttgccttagatgggacatgggctgcatctcagtgtttaagacaagtgtaggcccggctgggcttggggtctctggcttgaggacagtctgtgagggtcagctttgtgctgggaatcggaagagaaacatgtaggggatctcagatcctggagtagagtaagaagtaacactatttgacatctccacccctattatccagcagacaaatgcagcccaaactacctgggcagtgactggtacaacacatggaggatggaaccttacaacagcagctgctgcaacaagtataccacctaccttcctcggctgcctaaggtatctgttgcacccagcacagacgtctggggactgggacacgcataccccaccacctcccaaactacagtgactgatatttcaccattaggtcctcattgctttcccaacaaatgccccagagctcttccgcatctgtgaaactagagtttgtatttttttttttttttagatagagtctcactctatcacccaggctggagcgcagtggcgcaaccttggctcactgcaacctctgcctcctgggttcaagcaattctgctacctcacactcccgagcagctgggattacaggcatgcgccatcacatctggctaatttttgtattgttagtagagacggggatcttgccatgttggccaggctggtcttggactcctggcctcaagtgatccacctgcctcggcctcctaaaatgctgggattaccggcatgagccactgcacctggccgggtttgaatttttttagttgaaaaaggaacccaaaagtagggctgtgctgggcccctggctctcaatctctggggattgggtgccctgggctccaatccctggctgggctctgtagggacatgactggtgtgcactccttgatatactacctttccgaagcttgccagctggcccctccccatatagtctggcctctgtgatactggggctagccaaggagtcagtgatacaatgaatctccctgctccaccttctcctcctttgtgatgtgagcacagacggaaggagaaagactaaggctactcaatagcagtgcagatacaggagagtcttccaaggacataggagaaggtccagccacggccgcaaactcaagggcacctgagaggacccaaaaccagagccggggctcttaactgcaggctgatggctgaccctgggttgatggaacccttttgaattagaacttcctcaagaatcgaatctttcacaagttctccggaatgacaagcaatattgaaaaccccctattagagagacacccagacacagctaaacagagtcagctagacaaagaggggtaaaatcaaaggcaaacgctgagacagggttgtcacaggcccaggagccaaaccccatccaccttcagcccttcctaccccaccccgcccctgttggcgatgtaaaagcgttgcccggtgacagccgccaacacagagccctggagaggtggggagctgctgaagggcgggagaagttgcggcgtggcgataggtctgggtgttctgggaggacccctaaaagggagcagctctgccaggtcagagcttgaggtagcatgtgtgccgcttccaggaggccaggatggagacagcagttcgaggaatgcccttggaatg

SEQ ID NO: 41730 - DNA, 2300 bp, Homo sapien
ggcggctgtcaccgggcaacgcttttacatcgccaacaggggcggggtggggtaggaagggctgaaggtggatggggtttggctcctgggcctgtgacaaccctgtctcagcgtttgcctttgattttacccctctttgtctagctgactctgtttagctgtgtctgggtgtctctctaatagggggttttcaatattgcttgtcattccggagaacttgtgaaagattcgattcttgaggaagttctaattcaaaagggttccatcaacccagggtcagccatcagcctgcagttaagagccccggctctggttttgggtcctctcaggtgcccttgagtttgcggccgtggctggaccttctcctatgtccttggaagactctcctgtatctgcactgctattgagtagccttagtctttctccttccgtctgtgctcacatcacaaaggaggagaaggtggagcagggagattcattgtatcactgactccttggctagccccagtatcacagaggccagactatatggggaggggccagctggcaagcttcggaaaggtagtatatcaaggagtgcacaccagtcatgtccctacagagcccagccagggattggagcccagggcacccaatccccagagattgagagccaggggcccagcacagccctacttttgggttcctttttcaactaaaaaaattcaaacccggccaggtgcagtggctcatgccggtaatcccagcattttaggaggccgaggcaggtggatcacttgaggccaggagtccaagaccagcctggccaacatggcaagatccccgtctctactaacaatacaaaaattagccagatgtgatggcgcatgcctgtaatcccagctgctcgggagtgtgaggtagcagaattgcttgaacccaggaggcagaggttgcagtgagccaaggttgcgccactgcgctccagcctgggtgatagagtgagactctatctaaaaaaaaaaaaaaatacaaactctagtttcacagatgcggaagagctctggggcatttgttgggaaagcaatgaggacctaatggtgaaatatcagtcactgtagtttgggaggtggtggggtatgcgtgtcccagtccccagacgtctgtgctgggtgcaacagataccttaggcagccgaggaaggtaggtggtatacttgttgcagcagctgctgttgtaaggttccatcctccatgtgttgtaccagtcactgcccaggtagtttgggctgcatttgtctgctggataataggggtggagatgtcaaatagtgttacttcttactctactccaggatctgagatcccctacatgtttctcttccgattcccagcacaaagctgaccctcacagactgtcctcaagccagagaccccaagcccagccgggcctacacttgtcttaaacactgagatgcagcccatgtcccatctaaggcaaccttctgagtttagtctggatccactgtgccagccacttttcatcctgccactaccctttttgaatcagccagcctggacaaggagcctcttcccaattcctccctctctctcatcttctactctaggctctaaggtttgcctattctgcctccttcaaaatcactcgaatctggccaggcaaggtggctcatgcctgtaatcctagcactttgggaggccagggcaggcagatcacttgaggtcaggagttcgagaccagcctggccaacatggcaaaatcctgtctctactaaaatacaaaaattagttgggcatggttggtgtgcgcctgtaaacccagctactcagggggctgaggcatgagaatagctcaaaccagggaggcagatgtttcagtgagccaaggtcatgccactgcactccagcctgggtgacagatcaagactcagtctcaataaatagataaataacttgaatctacttcctcttccagtgccccatgatctcacttccatatctttgcagcaccttaaccagaagacaatataatgtcttggttaatagatacctatctctgcagatagactgcttgtgtttaaatttcagttttacaattattatctgtgtgaccctgactgaattaattaattttgatgtgtctcagtttctccaactttaaaatggggataatagtaccatttacttcacagggttgctgtgaggtttaagtgagttagtatatgtaagacatttagaatgatgcttggcacataaaaaactattatgattattctactgttatccttgcctcacctttga

SEQ ID NO: 41731 - DNA, 2300 bp, Homo sapien
tgtgtgtctctgttggacctgtctctcctcagtctattcctgtcatagatgtgggtgtccctggtagggaagtgcctgtgtggtctgtttacagtgcagaaggcggctcagcagtgcaatgggctgacagccttggaccgggagtcagaagcctgggttctggttgtagctctggcccctccctgtgatcttcaacaagccacttgctttctctcgtcttcagtttcctcaactagaaaatgaacagcagctgaaattatgttgaagatccttttatacctgaaagagtttcttcatagaaatttctgtggtggggagggggcaatctctgtgtgtctcagtatacctaaaggttggggtggggcggagttgtgtgtctctgtagaaaggcgaaggggcagttcctatcaggactgtgtatgtctgagcacatgtggctctgtttgggattacgtgtttgtctgtgaatgtgtgtgtgtgttggagggttgtctattgtgtgtggctgtatagggtgtctgtagatcaagatgtgtatacagctgcttctgctattgctggtttgggggaggggactggaaagctgagactgaaaatcaagagggaagaggtgaggaaggcccacccctggggctgggcagtgtagacctgccaccgtgtgaagaaaaatgaaagcacagatagcctaagactgcacaggcctgtgcccacataccttatagcacaggcccaggtggatcatctcatgctaacaccccacatgtgctggtggatccactcccatggatccactcacatgctgcaggcatgcagtagactcacccacagcccactctctggacaccaatcctgggaggtgggagctggaatggggagcaatgagaggagggagtgagactgttggcttaggaagggtggtacctctccctgcatcatacccaggaactgccagctccaaaatattggggtacagctcaccaccccccactccgccaacccattcctacctcctctagtgcagggacccaagttagatgatgagaaaatgccaaacaaagggaggcaaggacagagaaggtacctgcaggacccacaaggcccatactggcccccatctgaacccacctctcccacccagatcaacatccccccaacccctgtgcccccatcatctggaccccagagccagccctcccactaccaccaccaccaccccggggctccttggctcacctttctagaacatgggtacctcctctttttgggggctcatttagactgctgcctttgctgctgacttgcagtgtgactcgggcccattgttcaatctctgtggccctgagacaccagggaaaatctccccccccacaggacatactagttccctggcaggcaagggcttccaactgaggcagtgcatgtgtggcagagagaggcaggaagctggcagtggcagcttctgtgtctagggaggggtgtggctccctccttccctgtctgggaggttggagggaagaatctaggccttagcttgccctcctgccacccttccccttgtagatactgccttaacactccctcctctctcagctgtggctgccacccagccaggtttctccgtgctcactaatttatttccaggaaggtgtgtggaagacatgagccgtgtataatattttttttaacattttcattgcagtattgaccatcatccttggttgtgtatcgtgtaacacaaataatgatattaaaagcatcaaacaagccagcctcagctccctccctggggtgtgggcaaggggcagatgggctgggaagcagacagaactggtcctctgggcacacatgttactccacctccacctgtgggttcccaggcatgccactgacctgctgcatgaccctgggtgagtcacaacccctccgaacctctgtttctcttcaacagtgagaaacctgacctagaagatctccagaggccctctgaactcttagaaattgggctcttttgataggcttgaggcaggagggggtcaggagcagggagggaattagacctcctcaccttcccagggatggggctgagccaggtgatatcacaatgggcagtgcccatcctggagggggcatcagtgtggggtgggagcaggaaggctgttggggaaggaagctgagagatcctctgcaggaggggattatagcagctaagggcacctgccaggctggaggtgtggcctgtctaggggaagggtggtcactgatgtccagcaggagcccttgacaggtagagcccaccacgg

SEQ ID NO: 41732 - DNA, 2300 bp, Homo sapien
agctgtaaaggtccttcccatccttaccctctggagcatttggctattttatgagtcattttccctagtgtccctctccacctaacagttccttttcctagatctggcctttacttgagatgagtagggaagagtagatgggactcctccaagacccaggaagctacttctggtaacagttgtcacataccaggcagtggactgggtcacctgatggccagctccatgaagctggtaggctttggaaccttggagaactcagaccttggcaaaggagtcaggagcaccactcaggcagcgtagccaaatgggctcccccagccttctgccccttactttgtagccccatcctgcacctcccacaccataaccttcagtggcttcttcttccttctgcgttaatcccaaactcctctgtctggcattcaagtccttcatgttctgagtttgtaaccagagagggtcttcggccccttagcacaggaccagacttataattagtgacatggatatttgttgaataagtggctgaataaatgaattttacttctctaacctgacctctctcttcacccctctatccagagccacacttatgctcacttttaaatgcatttttgcacacactatccctccttcctagaatgtccacctctctccaggtcatggtgtcacctaaaggaagccctctctgactgcgccatccttctgtgattgtctctcccccgccagcctttccctggcatcaagtacacactaactaccctaacatgggagttgtggttcctgaaaaacagggggcagcctcctctttttgccccccactgtctgcctcaggttgtgcagggccaggtactatctccaccaagcagcaggggcctggagttgggatccctgcctcagtccttctaggagcaagtggtttcacagtggaggcccagcccaggctgccctgagtagtaagacagggtggcctcaggggcaggacacagcttccttcccatgttctcctgcagagaagcagcgggagctggcccggaagggctccctgaagaatggcagcatgggtagccctgtcaaccagcaacccaagaagaacaatgtcatggcccgaacaaggtagaggccctccctaccccacctggaccctgccagccaggacctatttctgctggtcctgagcctccccctcttccctccctcctcaggcccagctcctctctgagaggagacagccttaacaggatccaaggtggggagggagggaagaaagtggtgggacggggcccaacccagtcccttgccaggtttctatgctccactttgccactctaactcccgaaattcttcacctaggctggtcgtccccaataaaggctactcctcacttgaccagagccctgatgagaagccactggtagcccttgacacggacaggtgtgtatgggggcttgggggtagctgggcagcccaaaggaacctgtatagcacaagtgggctgtacaggccacacctgctatattgtcagaattgggatattcttcagccagaatctctccaagggtgaattctccagggatgggaatttttttacaccagggactgggggttgaagagaggtggcagagagaggaaaggggggcctgcgttgtctgctgtcatcctgggacaactgatccaatggttgtccctaattggcctgtgatgttgtctctggacagcagaatatgatgcttaatgccccatcccctcaggaaggagccctactccctggaaaacacctggctagacttggactttgggaatatcctacaagtcagggtgatttgagtctacaaaaaaaaaaaaaaagatgagaagggggtgaaaggagtaactgctatatttagaaggaggttaaggatagcaattgattttaagggtggggctagggaacttgtctttaaaatcctgcatttgcacagcaagcacagttcgtattgagattttgctatttggaactgtaagggaggtataggatgctgcctaatgggaggtgggattgcagagagttttctatgtaatttcttggtatcactttccctctctttcctccatggccagcgatgatgactttgacatgtctagatactcctcctccggctactcctctgctgaggtgagcccctaccccttctcaccctagacaccaccgggcaggatcactgccatcccgggggagggctggggccaatgcccaagtacaaggaaaaagagggctgggcaaggctgggtggtgccctgcacagggtgggcctggg

SEQ ID NO: 41733 - DNA, 2300 bp, Homo sapien
taatccaatgatggcatgaggctaggaaaaagtcctgcaacacctctctccggtttaatattgtatgcttctgtaaaacttctttgttttggctcttagaactgtctaagcagtcatgaaagggggaaaaagcctttgtctcctgctaagtggccactaatgattctctctaccatccctcaaaaggtgtgacaaaaaggtggtgatgggtccctgccgaggcccatcttggctgctgtaatgggtaggttactcgcccaggaagctacaaagcacatctgtcagccagggggttataggcccaagggtagacctgtttctggccaccctgcctaacacagaagcagaacttcagaacttggagaactcagctctgctccagccagcacagctcagagaaatggggcatccacactttcggatttgtagcccaccttgcctccttccaattccagctcaggctccagggggataaagcgaacacagcctagacattccctctcttcccccctcactatacgagctggctaggcctccacgtctcccacccggttgcctgacagacaagcgaggtcagggagccccctgggcggtggccagcaagcatggtctcccttaggcctagcctcggtgcacccgagttgccctcccccttccattccctccgcgccagcagcgatgacatcattcctccctgactccgggaccgcggacaggcggcaggatccgcgcccagcaaggacttcaggcacgtaggcctaagatgatgggggctcttcccaaccagtgcgcacaggcagctccagcgcgaccccacttcctctcccgtcggttcccgagcactctcatctgcaccccgattccccatctggtcgccgcgcactctccttcccggtttagatgcccccagcctggtctgcctgcgctccccaccggagaacggaattcccaggttctgcaccaaccaccttcccccactgggtccctcgccccggcccagcgttcctgtccgtatatccagcggacaggcgggcaagcccctcctcttctaaaagctgattcccaatctctcttagcctgacggctcccccgccctaagcatcacaggcctctaggactaaacgcctccccacctcccatcccagacccctgggcctgccgccggcggtgccccatggcagttccctcgccagtccctgctatgggcctccactagcggtgtgcacctttgtgccccctccgttccatccgacggtgccctgcttccaccgacggtgccctccgcccttacaggtccctttgctctcatccagcatattctcccacggttttcttgtcctgcaagtccccgtcccccggcaatacgttttcagggatctctttgccccatccgatggcgcccctccgcacgatccccccggcctgattccctccctccccctcaagcgacgccccctccggccttggcctgcccgccgcccgccccctcaccagcggctgcatctccgagtgcgcggtgggcacctggaaccggtcgatctcctccatcatggtgccggcgggcgagcgggccaggggccgggcgcggccgcggacgccgacaggaccgcgcggggcggcggccccaggagcccggcgggtggtgcagactaggcctccccggaccactcgggcgggcaggggccgggcggatgcaggggtgggcgggggcgagaggttcgcagactggctgaggccggcgtgactccgtgggcttgcctagcactaccgcggctgtggccgggccgagccgcaggtcttgcctcgcctcctactccgctgccgcctcctgtcagcagctcagccactgcggtgactcggcaactccacttccgggtccgggacaccgcccggatcttgcattattcatgaggaggcggtgcctggggaccccagccccacccacatgcgggagttccgaatgcgcgcggccgcccagctgtgattcctgagggggcggggcttagtggagactcgctcgccgcgcgcccaaccccgcctcctttccgggccggctgggcgcgccgaagcgcctgcgccttggctgctggtcggttgctgggtaaccgcgtcagggagttggattctatcctgcaagggcacggggacccacaacgacggctgtccctaaagaaccgttgcgactggtaactgaagtggaagagagtccagatttcttgtgtgtggtcaaggagacggacaaactttttgtcttcagacgagggagcgttttgtaggctctccaggggttgagatgattc

SEQ ID NO: 41734 - DNA, 2300 bp, Homo sapien
aaatacaaaaataaaaaataaataaaagcaaactgcctgtaaatatagggtcaggaggctcaaacacagtacatgaacttcaacgtaaagcccaaccccaacataaaattagggcatgttcatatgggactagcagcttccccaaggctgcagagacctaagaaagtcaggtccatctgctacagaagcccaggtaaaagaggcagaggagcaaaggctaacatggaggtggccagaccaaaatatgcaaagtcataagtagcatggagattggctctctaaacctcaatgtacctagacttgagtggggtaaatctggaataaatatatagaagtcctgctttccagagctagaaactacacattagcctgagtggtaattcataaagggtttggaaaaagttcctgaaggactgagttgcttcaccacagaagactccttgggaaactgggactgccttgccttccgtggtgatgctgaggaagaaagcagaactctgtgctcagtgggttaagtgggggatgactcgggtttcctgtgagaagggatgacatctgtccaggtggtaataagagcataatgttcacatagctgaatgaatcataggagtggaccaggggctcgcagggaagagagagatatgaggctctagaaatagttggggcagagtgtttgggttgtgcactgtgggggtgaggacagggatgagaaaagggcctctctcctcttcctctttgcctgccctttctctcctcataaatctcccagcacagaaaataaaatcacactcctgcacatagcctgtcctgtattctgtttagttctcttgcacaccctctgtgggctcccaaacagcaagagctgtgttcccacctagcctggagctaggcacacagcaaagggttggataaagaatgcctttgaggctgggcgccgtggctcacgcctgtaatcccagcacttcggaaggtcaaggtaggaggatcgcttgagctcaggagttagagacgggcctgggcaacatggggaaaccccgtctctaccaaaaacacaaaatttagccgggcgtggtggcctatgcctttggttccagctattcgtcaggctgaagtgggagaatcgcttgcacccaggaggcagaggttacagagagctgagatggcgccactgcattctagcctgggctacagggcgagcctctgtctcaaaaaaaaaaaaagaaagaaagaaagaaaaagaaaaagaaaaattcctttgggacaagaatgtgagaacaaggaggaagggactcgtgggaatggggatggggaagttaaggagaatagactggtcagaatgagtccatggggtaaagtgaagtgaagagatgggaatggtggataaaaggagagaggtaagaaacggtggattggggtagtatgggagaggaggccgggattagtgggaaagagtaggacagagtcagaggtcagtgggagcacttaccagaggtcacgggggtgagaaggctggggtcaacagagaaaagatcaaggatcagtaggagaggtatgattagtggtcactggcgacgacgaaggtcagaggtcatcagaaggaaggtgtgcgtacgttacctgcttatgaggctgtttatggggagccttcgcagaagcaggaatcatctcaacccctggagagcctacaaaacgctccctcgtctgaagacaaaaagtttgtccgtctccttgaccacacacaagaaatctggactctcttccacttcagttaccagtcgcaacggttctttagggacagccgtcgttgtgggtccccgtgcccttgcaggatagaatccaactccctgacgcggttacccagcaaccgaccagcagccaaggcgcaggcgcttcggcgcgcccagccggcccggaaaggaggcggggttgggcgcgcggcgagcgagtctccactaagccccgccccctcaggaatcacagctgggcggccgcgcgcattcggaactcccgcatgtgggtggggctggggtccccaggcaccgcctcctcatgaataatgcaagatccgggcggtgtcccggacccggaagtggagttgccgagtcaccgcagtggctgagctgctgacaggaggcggcagcggagtaggaggcgaggcaagacctgcggctcggcccggccacagccgcggtagtgctaggcaagcccacggagtcacgccggcctcagccagtctgcgaacctctcgcccccgcccacccctgcatccgcccggcccctgcccgcccgagtggtccggg

SEQ ID NO: 41735 - DNA, 2300 bp, Homo sapien
ttaggtttccgtatctgattataaatttatctttttgcttaaactagttatctctctccctgggtgagctcatctatttttctcatttaactaccattcttttgctgacaactcacaaaatattatctttagcctggacctctctcctgaacctgtgtattcagtaaatggcatcacagcatccctcgtcactaacccgggagtcatcccagacttttccttcctgcttacctcccctatcctctagttctctaagtcccaccagcagcagctcccaaatatcctcaatgctctccttttctctctacaactttttccttccatcatttcagtcccttattattaatccttgccttcactctcaaatgctttcaagcccccattccacaccatagcccaaatcatcctactaatttctggatatgatcgcattactcttctgctcaaaaattcttcagtggctccccactgttttcaggataaaatctgaactcctgcagctgggtcacaaaattcgctcacattacactcagatgtgcgatgatttaagtctcctctgtttcctataactaggctgatctttctcacaatgccctcaccctgctgggtaatgggcagtgggggggagctaaaagtaatccactctggtaaactctataggatccaataatttattttagacagtctctaagtactttggtagctttggatgactcagtcttccctttcttctttcaagatagcatctggatttacaggggtcttatgtgaatttcatggcattggattgggggaaggggcctcttagtcacatggtcctgggggttgtgtcagctggcatttgctgagatgtgatcgatctgctataaattagtgaataacaaccctgagaggtagcattacaaccattttacagatgaggaagctgaggctaagagagatttagtaacttgctcaagatcacaaagttagtaagtgaaccaggaatcaatactgccccgattacagtaggcacttagttatatgagtctaggattccagagagaagttaaggctagacttgggagcactgggagtcttcatgatatagcttcagggatgtgatcctccaaggagagcatgtagagcgggatgagaagacggccggatcagaataggtgacaatcactggcctgtgaaggtcggggaggacaaggtctacctcactgctcctgtccaagctatcttcttcttaggggagcttttaggatggcaaggcaggatttccaccacgcctgcacctattccagccagggcagaaccatcgctcaggacactccatttctgtcccagactccccaacagcctggcagcaagcctgcgaccaacactgggtaggaactcagtaaatgtgtccaaagaacctgtgttgccagagattttcacacctcttagggccagggaacctggggccctctaaagtgggaatgcagagtccacacccaggtggcagagggaagtgcgggactgcactataggcggttccctaggtgaggagattcagtctcctgccaggtgtggggacgcggggccttcctccggatgacttacttaagagacctctcccagatacagaggggtggtttcctcacatgtggaaatgcagaggccttggcctttctcggatgtggggtgtacaacccttccaggtgtagaaggtgcaagaaatccctaccagaggttaggccttgcccccaccccatcccctctcccgggaaggatccagggccagctactccttcggccctcctcccgccccgcgccggcacgagaggcgggctggtccccacctcagcgcaccaccaatggtgcgggaaccggggttcggccagccaattgagtggcggcagcggcgctgggatggctccgcccccgggccgcaggccgccggcctcccaggaggcgaggctcttcgctgtttttgctggccgccgagcccggccgagcccagccgaacgtagccgagcccagccgagcccaaccgaacgcagccgagcccagccgaacaccgcgcagctcccgccgccgccgcccgagcgctgccgagcgagcgagcgccgcggccgcggaggaggtgcggccccaaggggaggaggtgcccgctcaccgcagaccgcccgcggcagaggccgccccggtcgcgccgcggcgggagcggccggtggaggctgcgcggccgagggggagggccgggggagcggacgtcgcctctgctggtctcccacctcccgccgccccccgcccgcaggctcccaagcctt

SEQ ID NO: 41736 - DNA, 2300 bp, Homo sapien
taatatttatcccaaacacatgcaatttgtctctatttacaagggaacttggtcttaacagtattctgttggaagtctccttaaccaggctaatccctgaactgctttctcctgatccaccttcttgctctcaagtggatcctcacgagcagagccctaaggactcctctcctccctaggatgacggaaggaccccccacattaggaagcaggatcacagtgttgcttttagtagcatctttttatttacaagacactgctgattctgtatcgttctgatcttaagctaaaacaaaccagagattaaaatgatttttaaatggacagttccttctccagttttttaaaacttttatttgattggttaggatggaagctctgggtcccctggttcagcactgctttccctgcagccctgtttggctggaaaggaaagagtgaggagagggctatggtcaaagaagacgtctggggagaaatcacaagtgggaggtcgccggggcatttgggagtccagaagttggaatgcctcaagggatgccacgagataaggctgagccaggcctgagccttgagtgccaggcaggaggcggcgtgtgggtggggcgtgggtagggctggagtggaagggtcaccctgccccaccctgcctgatctggcctggcctagggtgtgggcagcttgcccctcctcctgtctgggccggcgggcaggcctcatgcgtgccgggggctccagcccaggcaggctggcgagatgagaggaaaaacatgcggtttggtgggctggacatggaaaaacaagccaattaggaggaaaacaaacaaaccctgggccagtgggggcacacgcacacatacacacgcgcacacagccccgcgtgggacccagggacaccctgccacaggctgacagtcacttgggtgtctcaagagcccccacaaggggcaacccagatgccgtgtatgcccagagcctgatactgtgacctgtgtgcataagagcatttgctcacacactctctttaacatgcactcacacggtgttcagttcatacgtgtgaacatgctgtgaattctgggcaccctcccacatgcacagtttgcaaaatacattcagcctcactatgctccatcacatatgcactgcctcatgtatgagctctagctgtcactgtgttcagacacaatggcacacttacaggcactctaacagagtaccttggccacacagcctagcacatagagacagtctcgagattgaacagcctcaccctgagtcacgtgcaaacacagtcatccagtcccacacagcctcccatcctacagttacacaactgcccagagtctcacagccacacacatggagcctcacagttacacacagccttgcaatcacagcgtcttaaaaacagcttttcctccaactcacaacacactcacaacaggcatcctgatctcacactgtcctacaatctcacagcacccccacctccgcccacccggcccctcagctgggctccagctgcagcaagtcactccttttcttccttttgtttttctttcctccttttccctctgagaaacctggtccctgtcaggaaacccaagcccttccctgctcagggcccagggccaggcaggagtagccagatgacagacaaagcctccagtcagccccccaacccccaccccaccatgacctccccagtcagggagaggaactggcgtgagggggaggttggaaggggacgcggtctgaggggggaggacagtcggggagtgggggagcctggtcagtggggaggctggccaggggtgggggcctgtgagtacagtgccgtggcccgctctgccctccgaggagtccggggcagcagggagcggactctgcacactccgatccccaccccacccccagcggtggcaggagcggggagtggaggcttctcggccgacctcggaatgtcctttcctcctggggtggctgccaactctggcttggccaacaggcccccagaaggcacttcctgtgtccttggccgccccccaccccacccccaggcagagttctgcacccgtgggcagacagggaagagacactaaaggcacacaggatgaacatggaacgacatgagatggacgcagggcccggaaggcttcccaagggaggcacacagtggaaggcagaatgcaggttggccctgtggggtctcagctggaccccgctttccctgacaggcctggggaatggagctgcctccgcccacagcattgcaccctccacctggtgccctggag

SEQ ID NO: 41737 - DNA, 2300 bp, Homo sapien
ggagaggagaagggaagggggagagggcagcagttggggtggggggctgcgggatccctcgttaacactcgcttacatctcccctccagagagccaccctgctgagttgggggatttttagaggcaattcctgttaacgagccaattaagttgggccagtggcctcttaattaggcttgttaacaccaccaagactgcaggggtgtagggatcccccttggacccactggccaccccctcctcccattgcagccccctcctcagccctgctttgctctgcactggaacatctgtcccggtttgctgcctctgtcgtcctcgctgtgccagggtctctctgtgactccgggtctctctccctcgctgcctatctctatcctgcccctctctgtccctgtcagagaagaaggaagcaggaaacccagccagccctgaccactcatctgtggagcctgggaccagccgaacagacgatgaacgggcggaagggcggtggctgggggccttggaggccacagctgtgaggctggaccagacactaaacaggggcctccccctgaccagaggcccagtgtccaagactccggccactgagcgcccccaacagtccaccagctccagccactgagcccccctccagcctcccttccaaaaacctggagcttccaggaaacatgccaagcccctctctctgcaccccctagcagagactttgcatccagctgcctgaggaggaggctgaaaactgacctttggggagggggcgtggccatcatggtcccagcagcaacacatcaacactgaccaggcagctcaacgctaacgtggacccagtgtggcccttaatcctggggagcaggtacggccaccacacgaggacacagcaaccgaacaacacattacatacaatggctatgggataacacctccccaccacaccttgtctgctgcacaaaaaaagtagaaacgcaacctgacaataatgacagaccgatgatgtaaaggcagggcagaacgaaaaaatgacaacacaatggcagaagacaacgacaggccacagtggagaggtggaggggtaagaggacatgacaagcacacagtgtcacaactgctacaataacacaacaatggcaatacacgcagccatgcaactgctccaaagatggcagtgatttaatcttttgtctctggacagctctgctcccgccccgtgggtgcccctactgatgtgctgtccatttcagaaattaaatcaagcagcagggggaggattggggttcttggccctgaagcggtgacaaatgctccaaaggaatcagctgtgaaaaggttgttagaagccaggatgagagacagagacgggatgaggtcatggacatggagaacacagagggacagagctgacggctccctcacacctgcacacacaggctcacagggggaccacatgtcagaaacagtccccccgggcatcccaaagcaacttcactttgccacacacaaaggaacaagggcagtcacccctaaagaagaaggacatgcaggacagtcatccacaaggccacagtcacacacaagttcacagtcacacagggacactgtctcacttcagggatggtaacacctgatacgagatcacatgtacacgtacaagaagggcaccatcacctaaaggcacagcagttatgcccagggacacagggagacagtttaatacaaacacacaaagagaaacagagagacacaattacatgtggggtacagtctcaaacacaaggatacagccccacaaagggcatgcagacaggcaaggtgacatagacagacaatgtcacacgtgaggaacagtccacaaggatacagccacacagagaaatgcactcaaacagggacacactctcaccctcacaagaacacagtttcacactctcagagaggtggccttatgtccaggaccatggggacacaaggtagagaccactggcaggccctagggatgcccagtcaatgcccctggggctggccaggatctctccgggtctcactgatgatctcataaagaagaggccatataagcctcgactcactacccacagccttgagggtggcagagcccagccaccagggtctgctccatgcctggtccctggagaggccctcaccctctctgctttcacccaacccgactgacacggagtaggaggtgggaatcatgcaggcagggagcttaggaagcctggttcaaggtgagttttgagttcagacctcgggctgatgttgctgtttgaggtgctgcctca

SEQ ID NO: 41738 - DNA, 2300 bp, Homo sapien
tcccgcgccgggaggagctgctgaccgactgacgcctggacagaggtccgacgtgcgcctcttcccttcctttatcgtctgacatccacacgtccacttccaggaccccggactcccagtgcggatcttgtccccgcagccgtggactgctgctctgccgacagcagcctctgcgtccccgggggccgagggggacgttggaccgggacagaattcccgactgctcccaacctggcagaaagaggctgagccagggacaccagggcatctggaggtcaagtccgttccccaaaccactcgccaattttcaccccgtccgcccctccccggccggattagagcgccgaggccggtcagccccctggggaggagcggcccccggtgtaccgaaccttgccagggcctagagcttcgccgcaggggcaggggcaagtcctgctcccctcaagatcccgtcgcaacgcccccttccttccccgcgtccacagtctaatcccggtctgcggcacgggaagcaggaggccggcggcccagagagcccggggagaggacaccttgtgtgggcggctgtgcgctgaccctcagcggggcgcagctagtttgctgtgtgtcctgaagtcctagctggccgtctctgagctccagcccatgccgacccctgccagttgtaggaaggggattctgtggccacggaagtgaaagtgaaaagcccaggccgtggcgggaagaaggattttcctctgcagtgggagtccctgaggcatttgttgggaaagggcccgggcgctctaggcagcctactggggaaggatgtgaggaaacatggagacatttccctcccttctcctcgccctcagccctagagcagctccccggaggggcagggcccaggattatgggtcaagggtcaggtgacaaatccaaggggtggagacgggggtggctttctcggtctctgcctctgccattgccactccattgcgctttcacgtggcctcagaagttggtcaggttgtccaaccttactctcctatgttgcagccagaccggaggcccagggacgagtgcagtgaacaccccggcccctcagaggcccaggctgcgaagggagtgagcctcctatcgaggggtgcgcctgtgcccggcattgagagtgcaccctccctaccccttcattccagtggaggcttctcccccggctgtgtgtcctcggggcgcgaggaacatgcgagtagtggtgttggtgtcatcggagacactggaggcatgggcctgggctcccggcagggtccatccccggtcaaggaagcccctttcccccgcgcgagggggtgaccgggaggggagtcgttgcggggggcagtagcaataggggagaggcggagccggctggcttcttctgcccaaagtgggggttgggggttctggctcgcgttcctctcacggcgacgccggagggaggaccccgagagttggcccggggtgtgccagggagtcggtgcgaggccgtcagggcctgaacgtgcgggagtgtgcgcaggagagacctggctaaggccgagagggagagtgagtgtgaaggagcgatcccgggggtgagtgcgcgcccagccgccctaggggagcgggccgagtgggtgtgtgtgtgtgtgtgtgtgcgcgcgcgcgtttgcgagacccgcggccggggctgcgcgtgaagcacggggaccacagccgtcttgagggcgcgcccgagaaagggtgaacgcgagggggccacgcgtgccagtgcggacgagtgtgccagcgggggggcagagcgcgtgccagtgctgggcgagtgggagtgggggctcacaggcccgcgcagggcgagcggaccgcgtgtgccaggagcgagagcgtgccaaggcgggggcgcgcggggcccgtggcggggaggggtcgtggcgcgcggccgcggaggcgcggggagacaaggcaagagggggaggggagcgagggcgcgcgcggccgagcgggcgcccgcggtcacatgggcgagagaaggagggagggagcgcgcgagggagggaggaggatgggggggttaaagccgccgagcgctgaagagccggtgcagagcgggcggcggcggcggcggcagcggaggcggcggctccagccggcgcggcgcgaggctcggcggtgggatccggcgggcggtgctagctccgcgctccctgcctcgctcgctgccgggggcggtcggaaggcgcggcgcgaagcccgggtggcccgagggcgcggtgagtaccctgcggcggagtgcgcgcggc

SEQ ID NO: 41739 - DNA, 2300 bp, Homo sapien
cgtcatcttttttaggctccatggggagtgggagtccgtgatgaggcaggaagtttagtggaagatgtgggctttgcccagttcctttctgtgctacactttggccctacaggaccagtgtgtggaaatcactgaggagtccaaggctctcctggaggaatacaacaagactgtatcctttctgctcaactaggaccctaatgggtgctgtccctaagccctgtccttttgttccacctctagctctctctcatcctatcctacccacctatgtttgcctgttccccactttccatgaacttcctcactcagattcctattctcaccttgacctacaaccagacaatgcttctctccaagcaattcgtgcagtgggatgagctactttgccagctagaggccgccacgcaagtgaagccagcagaggagtgatagctgctccccatcccaaagtgggcctgggcagtcaggctccagggccctatgccaacctgcctttgttacaaggcagaggaagctttgtatttattggcttcaaggcccacctctctgtactctgggctctaaagttggaggtcaggttacctgaggtttgcaatttgcaacacccaccctccccccaatcagtgttcttatttcagtgacaataaaccatagagatgactggaggagtgtgctggcttcttggtctaggatggaggtggtagggggcagaggtgtcagcctgcctaatcgtttgactgggaactaaactcatcctggtctggctttctggcaggtgtagagctctcaaaatgaaggctctcatttgattatgtgaataggatattcctttatgtatccatttatcccacatttaccaataagagacctccaaatgtcagatgatgggagtagatagggctaatccctgccctgcacgggctagcaggatagacagtaaaggaaaagggcagtcctatcaggtggacacagaagaaaaaagggactgaagggacctggtaagtgatatccagggactttcagagccaagggagcagcatgtgcaaaggcctttaaatttctctcttgggagcctacctgctgccacgagccgagaagggcagcctaagaggtttggatgcaggaagttttggtcctggggaggggaagttgggaagtaggggcgctggggcaagcatgttgagaaacagattggcaccgtagtccaccaaatgtttgctgcccccttgtggtctcagggagtgctctggctccagaccctttttccaacggcccattggccgccccgcctttgcgacctctccggcacctcaaattcagcgtgtccaaaccgatctgaaacctgggagtcaccctagatcggaatttcctacttctccgtccaaacagtggccaactcgtcactgaacctactagtatctcccaacttaatcttttttccattcccaccgcgatttctctggttcattaatgtaacaaatcatttaacaaatattgagcgccggtcatacgccaggcaccatactaggctccgtgggcacccccgccccctcagcccccagactccgcggcaggtgtcgtcaggggctgtggcccgatttccccaccactccctcctcggctccctgcacaagatctggttcgactggcccctggaaaacccggaaaacccccgtggtccgccagcgcccacaggatgaggtcgaagctcagaagtcggtaactaaggctctcgcccatgcaacagcagccactacaaactgaagcctttgttcgcacccacggtgaaacccacagctccccgtttgctcaacagctaacgccagccctcccatcttctaagggccagatccccctccttcagacgcaggacttccccgacggccgctcctttctaccgcagggaactgtcctgcctccctccggggcgtaacagcggaggctgcgctcgtgttcccatccccgctgggactggtccggggcgctctggccagcgggttgtttccgcggcggagatgcctcggggcccgtccctcacgccccgcccctcacgccccgccccctcggggcgtgcgcggccccgcggccttagtgcgctccgggcccgcgcgccatcttggctccggatcgtgcgtgaggcggcttcggtgagagccggaaccgggcgggcagaggggcgctcgtagggttgggggacgcctgtggcttggctgcagcggccggcaagaccctggaagagaccgtggctatggaaacggccaaggctgtcttggaatgtcctgagcagccctccgagt

SEQ ID NO: 41740 - DNA, 2300 bp, Homo sapien
tctgggagaatgagggttctttaacttttccaagccttgagccaggtagtatatcttggaattaaccaccacttcccttacaggtggctgacggcctggtcaaggtgcaggtggctttggggaacatttccagcaagagggagagggtgaagattctctacaaaaagagtaagtgcttccatgatgtgcctgcctgcccgacatcccacccctcagcttcctggtacctggccctagcccttcagttcattaggtcactggaatagccctttggggatagaaagattatgaggacatttacctacacccaattcaattggtaaattgtggtgtgcttttctaccttgtggctaaacctcaagcccatgacagtgtcctaagttatgaaataagagctctacctgaaagcttctcttggtgaaggagggtaaaaagggtatgggatttcccaggcaaggttaaggggcaggaaacaaattagacactgagatcctggttatgtcagaactagtaacctgcttagtaactagaaattagacaaagctctggcttgtctcggtgacatctaggagaaaagaggccttctacccttggtgaggataggtcagtgagaatgctaagggcccagagtggtggtggcaattgtgttttcagctctgaagcttgatgtcagaagagacttcaagagaagagagtggagagatagggaagtggggatagggagcctggtggagccctgctcatgtggcactgttgggtatcagctcctcattgaaggctctcctcaaggctgaccacttgtcaaacatccttcataaggcagagctctactgcccaaccctattccattttccatcttgctacttttctagttgaagatctgatcaagtacctggatcctgagtacatcgaccgcattgccatacctgatgcctctaagctgcaattcatcctagcaggtaatgctggactacatgtgtacatgcatctgaggatgtgggtcgtcggggaggttaagcacagagatggcctctccatccagtcttctggtggatacaagccctggatgctgctctctggaattgtggcctggttctgggttgaggatcctatggatcctctagtagacattgagtacagtatacctctgcaccagctgcaggccatggtgccagccacagtgggagctagtccagtgttctatcaatagtttgcctcttggattttccttcagaaccttcctcacttctgctcactagacagaggagcttctaggaaagggtaggggcagagagcattgccattaaagaacagagagagtattggcatgagtttcaacatctttctttcatgtgagaaagctctgcagtgtcagagttctaggcaggaactattgccttggcaatgtctgctaatcagtcagccattctataagctagggttttttgagcttcgttattcatccaaaagatgtataatgatcatctactctgatccaggttctttcctaagtgaggaagcatacagtggtgaaccagaaagtccctgccctcatgggcacagccagagctaggggagacagggtccctgcttcagggacctgagcttataacccagatgggagatcagtctcccaggagactgatcagtgcaatgcagcactgaggactgggtaaggatgggccactcctgctaaaagggctgtcagagttcccaaagggctcttggtcaattgccatcgctcaagcaccaagtttagatattctcctgcactgactcttgagtccagcctctccatccctccctgtggcactgcctcaggaattgtgcatccacttgcatatgaatggttgcacagtctcctaaatcatactcttgaccctaatctttcccttcctgcatgtggttcagtctcaccctcacaaaaacatgttcccaacatgtcactttgcctactttggaacctcagtgtatcctgccttgctaggataaagtcctaattccatagtctgccattcaaagcctttcagtcggccgggtctaccctcccatccaactctgtttcctgtgctctccctactccagttcagctaattgaattctttctcctctactaattgacaggcattcctgcctctaagcatttgcacgtaacagtcctctctcttgaatacccttcccactctatggatttcagtgcattgaaatcccgtgtgcatacagggcctagcccagatcctgctctcctcactggactcttccattactgtcccagctctcctccagcatataattgtcta

SEQ ID NO: 41741 - DNA, 2300 bp, Homo sapien
agttacctcttttggtcccaggcctgggggagaaccaatgcagagatgggttggtttggccaggggagctgaataacctgttcttctagaggagagtggaattccaaacccttgtctggcactgcctgtgggcctggcactgggacctacacgggagaaattggcaccagaggagcccccagagaagagagctgtgctgatggggcctatggacccacctcgaccttgcatgccccccagtttcctgccccgtggcaaggttcccctgaggggtgaggaggggcttgttgtgagggggcttcgggactgtacactgagggaggattgacccatcacctgataggtgttagagacggggcagacagattcctctgtagacaactgtgtgagtataggtgtggggctgaagtggaatgggggctgtctacggggatggaggggggaaattctattaataagtcagaagtctgattctccaaaatgtgattcctctgccccctcctggacagaagagcggctggatgggcctcttaatctggcaggcagtggcatcagcagtatcaacatggccctagagatcaacggggtggtctacactggtatgggtactgcaggctgtctacactggcatggggtcaggggtatttaggctggcatggggattttagacttcctctactagcatgaagttcagggatatctaaacttgcatgagtaacatggagttcaggggattgctagactggcatgggttaaagggggtgtctacatggcatgggatccaaggcatgacctctctggcatgagtaccaggggatgtctgccttgtcttgggcctatgtatcagcataaatattccttgtttacctgtttgaggtatctacattagcaatggagtctcttactgacccaaggagcttgtcctcattggtttgtggcaggggtacgtgtgtagtgttctagcaaccagaacacttacttttgttcccctcttctgtttccataccctaccccctcctgcttgtttttgccctctaccatctcctcacccctttgccaggtgtcctctttgcccgccgccagcctgtgccagcttcccagggtccaaccaaccctgcacccccaccctccacagggcccccttccagcatcttgccctgagaggtcctacttgaaactaagagtcccagccccattgctgaggggggaggagaccccctgctttgattctttctggctgcccactctgggacccagccctgggaggggacgacacctcccatgccatgtggacttaaaaccaaagtttcttttgatgttacacctacctcattgtaaagggagggcacctcctccctggccaattccagcagcacctaccaaagggttcttcctccagtaaccccatcatctcctcatgtgttccctctgtcaatgtcatctctaggaccctacccttttgagtcagccctgcttctcttcaggagccaagtgaaaggttgggttggggtactgtgaaagagacatccctcaggtcacatctagacaataaagctgcggtccctccctctctgatgcctcctttcttgtttgggtatgggaggtggggaggaatgatgtggaacataggctgccttgggccaggggctttcagaggttaaggcagaatagcaaagtttcgtgagaatagaagagctccgtctcttgaatcagacagcctgagttcaagtcctgtttctgtccctatagtgctgggtggccttgggcaagttacttaatcaactgaaccttagaagactccaaaagtttatggtaactcacggagcctcctaatgatgtatctatgggaatggacctatcctggaacacgtgcaaactcagggaatggcgtggggaaagctctttggtacccgaaaagcaaaggttatcttgacaaccaggcactggaagccaggggagggatgggacagagccgttgccaaggtaatcagcttttgacagctccgaggagtaacttccggcactgaagggctgaatcatggcgtcacttcctgcataaagggccgctcgtgcactcggattggctagccttcttatttggactgacgtcccgccctctggctgtttcctggccgaggtgggtcggtagtagcgatggcgggtctgactgacttgcagcggctacaggcccgagtggaagagctggagcgctgggtgtacgggccgggcggggcgcgcggctcacggaaggtgagtagtctggtccggtagtccctttctggagcagagcaagagcggtc

SEQ ID NO: 41742 - DNA, 2300 bp, Homo sapien
agaggttcattatactattcacttgtctatgtttcaaaattttcataatacaggctgggtacggtagctcatgcctgtaatcccagcactgtgggtggccagggtgggtggatcacttgaggtcaggagttcgagaccagcctagccaaaatggtgaaaccccatctctactaaaaagacaaaaattagccgggtctggtggtggacgcctgtaatcccagctaattccagctattcgggaggctgaggcagtagaatcacttgaacctgggaggcggaggctgcagtgagcccagatcgcgccactgcactccagcctgggtgacagagactctgtctccaaaaaagaaaaaaaagaaaagaaagaaaaagaaaagaaaagaaaatttccataatagaatgtcaaaagagacaaaaactgtgtgtggctgtgtatctgcatgcggtgagtgtgcagtcagcttaaagacctctgagagtgtgtgagtgcataggtgtgggtccaccaccatgtgcactcatgtgtgcaaaccgcagcatgcccgcagtgggggacagcacgtaggcagggcaggggtgctcaaggcaaagggagaagcttctattctgaccagaccctccacgcacaccccagcatcttgcagagggattcccctcttgatcacagcgtgcccaggccattggcactgtggtgaccatgtcacggaacgtgtgagactgggaagctatgcgcctgaacttgtgacaaggtgtgttggtgtgtggatgcggctatttgtatgtggaagcccagtgccgagtgtgggtgtcgggggcacgacttgtgaggctgggcggggctctggtccggagtccggtggcggtagagccctcattttcgcacgattcccccgcagctttccagcgccccctgcccccgaagctggctggaaagaaggtgggagacacctgttggggagctgagagcggcagatcccacaggggcctctccccatgcgccccgcccgccctgccccgctcgggtcccgcccccgcggccgccgcaagcagcgcggcgagtgagcgcacagccgccagaggagcacagggcggcgggagcgcaccgccgggacccagccgaggccagggccgcctgggaggcgggcggagcaaaggcagcgccgtggagacgccaggggcagcgggccacgccaggcaggtgagtgcggccgcggggcgcccggagcgagggagccgggcgtcgcgactctgccgcctcctgcccgtccggtcccgtgcccgtcccaggctctgccccaccgccctccatccccgcgactccttggtccctgtcctctgcccctctctccggctgtttttcccgtccctgtctctgtcggtccctctctatttaactgtctctttctaatctctctcttctgtccgtttcctgctgtcttggtctttccctatatctcaacccctgtctatttgtctatctccgcctctgtctctccgtctctgtccgtctctgagctacctgtcacttaggtcttttatctgttgctcctctacctctcttaccctccctgtctctctacccaatattctatctctctccatctctgtctgtctaccctgtctctgcctgatacctctgcctctctccatcttggtccctctcagtctctgtgtcaccccacttctgtctctccttgtcaccctgttccatctctattttcacatctccctgtcattgtctctgtcggacatcccccttctccttttctttctctctcccttccttcaccatttcccgatgtctcttggtccccgtcaccctctctgatctgctcactcttccagtcctcagtcaatggccatttgattccccgggtctggtcctgtttctgttcacctctgggaaagccatctttctgcctctttccttgtgacccctgcacttccctgaatccatgaccacctccccctgtgttggggggctctgggggcagtagggcccagcacccataattccctcccccacaggcggccctttcctcggggtcccgcctggtaccagggaccccctcagctgggggactgcgcctggaagctgtcatggaggccctgcagaagcagcaggcagctcggctggcccagggggtggggccattggcccctgcatgcccgctgctgccaccgcagcctcccctgcctgaccaccggaccctacaggcccctgagggggccttggggaatgttggggctgaggaagaggaagatgctgaagaagatgaggagaagcgggaggaagccgg

SEQ ID NO: 41743 - DNA, 2300 bp, Homo sapien
gtgtgagccacagtgcccggcccctttttcttttcttttttttttagagacagggtctccctctgttgtccaggctggagtgcagtggcacgatcttggctcattgcaacatccaccttctgggttcaagcgattcttctgcttcagcctcccgagtagctgggactacaggcacctgccaccacgcccggctaattttttgtattttagtagagacgaggtttcaccatgttgcccagggtggtctcgaacttctgagctcaggaaatctgcctgcccaccttggcctcccaaagtgctgggactacaggtgtgtgccactgtgcctggccctttttttttttttttttttttttttttttgaggcagagtctccctctgttggctcaactgcaacctccacttcccaggctcaagcgatcctcccacttcggcctcctgagtagctgggactacaggtgtgcgcccccactcctgactaatttttgtactttttgcagagatggggtttcaccatgttgccaaggctggtctcgaatacctggactcaagtgttccgtctgcctcagcctcccaaagtgttgggattacagttatgagccacctcgcccggcctcagtttctttctttaaggtcaaaaatgtatgaggctacttttttccagttcctttatgttttatatatataaccatcacataaaattctcaccatgtgaggcactaactgctttataaatattaacccatctaatctcatcacaatgaagatatgtactatgaggtaggtacttatctccattccattttacaggtaagaaaactaagttacagagattttaagtaaactgcccaagatcagacaactagtaggtagcaggagccaggccttgaactcaggcagtccagctccagagtttatttcttaatcactgcacaatgctacctcttttctcttttgtttcttttcctttttgctttcttcttcctctgcctaccctttgctgttggtgctctccagggctctgtctttagccttatcttactctattctctctccctgtgagatttcatccattcttagaggttttctgtagactctccagtgagatctctaagctggggagtaggaccattgtttctagccatatccctaatggccaccacagaacttggcacatacaagtgccaacaaagtatctgaatgaatgacaactcccagctctatctccagactggagctgagcttcgagacctggacactcaactgcccactagacatgcaaaggatgttagccaaataaggggaaagtggggataggataaagggggaaagagtattccaggaagaagagatcaagccctgccaactccatttccagagttgttaagctcatttctttcttccatctccactgacacagaccttccctcttacctggcccacagtcatggtctccctgactcatcttgctcccctccactcgacagtcctgtgccactcggtggcaaaatctaatccccttcctcccttgctgataaccctcagctggtttacaaggcctcctctcacattttgtgccgcagaacagagaaggaattgtaggcccctgaagaccccaagctgtctctcctcggaggcctttgctctaggggctggtccctgtgggctggcatgccccttctgcgagctcttaaagacactgctcaggtgtcaccgcctctggaatgcccaccctggggctcccagcttgaactgcctcctctccgcttcagtcctggtaaaggcgggccttaacaatcgttgagtcccagaaggcttcacttccgggctcgtctgcttcaccagccagtgagctcgggcgagcccgtccattctgggtctcactatccccacacctatccgtatgtagagtggcgctagctaggtcagacctcgcctgaagaccctgacatctgccgctgggcgacttggccccgcccccttgcctcccttgcgcggcaccgccccactcctccgtgctccccccgaggaaatggttcaaccgaagggcggtgccaaggtgcccgggccgctccgattggtcagggcgagccgtaccacggcggtggcgggggagcgcttcgtgggcagccggcgggctccgaggccgtgagcgcaaagcctcaggccccggctccctcctgagctgcgccgtgccaggccgcccgccgggatgcagtgggccgtgggccggcggtgggcgtgggccgcgctgctcctggctgtcgcagcggtgctgacccaggtcgtctggctctggc

SEQ ID NO: 41744 - DNA, 2300 bp, Homo sapien
caacacctctgggatctggcagggagggagctggttaggcccatcttagtcattctcctcttcctccaaaaaatgaccttggggagtcatagaggagaattatggagatgttcctgaagagatgttcctgatgggggtcaggatttaattagcatgattcagggggcggcactgaagcactggtgttcttgggaaaatggagctgtctacaagctctagtcactcaaacaaatataaatgagagaatggaaaagcagatctcctgttcctgtctcacctctttgggtaatatgaacagccagtgggacaggtaaaacccctgtttctcagtcctcagctccctgccccctacctctgaaggtagcctcttcctattccagtctgaggaccctagggcagagatcaagtaaatgacccatgacctagtttttgcagctcaattgcaaaacacctggcttggcttggtcttgattgggggaagggatgtccctgctatggctcaacttctaactcactgggtctctgtcctgcattccactgaagcctcagaggcatctcacagcactgggaaaagccttggaaacttgcattcaaatctcagcttggccactaattctctgggtgaccttgagtcctctgggctccaatgtgaaatggggaagaggtttagacaatatttagatggctctttaaaagtactgggggccagctgtttgggaggctgaggcaggaggatcacttgaagtcaggagttcaagaccagcctggccaacatgtgaaaccccgtctctactaaaaatacataaattagcccagtgtggtggcacacagctctaattccagctacttggaggctgaggcaggagaatcgcttgaacctgggaggtggaggttgcagtgagccaagatcacgccactgcactccagcctgggtggcagagtgagactctctctcaaacaaacaaacaaacaaaagtaccaggggaggaattaatttgaattttatcctagtgttagccaattggtcccatccaaggaaaatttagaaaagggaaggggatgtgtaaaggaaacactaggccccacctagatggtggctggagcttctgatagtcctgtactctccacatttttagactttcttgtacttttttttttttttttgtgacggagtctgctctgtcgccaggctagagtgcatgggcacaatctcggctcactgcaacctctgcctcctgggttcaagtgattctcctgcctcagcctcccgagtaggtgggactacaggtgcacgccaccaagaccagctaattttttttttttttttttttactagagacggggtttcaccatgttggccaggatggtctcaatttcttgaccttgtgatccgcctgccttggtctcccaaagtgttgggattacaggcgtgagccaccgagcccggccatttttagatttttttttatagcccttttacccctcccacttcttgtgctgtcttggtgtgtgtatgaaaaagagagagagagagagaggaaggagagcaagagtgagagaaaaagagaatatggttacttagccctttttcccaaatctgtttttgcttttggggataggatatggttatggtgaagtactccacacagaccccaccaagtttgcctctcctgcgctacagccactgagcaggtgactgaggcgctgttgatccagggtcatatccttactcgccctagaatgtaagctcaggcagggcagaggccatgcctgacatgtgcatcccaatgctttacacagcctaggtgcctagcacatgctagatgcttggtaaatatttgctgaatgaaagatcaaatgaatgattgcagcaagcaagtcctgtaggcatcctggagcccaaggattctgcagtaggcagctttcacagaggttcttccagtgtagtggctctagctctgggtgaagtaggatcatcaatgtcggcccccagggttcacagctgttctgagccccgcccccaggtggcagggcagcccagtcagtcagtcacgtgctggcggctggccaatcatcgggggcggcgcggggaggggtggtgtggacggagaaagtgaaaggtgaggcacggccctgcagattttccagcggatcccccggtggcctcatgtcgcgcagtggaaccgatcctcagcaacgccagcaggcgtcagaggcggacgccgcagcagcaaccttccgggcaaacggtaactgcaccgcggcagggactcgctggggcgcggagccgagccctcccc

SEQ ID NO: 41745 - DNA, 2300 bp, Homo sapien
aagatgatggtgacttagactcgggtggttagtggtagaggtggtgagaagacatcagatcctgggcacattcttttcttctgcttcccttgcctatttgctgaccacactccggctcctatgtcaccttgatgacttcctatccattctgtcttcctaggaacgtctggtcctaaccagtgagcactggttagtactggtccccttctgggcaacatggccctaccagacactgctgctgccccgtcggcatgtgcggcggctacctgagctgacccctgctgagcgtgatggtcagtctcccaagtaggatcctggggctaggcactggatggaggttgctcccagtagggtcagcatctggaccccaggctgagagtcaggctctgattccagatctagcctccatcatgaagaagctcttgaccaagtatgacaacctctttgagacgtcctttccctactccatgggctggcatggtgaggcttttcaagtacctatatttagccccaacaccatttctgggctcctggggctcagcctagtgaactgcaacctcaaaggagcaagccttgaaacagttgctgggggaagtggccagagtagagatgctgggactgagggtggagcagcaaacttggtgaaactacatctccaatgtgctttctaatctcctgccagctcttctcaagcaggggatcctgggagatgtagttttcagatacctggttgggtttgggagtaggtgctaacctggataactgtaaaagggctctctctccccactgtctctcttctttctgtcaggggctcccacaggatcagaggctggggccaactggaaccattggcagctgcacgctcattactaccctccgctcctgcgctctgccactgtccggaaattcatggttggctacgaaatgcttgctcaggctcagagggacctcacccctgagcaggtcaggactcagaacagtctggcgtctccagactctcacatgcagtatgtgcaggcacctgatacttctgttgcccttgtgctccagtcattgcacaaggcagaaaacagctctggcaggaagggactgccaaagttaggagccctagggcctggaaggagagtatggtcctcagatcccccttctctcctgcttcctccagggaacccaacagtcatgaccctgatagtttcccataacaacctgggcattccttgggactcaggagctgctaaactctttcatcccctggtggcttcagcagtccttatcaccagcctcacaatcccacaggcccacccccagtgggcctgtggcattcatatttcatattcatatttcaaaccacaatatccagcaaaatgtctcctgagcacccagaactccataccatcggccgggtgtggtggctcatgccttaatcccagcactttgggaggtcaagatgggaggattgcttgagcccagaagttcgagactagcctgggaaacataggaagccctcgtctctacaaaaaaaatttaaaaagttagccaggtatggtggcatatacttgtggtcccagatacttgggaggctgagataggatcacttgggcccaggagtttgaggctgcagtgagccatcatcatggcatcattgcattccagcctgggcaacagagcaagacctcgtctcaaaaaaaaaaaaaaaatgaagtccatgccaccattcttggcagcccagcccttatcctccttaattgctccctgtcccttttccaggctgcagagagactaagggcacttcctgaggttcattaccacctggggcagaaggacagggagacagcaaccatcgcctgaccacgccgaccacagggccttgaatccttttttgttttcaacagtcttgctgaattaagcagaaagggccttgaatcctggcctggaatttgggcagatatagcattaataaaactgtgcatctcaaacttttatcacatactctaatatcagaggagtgtgaaccttcagagatctagggttaaaagctaaaggcatagctccagctacaacttttctttgtctacagatgtgtaaaatcttgatgcaaaaatctaccccaaatttctgaacaaaattaatattcagtattatatctagcctatagattctcttactcttggtgtaatgacagcattcccagtttaggaaactgttttaaaatcttgtgtcttggttgtggctgaggctttgggaaggccagagccccctttgccaccacccctagggtgtcagctccaagcctgggcctg

SEQ ID NO: 41746 - DNA, 2300 bp, Homo sapien
ccagcaaagtttgagaaccactgccctacacagccctccttcttctttatcttatctggagtcaggggcaccttcagcttctccaatcacctggccagtggctcttgtttccagtcctgctgttccagggtggataggccttcaggcggagacccaggaatccagctccagactctgtcccaagcagcctcttcagtccgggacgggacaggaagtgtccggcggaggtgggggtggaggtgattggcagttggagtctccaatgggccaggagcccccctatttcactcctctccttccattggcgcctgggcggagccacccccgctgcgggggcccagggcgggagggagtagaggccggggcagagggcgagggcgagggcagagggcgctggcggcagcggccgcggaaggtgaggcctggtgtagacgccaaagtcttgtcaggagtgggcggggcagggtgatgtatgatctgaaaggccgggagtgactaacgactgtcagtgtgtatgtgcctgtgaggctgtgtctgtgtgacagtatcattgtgtgcgattctgagtgtcacttggtgcagctgtcagctaatgtgactgcgtgtgtcagtgtgcatggagctggaggtgcatgtggctgtgcaagtgtgggattatgtgtgtatctgtcaatgcacatttttggtgggactgggttgtgtgtttgtgtgagagggactgtgaccacatgagggaatgtgttttgggaaggtctctgtggggtttgagaccatgtctgccagcgtgagagtgggtggctggctttgtgtgtgccaatgtgtgacttcagcagtagcagagcaaaagtgaggtttgtgactatgtgtgtgtcctgggtcctaacttaaaccgtgtgggagtacagctgtattcatgtattgggggacctacctcaagagcccatgggactgacctttctcttaagtgtccagcattgacagacacacccacaacacacgtggcttcccctccttcctctgctcaagaatccccagcatcaggtctactgctccttattttctgtttccctgcttggctcagtttcccttacgtgccgttttctgtccctattgctgtcttactagagatacctctgtgtgtttcttcacagctttgttcccctggtctctctgtgtgggtgcatttccagttttgcctttcctttctctctgtctctctctgtgcccctatgcctgccttccctgctgatcttgatctctggctagttgggggcctgtaacagtgatgagatgcgggtctgccccggctaagagctccctgagagagggggcttagaccatgatgaagagttgcttttaggcggtgctgtgagccctggtaggggctgtgtgcgtgtgtgactgcgtgagtgtatgaatatgtgtaagtgtgtctgagtctgaggcggtgtggctgtgcccgtgtgactgtgagtgaccgcatgtgagagtgtatgagtctgagggtaactgtgggtcttgtgtatctggcaccaagggaccaaaggcatttcctggtgctggggcccaaagaatggagggggaggtgagaaatggctggaacttccaggggagggggaactggactctttggcctctccttatatcccccaacctggggcctcccttcccctggaagcacagccagctgtaccctaaggaaacatttggtgaggagtgaaaagagggggagtttgtatctgatttttcatttgattgtgtccacgtgtgttcaaaggcatgcccttttgttaactgtgcctcttgagtctgtgtgtgaatgtgactgtgtctggctgtgtgaaaacacagggcatctctcactgacagggacataagtattagccaccctcctttccctcttgctggccttggctgtgtctgtggcttcctttccagacttgggggaggcctcttcccttcccagggccttgggtgggagggaaggagggaggaggcaggagcagggagggggcctggctaggggcggcagagctccagggcttagagggggcggggcagggaaggggaaggaggggatggctctggggtcccagaactgagtggagtaggagacgggggctgtagctggtgagaggaagtcctagaggctatggacactctgctgctgggatcaccgaggtagggtggggctaagcagggtaagtgtggctgggtggccaggggtgagccaactggacacactcagacagacacacagacaggtggaggccctgctctgctctactcctactcctgaa

SEQ ID NO: 41747 - DNA, 2300 bp, Homo sapien
cctgcctgttactcccttcctcggagcgaggactttgccagctgtctgaagaatcttctctgctgggagtatatctaaaacattttaagcagaggtgtaggatgcaggctgtaaatggtaagagggggagattcctagaagctgcctgccacagaggagcgacttgggttggcgacctttcctacagttcataccccaacttttggctcctccagtctgatcccaagtttagagatccttggcatcagcctacctagaagttcttgctccctccctaggagagtccaagggccactgctctttgccgcccccttctgtcacccaatcagcctgggacccactaactcctcaagtggtgagaatcagggactgctatgtgggcctgccttcagttagggactggacccagcaccagaaagggcaccacaagattaagttaaagaaagagatggcccagtttctggctggggccaaagctacagcagattgtggctggggagaagacttggtcttaaaggggagagatgggtgcacacccaaaagcatttgttttctgccttccgaagacttctggaccgacaagcccagggaagaccagaaagtatgtagcgcacagccaagtgatgaagaaggtctatgacaagcccgaggaacctgggagatttccttgggatttcctcagtggctacacccaacaagccttgggacacaagagaaaggcctaagccctatcccaagagaaagcctactccatagagagtggctgaccctacagcagacgactgcaacaagataagggctggattactgtgttatgacttggtttatgtttcaaatatagagcaggacttgcagattgagatccctggaccaggagtgggaaattcttaaaggagccaggggcactgaacttggcagcatacccccaccctaggcagctcccagcttcctggaaaggactggataaagatgaataggagctttgcattgcagggagggggtaaagaacggagtgacagctgggtatgggattaggagagaagcggctatagctggagggtgggatgcagggggtatagcagttggacatgagggtgtgactgaacccgggtagggagaggggatgttcctccaggcccaggaaggaggctggaatttgagtaaaacaaagatgtaattgagtgcttgagtccaatgtcttcaacaagtcagggactggatctggagaccctaggcccctgctggcaagaggttggcattcctggaacaggactagacaaaaacaggaaggtaagattcactgggccttttacctgttttgacaacagtaacctagcaccaaagagcttttatcttccctccttatctaccccacctttcctccctgtctcatcatcctggggaaagctgccccacctcagcatctccaaaacacccttaatattaccataaagggccttcccccagcttctctgaatggggctggcctcagccaagaaccctcctcagccagaagggcctgctctagggacccattcccatccatttcttctgataagacaggcaggccaagccaggaagtggggaggagaaggtgaaggcaagttggtgcttgcctgccctctgctcccaccccacccacaactcccctgtcagaatctgtgtgtgctagtgtgaatttgcttgtgattggatgactgtgaaaacacaattgggtgggagagggactttgagtataaccggggctatataattttgtctacggttgtctgatcatgagtatgactttgtgaggttgaccaagtgattgaggagtgactttgaatgtgtggctatgcgtatttgagtgtgaatgtctatcattagatgctgctgtggatgcttgactgcccttactcactgttccatcagtccctacatcacacactaatccttcccccagcttcactgcccagagcttaggagcacatgggaaatggctatcctagatgaggaaggagtctgtggcaacaggccgagaattagggcccaggagtgtcacaggttacacagtacatctccaactgcctctgactcacctagtgccccaggtaaaaggcacccagataaaaggtaggggaggaggagagagagagaaggaagagtctaggctgagcaacatgaaggggcccccaaccttctgcagcctcctgctgctgtcattgctcctgagcccagaccctacagcaggtgagtacttgggggtatagaaagctgggggtctgggtgaatgggatgaagttgaaaagacccaggaaatc

SEQ ID NO: 41748 - DNA, 2300 bp, Homo sapien
gctaatactcactccctagctctgggagataccaacaactctggggactctgcctcttagcaaatcaacacccaattcctgggaacatttttggtgccttctgctacctcctcttcagggatggctgcagggcactttgtcctatgagtcggggtggagaatgtccagtctcctcccctcccaatcacttcctccatcatccaggtctccattcaccatgttacttccttcacttctccttgcccaatccctcccacaaggaagcccctaaaacaggttcccagatctggtccccagcatctgcccctcacaccagggcctttcaggaagatgagttctatggctccattctctctgactccagattcaccacactgaaaggcagcctctagaccagccctggatggattgcacaaactggagactgcggaagacctctgccaaggaaagcctggccctccccagtcctgtctgccccctctgagccctgtctaagattacagcccatggcccttcctctccttcctttcccagagcaagagccacagcagttagcccatgacagtgccagagacagccctggcctggggaaccaaggaccagaagggaagaccaggcctctagttcctcggcaccagacctgacccagccaggcctggagtgtcaacatgagtgtgaatgtgagtgaaagggtgaacgtggtgaaagcatagcttctgaactcccagactgcagtgcttccaataaaaccacctagcacccatggatctctctgtctgctctctgtatgtggctcagacaagggaagacaagaatgagagggagaaagagggtgggatgagggagagaagaggggtatccattcctcacatttcaaccagaggaaactttcaccccacttatttctggtcactccctcctatacagtcagcccagccccaaaactgtctttccccttactcaaaccgactacagctcagtactgggccttgactgggatgtcagagctctggggcagctatttccaacctcccacactgggttgattgccctttcttgacaccttctacttcttccagccagcctgctccatttatagtaagaatctcactattctcttttgatcctcccagctctacccctacctctcagagggcagacaaggtgcctgtcttgtttgttggttgttttgttttgttttgtttgagacggagtctcactctgtcacccaggctggagtgcagtggtgcgatctcagctcacagcaacctccgcctcccagtttcaagcaattctctgcctcagcctcccgagtagctgggattacaggcgcctgccaccacgcccggctaacttttgtatttttagtagagacggggtttcaccatcttggccaggctggtcttgaactcctgaactcgtgatccacccacctcggcctcccaaagtgctgggattaaaggcgtgagccaccgtgcccggccacctgtcttctttactactacatccccatgcccagcacagtgcctgacacacaggtggtcattcagcaaatatttgttgattgaatgaatgtagcaaaaaaaaaaaaaaaaaatcacaagaagataggtctcagaccagagaggaagggcaatgaccctccggccattcagtgacttagccgaggccactcaactaggtatttccgtagcctggccttttctagactggactctatctgaggacctattcctcctcggcccagggtcatacaaggggaggaaggcaggcaagagaggcactcggcagggcagaagcccagggaggggtagaggagacgtggggattaagaaaacagtactggacttagtcccaactctcttttcttgctgcctgctgcggaagcctcggccccccaaggtgtagctccaaaacctgacctgacacctataaaagagggtcctttgcccgcatcttaatcaaccgaccccgcccctggcctcaccccgtaagatgacgtttcgactccgcctcctctgggagacatgaacaccccaccccttccgggggacaggcaaacctagtgcgcaacggcatccctgtgacgtaatagtaacggtccgtttccggggtggagccagggagggcgggagtttaggctgcgctgacccctctcagccccccctccaggtgaccccagcccctgaaaatcctcacccagggccccaaatctcccagccccatgaccgccaaacctctcgccctggccccctaaatgccccaggccccggagatgaccggcctcctcaccccttaac

SEQ ID NO: 41749 - DNA, 2300 bp, Homo sapien
ttggggaattaatacccctctctccttccaccactgatcagttgctgcttcccatgggccagccccaaacagaagccagaaagcaggtgaccctaagtaatgctatctgcagaggtcagccttccagggagcagagcagggccgtgaagagtggagaatggataggctggggcaaacagaataaccagaaccatcatggacagaagaatggatagatcaatggaaagaggggtggatggatgaattaatgaacagatacctgaataaaaggatagaaggccaggcacggtggctcacgcctgtaatcccaacactttgggaagcggaggcaagcagatcatttgaagtcaggagttcgaaaccaggagttcgaaaccagcctagccaacaaggtgaaacctcacctctactaaaaataccaaatttagccgggcatgatggtgggtgcctgtaatcccagctactcaggaggctgaggcaggagaatcccttgagcccaggaggtggaggttgctctgagccaagatcgtgccattgtactccagcctgggtgacagagtgagactctgtctcaaaaaaaaaaaaaaaaaaaggacaaaagaagaacaatggctaacagagcttattgtgcgtcagcctctaagctaagggctttactcagggttcctcacttaatcctaagaagtagatcttctaccattcccattttacaaataaggacactaagacacagaaactggagaattttcaccttgtcgcagttagtaagtggtggaatctgaatcccaagctaggcgctctgtctgcagagtctccctcctctgcaccgtgactacccgtgctgtgccatgaccaagtggcagacaggcggtgtggagtggaggtaaagactgcaaaccctagagcacacctgggtccaaatcatgctccagtacttactagctgtgtggctttgtgctctgagcctcatgttccttatgtgtaaaataagaataataatgtgaaaataagaaaaactacatcaatggtattgttttgggaaagttaagcaaggtaatagtggtaaagtccttgacatagagcctagcacatagtaaacaatcaaaaataccattactattattatgattaatgaatggaaagaagctaagtcagaaatttaagagggaaatgttccccctccctctctccatccaaaagagggtctagggtttgggtgacgacgggtgactgggcgtttcacatttagtttctctttcaaggccttctcttctgacctttctcataaggatgggaagtcacttgtcccctcccccatcggccgattccttgaaattttaagatttgtctgaatatgagctggccagcccctctccttagaaatcccctcttggttcccaggactgagaaaagggggaaaatgaagggggctattccaagccagtctccctccagctgttcctttgacccaggtgttggacataggaaaacagtaaatagaggaaggggagggtttgctgagccccagaggcctgagatgtgggatgggggtcctgggcctcctcccaaggtacctggcctttcagctctgcttgccccaagggaaggactggttcccacatagtgggcaggcacagtgatgaccttggaggccaccccaggatctcatggttgtcctgagggtgccagggagccttcttcaccaccagcccaagaaagaagcaccagtgaggacaagggataaacctaaggaagggagcacagttcctcactgtgggccccacctttgaccatcacttctgaaccccagcttcatggttgatgatgcaaatgccatcaatgggatgacagggcaatccctctctctggagaaacagtgcacagccccctttactgggccagactgcagacttaagttctcagagcaggagccaaggaaagcagaaggaaagggcaaccgcagggggaagaaggggggcagggtgcgattctgccagaaagaggggggcaacaggggaatcacagaatgggacatgaaggggaatttcaggcagagaaagtgaagctctggccataaataggagtcagctgcagggctcacattcccagcctcacatcactcacaccttgcatttcacccctgcatcccagtcgccctgcagcctcacacagatcctgcacacacccagacagctggcgctcacacattcaccgttggcctgcctctgttcaccctccatggccctgctactggccctcagcctgctggttctctggacttccccaggtaaggctgaagg

SEQ ID NO: 41750 - DNA, 2300 bp, Homo sapien
gttgaaacccaaagattttaaaagcagcaagagagaagtaactcattatgtacaagagattctcaataagattaccagctgatttcagaaaccatgggaggccaaaagacaatgggggatatatttaaagactgaagaaaaaaaaaagtcaaacaagaattctatatatccagcaaaactatgctgcaagaattaaggagaaataagacatttccagataaacaaaacttaggaagttcattaatagtagacctgcccacaagaaaagctaacgggagaaagaaaaaacaaacaaacaaacaaacaaatgctaaaggaagaccttcagaatgaaacaaaaggacaaaaaataataactcacagccacacaaagaaacaaagatctctgataaacataacaacatagcaggctgggcgcagtggctcatgtctgtaatcccagcactttgggaggccaaggtgagcggatcatttgaggtcaggagtttgagaccaaccaggccaacatggtgaaaccccatctctacaaaaaatagaaaaattagctggatgtggtgacaggtgcccataatcccagttactcgggaggctgaggcaggagaatggcttgaacccggagggtggaggttgcagtgagccaagatcacgccactgcactccagcctgggcgaaagagtgagactctgtctcaaaaaaaaaaaaaaaaaagtaacaacattgccaggtatgctggttcacacttgtaatcccattactttgggaggccaaggcgggtgaattgcttgaggtcaggcgttcgagactagcctgggcaacatagtgagacctcgtgtctacaaaaaatacaaaaattagccaggcatggtggccccactactcaggagactgaggtggaaggatcacttgagcccaggaggtcgaggctgctgtgagctgagattgtgccaccgcactccagcctgggtgacaaagcgagaccctgtgtcaaaaaaaaaaaaaaagataaaagctagtattgtatttttagtttgtagccccacttttttctatataatttaaaaggaaaatgcattaaacaataattataaatctatgtcaatgggaacacaatgtataaagatgtaatctgtgacaataacaatataaagaagggactaaaatgtatacgagcaaaatgtttatataccattgaaactaagttggtattattcaaactaggttgttatcagtttagaatgttaattataatcaccaaggtatccattaggaaaataactacaaaatatatagaaaaggaaagcaaaggggaatcaaaatggttatgctacagaccaggtgcagtcgctcatacctataattccagcactttgggtggccaaggcaggaggatcgcttgagcccaggagttcaagaccagactgggcaacatagcaagacctcatctctagaaaaaataaaaatgaaaaatgaaaacagtagccggacgtagtggcatgtgcctgtggtcccagctcctcaagaggctgaggcaggcagatcatttgagcccaggagctcaagactagcctgggctagacatcgtgaaacctcgtctctacaaaaaaaaaatagaaaaatcagccaggcgcagtggtgcttgcctgtagtcccagctcctggggaggttgaggtaggaggatcactcgagcccaggaggcggagatttcagtgagccaagatcaaccactgcactccagcctgggtgacagagttagaccctgtctcaaaaaaaaaaaaaaaaaaaagaactcttacaatttaataatcagatttgctggaaggaggggaagggtatggatcctggagcgtagtgaggagacagtcatggtgttccaggggagaggcagtgaggcctgcatgaaagcagtagctgggaatagaaggaaggctcaggcccagacatattcaactaatgaggacataaaatttggcagctgaggactgtccacttagtttgagataagtggggctgggtgccagcaaatccagctttcaggaaggaaaaggagtggggataagttaagggaagtgaaagtgtctagctacataaatagcaggccaatcccagcccacgcacagacccccaacttgcagctgcccacctcaccctcagctctggcctcttactcaccctctaccacagacatggctcagtcactggctctgagcctccttatcctggttctggcctttggcatccccaggacccaaggtaccaaggcagggaggggccttgcatggggctaaggggatcaagaggc

SEQ ID NO: 41751 - DNA, 2300 bp, Homo sapien
tcctagcatctgggggggctcaggtgggacttgggaggctgaggcaagaggaacccttgaacccaggagttagaggctgcagtgagctatgattgtgtcactgcactccagcctgggtgaccttgtcagaagaagaagaagaagaaggaaggagaagaggaggaagaggaggaggaaggaaggaagggagggaggggaagaagaaggaggaggaggagaagaagaagaacaaggaggaggagaaggagaagaagaaggaggaggaggagaaggagggaaattagagagaaaagtatctatactatctatactatctttccctttgtgaataaaacattgaaattcattttttaaatttatgctagactagtctggaaagatacacaagaacctgatagaagtgattgactgagggaataaaaatgagagatgagagacaaggatgaggagacagtatgttatatcttcttctaccttttgaagtttataccatttatatgtatgcttactttaaaaaatcaattaatctaagtgattaaaataaaataaatgcaaaggccctccatcaaggagggcctcacccctgctcctccaatctttcccacaattgctctccaatccattcatctgcacctctgctaaagatagactgcattttttagtatcaaatgaactctgtggcacattccttggggttctgcgtttgttaggaattttctctgccacctggaacagtccttttccctataacctgcacttttagacaaaactccaaaattaatctccccaggaaccctctctgaccaaactgatcccctccatgcattctctctcttgaaaagttgagacctgaacctcagtaatacatcaaattatttgaaataagccattggctcttgattcacgtaaatttgtcttgtcttcgaaactagatttttaagtgtcttgagaggaggaagccaacatgactcaaagtccttgtacccttgacatcacccagcttagggatgagcatactgaatatacttaccatgccagtgaggtaaaggatgggatgctggatgaatgttcaaagatttcgagcccaagaatttttttctccgcttttggctataaccattctcaccagggcaacaccttctaagaatattcagaaatcattggctgttagggaagtattgcaatattcatggaggttaagcaggtaacataaatgtataaattaatcggcagagtataggagtgatgagtcctgaggcaaaagtggaaaacagctgctctgctttaaaagtttccagaatccgactcaagcaaacaaataaaaatcctacaggcaaacagaatacatccagagatgaatagatccaaccacaagcagcaaccagtttgcgacccaaagccagaaatggctactaatccatctctacaggcattcatctccctgaacaggcagaatgctataagaaggacagaggcagctctagaaaaccatgatttggacagtattccagaagtgagccacattaatgtgcctcaaaaagattgcagcatttacaatctctccccacccatctgcaagcttgaggccacacagactggatagatacggccaccttggcctctccctatcaccctaccacatcagccataatccccttcccgcacctctgttaccaatcacccattgcctgaaacatcaaagatctccatctccaagccataaccagactctgccctccctaaattcttgtgtgcttctcaggtatatttccaaaactagtgggagagttagtggaggttcctccggcctaaccaccccttctcataaggtgcccctgtgccaaagcactcagttttctgaggacaggtgaccatacagttgtgaaggacagagccgagacatcaggctggtatagggagtggaaagtgaagacagactaggaaatagacactgcttgtggcaccttcagtcccaggctcaaaacaccctcatctacagactgaatcaccacatgagcttccctactacatgtaccttatgaaacaggagggctttgtgatgcagtctggtggcctagttccgtcctctgtgaggtggatatgacaaggcctagcactgggagtcattaggcaccagaaccctgaatgccgagatagagggatggctgatctcatgctaatgaggtttagaccatgttgagccctacttttgttctgtgggatgttggatatcccttatacacctatggctccatcttcatcgttattgtaattatctggcaagtgaaaaggagccacca

SEQ ID NO: 41752 - DNA, 2300 bp, Homo sapien
cccagcactttgggaagtcgaggcagggagatcacctgagatcaggagttcaagaccagcctggccaacatggcgaaaccccgtctctaccaaaaatccaaaaattagccaggtgtggtggcacatgcctgtaatcctagctattcgggaggctgaagcaggagaatcgcttgaacctgggaggcggaggttgcagtgagccgagatcaagccactgcactccagcctgggcaacagaatgagactctgtctcaaaaaaaagagtggtacaggctgctctctagcaaccctttcaccttgtcagagtcccagctgcccccagaccaaccttattcaatcccaccttgctttttcttttgctattcctttgaccttgaaaatcttatcttgtgcataattctgtgtcctccacttgcataaactacctccaaaaagtttgcactttctaacctctccattctctgaacaataacgtagtaaaagctgtctctcctcaacatgagaaaaactgcatgtaattaaaaaatgaaattgataaattttgatatgacttttaatgttttaataccaacaataatttaaatggtcattatgcattccttaacccaagtacctcccttcataaagtaatctgtctctcccaccttggaacttccattgtatttcattcctctattgcgcacactgattttctcttttgtattatgattatggttctctgtcaatgcttgtcctctatgagattatagttctttgagggaaagtactgtgtcttactcttatttgcaccctttctagttctcagcacaatgcctggcattgtacagatacacaatgtacttttgtgtgtgtgtgtgacggagtttcgctctgtcacccaggctggaatgcagtggtgcgatcttggctcactgcaacctctgcctcctggattcaagagattctcctgcctcagcctcccgagtagctgggaccacaggcgcgtgccactgcacctggctaattgttgtgtttttagtagaggtggggtttcactatgttggccaggctggtctcgacctcaggtgactcacctgcctcggcctcccaaagtgctggaattacaggcgtgagccaccacgcctggccacaatataaatttttttgaatgaaggaaggaattaaccgacagagatttatatgatgatgttacaacctccttttccatataagcccatcagacagcctagaaataaaacacttactaaaaacagttcagagaagtctatctgtgaaactgtcggtatgatgtaattctaaagaaagttagggggggacccccagactatatggaaggctcagtctgctttttagtgctagtttcacaacaagcaaaataaccatagtgtctcttgagaaataagcactaattttagaactaataagtactaattttagaactccatatattaatggtttatagcctctcctttctcagtggcaggactgagaaataggagcttgcggtatgaaatcagaatacctgaatttcagtctcacctccatcacatattagccatgtgaccttgggcgagttgtttaacctctctttgcctcagtttcatcactggcaaaatgtcgaaactaacagtagactccctcaaagggatggtgtgaaaattaatgacaacatatttaaaccatttagaatagtacctggcacttcgtgttttaaagtgatagaaatataccatacttgccttatatcctctattggtaaattccatgttaagggcaaaatttcttttttatatcgcaccagggtacctagcacagtatgtaacaaatactagacgctcaaaaaaatgacatgcattatatttgaggtaaataaattgaatgcacaagaaaataaaggtattttaaaaatgtaagtgcaattaatataaattaaagggctctcgacatatcatttgcatatcttcaatttttccttataattagttgctggctatcttacgattttatctttttcttgccctcttcaaagcatgtagtttggtgtaatgcacattatagccctcagaattgctggccttctgacaagctagctgtttggatattgtgagggatgaggttgctgcagcaaaaagtgggttacacgacagcacagcctcgctgctggagatgaaaaaccaataatcccagaaaacagcgcatagggtaggctgggccagccgaggattatgtgaaggttcgttgggaccctccggaggccagtggggtactgcaaaggtgagtgccccagtgccaggggtcgt

SEQ ID NO: 41753 - DNA, 2300 bp, Homo sapien
tctattgcgcacactgattttctcttttgtattatgattatggttctctgtcaatgcttgtcctctatgagattatagttctttgagggaaagtactgtgtcttactcttatttgcaccctttctagttctcagcacaatgcctggcattgtacagatacacaatgtacttttgtgtgtgtgtgtgacggagtttcgctctgtcacccaggctggaatgcagtggtgcgatcttggctcactgcaacctctgcctcctggattcaagagattctcctgcctcagcctcccgagtagctgggaccacaggcgcgtgccactgcacctggctaattgttgtgtttttagtagaggtggggtttcactatgttggccaggctggtctcgacctcaggtgactcacctgcctcggcctcccaaagtgctggaattacaggcgtgagccaccacgcctggccacaatataaatttttttgaatgaaggaaggaattaaccgacagagatttatatgatgatgttacaacctccttttccatataagcccatcagacagcctagaaataaaacacttactaaaaacagttcagagaagtctatctgtgaaactgtcggtatgatgtaattctaaagaaagttagggggggacccccagactatatggaaggctcagtctgctttttagtgctagtttcacaacaagcaaaataaccatagtgtctcttgagaaataagcactaattttagaactaataagtactaattttagaactccatatattaatggtttatagcctctcctttctcagtggcaggactgagaaataggagcttgcggtatgaaatcagaatacctgaatttcagtctcacctccatcacatattagccatgtgaccttgggcgagttgtttaacctctctttgcctcagtttcatcactggcaaaatgtcgaaactaacagtagactccctcaaagggatggtgtgaaaattaatgacaacatatttaaaccatttagaatagtacctggcacttcgtgttttaaagtgatagaaatataccatacttgccttatatcctctattggtaaattccatgttaagggcaaaatttcttttttatatcgcaccagggtacctagcacagtatgtaacaaatactagacgctcaaaaaaatgacatgcattatatttgaggtaaataaattgaatgcacaagaaaataaaggtattttaaaaatgtaagtgcaattaatataaattaaagggctctcgacatatcatttgcatatcttcaatttttccttataattagttgctggctatcttacgattttatctttttcttgccctcttcaaagcatgtagtttggtgtaatgcacattatagccctcagaattgctggccttctgacaagctagctgtttggatattgtgagggatgaggttgctgcagcaaaaagtgggttacacgacagcacagcctcgctgctggagatgaaaaaccaataatcccagaaaacagcgcatagggtaggctgggccagccgaggattatgtgaaggttcgttgggaccctccggaggccagtggggtactgcaaaggtgagtgccccagtgccaggggtcgtgagcccggagccctgcgggggacggctggtaggccctgctggatgagtcattctccccaccccgggcacgtgctggtggcggcatccacccggaccccgccttccccccacccaacccccggcgcggaacgcgagcggtgagcggccccagcgcccccaaggcgccccctccgggccgcctcctccgggcgggcactgtccttgccgcagtcggccgctggcgcagtccccgcgccgcagtgccgggcgctcgtggggggcgcccacgggcacctgggccgtctgctcatcggagccgtccgccgtcctcccgcattcccacggcgccccacgcccgcgcgcccgtcgccggtcacccgccgcccgcggagccgcgagggcgtctcctggaggcgcaagaggactgggcggggcggggcgcgcccaccggccggcccagggcacctcgcgcgggtgcacacgccgcagccccccggggcgggtgggtgtgctccggccgcgcgcgccgccgccgccgccgccgccgccgccgcctcctcagcctgccgctccgcccgcgccgcctgctgccggcgctcggcccagcacgccggctctcgggctgccgtgggctgcgcggggcccgcggtgtgtagagtccgccgccccggagccgcgtcccgcacccggac

SEQ ID NO: 41754 - DNA, 2300 bp, Homo sapien
tagagccacccacagcctgggccccacaggtgtggaggtggaagagtgagagcccccagatctgaggagccagcagcggtgcagggcccctcaccccaccttacccatctctgtgtcacacagagatgtccatccctcctccctcccctcccccttcctcactcctcctcaccccatctctgtgcctcatcctttcattactcaccccttctttcctcatccctcaccctgccttcctgcccctccccagcccttctttccttatcccccaccctgccttccctcccctccccagccctcctttcctctgccctccttactcccaccctatggctcatctgccccatgcccctcccctcctcatccccctcaccccatctcaccatcctctcaccaccccctctccctacctccccccctcaaccccatttcctcaaattcctcatgctcatttccccacattcatcacccatctctgctcccctcctggcccccaaccccacttcctttccatcctcctttcaccccaagtctctttcttccttcacacctcatgcccctttacccttgggagccccatagtgactcctggcatgaaggtaggtagtgaagaatctacagacatgactccaggaccctggcaccccccccccgccttgctctgctcttggcccaggtactcaagctgcagtttctagcaagacctcatgggtgtccaaactctgtctctggaaaataggaaagaaagaagtaaaggggagcttccggcctgacccttctatcatcatcaaccccccagcactcccctcccccacttcacccccaaattactccctccccacccccgctccctcgagcacagatgggcctgggagacagtgacgtgggcgccaggcaccgtgtctgctggagtggcggcttccgctggcgaccgcctccgcagccccgcctgctccctgcatcggggacactggggctgagatctaatgacttaatggggggtgggggagactagagattctgagggtgttaaggaaggggatcttggggagtgagatgaaagatgaaaggggagagctaggataggagatcggggtgtaaagaaagaaccaagaataagacaaaagggatcactgcgggaaggaagacaggagatcatctagggccaagaaggaaagggctaaaacacaggcactccagggggaagcaggatgagagactgattagaagagggactgaaatggagaccgcggggtcgctgaagaggggcgcgaggatgaggggctgtacagagggtgggcgggggagattcctggaggcaccggcctgggcagagccatccgtttccctcgggggagaggtccggggggctctgaaacccggcatccgtggggtctgttagagattccgttaggtcacatcaggccaccgcggggtcaggataaggtaaagctaaatgaggtcagcttgaggtggttacaccgttggctgaaaggcgagtaagaagtgctgaccttttggccccggtccagggactacacctcccagagtgcactgttctctccctcttgccccccaatgaagaaaggaaagaatgcacggccgcacggccaactggtgggtacagttttcctttaaggctgcctttgacgtcgcaagggttccagaaggttctcctgggattcgagcagtggccagtacgtcccaccttctcaacccggagattggactaatatagtttgcccccgggctcgggtctgagtctcaggcacgaaccaataaaatcaaagggcgagcgaggttgccgccctctgtctttttcaccaatggcacgacaagatggcaaagaggcgtggttgagtgatcccagagggcgccaatcagatccacaccaatcactgcctggaatgtgtgcgcgtgtggccgggtgacaggggcggaggatgggcggctatcaccaagccgcttgttgaaaactgcccaatcacagtggaggctgagctgagtgacaggaagacggttcaatgggcggcgcggaggcggagccgtgggggcgggctcccggtcccgctatcggcggccggcgggcaggcgactcctgtcccgggtggaggcggcggagccggagccgggggagggggcagcggctgtctcacggaccacggcggcgcccgcagctcctcaccggtgagggcgccaagccaggactcgggggtcccgggagcggggcgtcgtgaagccagggctcctggtgttggggggttgggacactgagggcccgtaggctctgctgccttggg

SEQ ID NO: 41755 - DNA, 2300 bp, Homo sapien
acatcctcactttcttggttcctcaaataaagcattaatcatctcctctgggaagcacccctcaccatcaacctccttcttcagactggtgggaatctgttctctggccccataaaactctgtgcgcatctctattttcattacctgttacttcactgatcccccaatgaaatgggacctagtttagtgcaaagactctatcttacttctgcagtttaaagactgagcacaatacctggtccataacaggcattcaacaaatgttacatgaatcaatcaatcaatctagtccaactcatggtaccaatggagaaacctctctttggtttctcaagatcatgtggtggatcagtgatggagctagagaacccaagtctcctcactttcagctcagcacactttccaccagaacaaatcagcttttaatgaggacagggattgaagcgtggccctgaaaggaagggccgacatggaacaaagtggtggttttagggggaaatggaggaaatgagaatggcaaagcacatttatttgtcatccttaacatgaatgcttcacagttcacagctgacacgagcataaaaaagaggggatagaccccaaccattaaagacagaatgaagcttataattagaaaccttaaatagaaatttaatacagcatacattatattattctaagcatatatatttattcatttaatccttgttagaaatgcttgttccccagtgccgtgaagaaatagcacttgaacataaatttaatttcctcagcaaggctatttttactttctgcagaaacggtacactcaccagcagttttgccatgaagagtacaccgaacaaaggaggcagggtcatttatagcctgacgcatccaccctactgctgtgtccggtttccattggctggaacaggacctcgctttctgtatttgtcctgattggctaacaacttagaactttttaaaaagaggcaaaggcagagaacaaaggaaggaggaagttaacttgtggaatgctgagaaaggtaaaaacaccttcaaataaggaagaggaacaggctatgacctaatgcttgcttggaccaatataagcatgccagggcaaatatttaggctaaattgtggaagctaagaacataaagtaaattgatttattacggctagcagatatttaagaatgttaacagaggtctttgaataaattttgcttctaagagatgttactatttattcctaataagatggagaggaaagtctttgaagaggaacctctactttactttttacatcctcaaaacaaccctgtgtagtaagtaataatattattgtgctgggtagagtggcccatgcctgtaatcccagctactcagaggctgagatggaaggctctcttgagctcaggaggtcaagaccagccggggcaatacaatgagaccttgcctctaagaataatatgccaggcaagatggttcacgcctataatcccaccactttgggaggccaaggcgggaggatccctagagctcaggagtcgagaccagcctgggcaatatagagagatcctgtctctacaaaaataaaaaatataaaaattagctgggcacggtggcacatgcctgtggtcccagctactcaggaggctgaggcaggaggagcacttcagcccaggaggttgaggctgcagtgagtcgtgatcacaccactgcactccagcctgggtgacacagtgagattctgtctcaaaataataacaataaatatctataaaataaagataatgatatctttattttatagataagaaaaatgaggcactgaaaaaattaagtagtttgagttttcacaggtaggaaaatgacagagctatgatttgaataaggcagttcggtgctagaatccatgtacttaaccacaatgcctgaagcataattctgaactgggcaatcaaaaggggatcacccacatttcactgtgtgaagcatgaattgcctgatagaggaaattttttttggttctaaattcagggagaaggctgttaagcccaggcctctgtgggggatgggagttctttgttctgtgatgcaatgatgacctcagggtaaactgccagaaggctaagggaaatggaatggctgctggaggacctgcttggggctaagggggatatggggcttctctggggccaactgacccatgccctagcctgcagacactgcggcagcagctgcttccagagtccaggaaatctggtgacactattcttattcgtggtttggcagattcagagatggtggcag

SEQ ID NO: 41756 - DNA, 2300 bp, Homo sapien
taacccgggagagaggaatagttggagccagacctgggatagctctcaatgtgagtgattttgcttgttcttgcataattttaggcaagaggttaccccatcttggagtcatctctagccactcctacccaaccaaccatcacctggccaggatcatctcaggcttttgattcttttgaatggagtctaagtttcatgtagctttcttcttgggagtgcttagtcacttcctcaaggtgttctgaccacctggctgagataattttgtttttttcacttctgtttcactgaccctgacaattgttagcttaagaccttcccttgtaatattgggtcaccagtattagctagaaggggatcatccttggatatctccctgaagaccctgcatgtctttgtggggtttctaaatgtgtggctcttgattttggctcactgattaggagtgagtggggctgttccttcgccctcacttccaccctgttctccttcctctcttcgcctaaagccatcctgccttttctttttcacttactatcagctatctgtgccaggcccttttggacacccagtgcttgggcccgaagtgtggttggtaatatggagtctgcttgtcatcctcagcatccagccatgccctgatgtgaagtacggcaaacgtatccatgtgctgcccattgatgacacagtggaaggcattactggtaatctcttcgaggtataccttaagccgtacttcctggaagcgtatcgacccatccggaaaggtgagagctaattctgagcttaaggattattgactgtagggaataaaccttggaacatctttatctcattttctttttctttttttttttttaaatcttttatgcttttcccctgtatttatttattcattttttaagagatggggtcagctgggcaccgtggctcacacctataatcccagcaatttgggaggctgaggcgggtggatcacttgaggccaggagtttgagaccagcctggccaacatggcgaaaccccatcgtgggcacctgtaatcccagctacctgggaggctgaggcatgagaattgcttgaacccaagaggtggaggttgcagtgagccaagattgggccacagtactgcagcctgggtgacagagcaagactctgtctcaaaaaaaaaaaaaaagagacagggtctcactatgatgcccaggctggtctcaaactgctgggctcaagtgatccatctgccatggcctcccaaagtgctgggattacaggcatgagccatcaagcctagtctcattttcttttcttttttttttgagacagagtgtcgcgctgtcccccaggctggagcgcagtggtgcaatctcggctcactgcaacctccgcctcctgggttcaagcaattctcctgcctcagcctcccaagtagctgggattacaggcgtctgccaccacgcccggctaatttttgtgtttttagtagagacggggtttcaccatgttggtcaggctcgtctcgaactcttgacctcaggtgagccactgtgcccggccgctagactcattttcatatatttgtatacacacacatgcaaaccctgcacacatattcatatgtcttaccctctttttttcctccatccttcctttgctccatctctccccttctctgttccaggagagtaagctatctttatggatctctgaaggagaaagtggtccattttggctgggtcagggtccagagtgcacagttctaccattggtggttgtagtgaaaacttgggctacctatatggcagaagtcagaacttgatgggcttctgacatgtcaggttttgttcactgacctcttgtcagagggactcttcacagtttacctttctcatcttgcctgctgcttattaagacaggtggggtggagttggggagaggtagggcaatatctaatgaagggcactatctaatgagcttggcattttgaccccagggtctgatgagttctcactttgtcttgtagttgacacctctaactgtgcttgtactgtttgctctcgcaggagacatttttcttgtccgtggtgggatgcgtgctgtggagttcaaagtggtggaaacagatcctagcccttattgcattgttgctccagacacagtgatccactgcgaaggggagcctatcaaacgagaggtgagttttctccctgattccagtatccgattttatgattactcagtgtggcatcatgtggtaactgtcaggactgggtgctcggccggctgcggtggctgacacctgt

SEQ ID NO: 41757 - DNA, 2300 bp, Homo sapien
catgactctgctgttgtgggttgcacaggagtagggggcagatgatggacactgggatgggaatggttgtgaatgatctgcccccgcttccatatgtgagtgtaggcaagatacttcctctctctaggcctcagtttccctttttataaaacaatgcctaagactatgtcaagttctaagactctgtactctgggctggggctacaggtaatcgagacacttactttcacctgcttcagactctgaagaggctagatcggagggatgaggccactgcactctggtggaggctggaggcccaaactaaggggtcacatgaagatgctctgtggtgaggctcaggcctgctggcttggggctgaggggcagttggtgtcctagagtccttggacctattgtgggtggtgaacactgaaagcgggggtatggctgcccagctttctgccaatctttcacccttaggcatcatccttctttctctccaggtctctccccctgtacctagaaagctatttgagctggatccgtccctctgatcgtgacgccttccttgaagaatttcggacatctctgccaaagtcttgtgacctgtagctgccacgttttgaagagcttgagctgggtccccagtgggctgtctctctgtggggagggctttctgcttcaccatcattaggaatgtgaccattcctatataattcctggactggtgagattggtggtaggcctgtgaaatttgccctagttactaccattctcgttttggaggaaacaatctctgccaccaccaagtcattgactttgctcgaggcaccttttttcctgtttctccttttctgttgtcgagtaaaatttcatatttatctcgtctgcctactacatatacttgcgtgggaaggcttgtgaccgtctagttgagtgctagttgtctatgatgccctttcctgacatcgtctaccttatgaacttgaagtctgggtatgaggaaagggctacaggaatcctcactttggaggcagtggctttagtccttcacattgcctgaatgcagagccccaaagcccaggacagtgacaatgagtggagttgggtctgaagggtggtctagataggcctctcaggacaagggcaggtacctgttacttagagacaggcaggtttctctcagagtaactcttcactcccttcctaattccaaattctagaaattcgactcgtcttagtcaaatgtgtctgtgtgggtacagggtgaaaggtgaattgagtcagcatatcaccaacagctgcctgttgactactaacagggacccctgttatttggggcccaaggattttcaagtcccagcatatgcagttttcttgctaatttgggttctactgaattggctgtgtgttctgtggttgccctttgacttctctggatttgagtgccttattataaggtattaatattaatgacgggaggaagaaaggcacaagcgctgagaaactgcaaaggctgtgggattggggttaccagagggtgcagtgacaatggggtaggagtggggtgctagtcagaaagttcagagtaggggtggttggaggcagcgttgagaaggagcaagaagtgtcagggtggtgatggcgtcttagaagatctccaggttttgggagaagatgggtgtatgggttaccacaataggactagactaatacaagggttcagtctattgtgccacgttcttccaggaggataaactccggagccaatgaactggagccaagtgggagagtccgcctctaagggattaaagggtctcctttcactaatcgatctcgccctattcctttcgttgattggctgagaattccaatccgtcgaggaagcgtagcgttgcggccaattgacgtggcgttactaggcgtgtcgcatcactgaggcgggagccaggccgcaagcgaatttcctgattggctgtgatctgcgggttgctggggagaggcgcggagaggcgggcgagagtccgcagggcaggcgctgattggctgaggtgggagcagcttcccttccgatgattcggctcttctcggctcagtctcagcgaagcgtctgcgaccgtcgtttgagtcgtcgctgccgctgccgctgccactgccactgccacctcgcggatcaggagccagcgttgttcgcccgacgcctcgctgccggtgggaggaagcgagagggaagccgcttgcgggtttgtcgccgctgctcgcccaccgcctggaagagccgagccccggcccagtcggtcgcttgccaccgctcgtag

SEQ ID NO: 41758 - DNA, 2300 bp, Homo sapien
taatttttgtatttttagtagagacgaggtttcaccaagttggccatgctggtcttgaactcctgacctcaagtgatccatccacctcagcctcccaaagtgctgggattacaggcataacatggcccggccctggccatgtttttaactgtgtttctctaatagctaataatgccgagcatctttttatgtgtttcttagccattagtagatcttttttggtaaaatgtctttttttttttttttggtccatcttaaaattgttttttgttttgttttgagacagggtctcactttgttgcccacgctggagtgcagtggctcaatcatggctcactgcagcttcgacatccctgagctcaggtgatcctcccacctaagtttcccgagtagatgggactacaggtgtgtgccaccatgcccagctaatttttgtattttttttgtagaggtggggttttgctatgttgcccaggcaggtcttaaacttctgaggctcaaatgatcctcccacctcagcctcccaaagtgctgggataacaggcatgaaccaccacacccagctaagattgtttttaaaaatctttttcttgagttttgggagtttttatgtgttagggataccagtcccttatgaggtatataattagcaagtagtttctcccactctgtgactgtgacctttctttttttgaggcagggtctcactctgttactcaggctggagggcagtggtgtgatcatggctcactgcaacctggaactcctaggctcaagggctcctcccacctcagcctcccaagtagctgggtctacaggtgtgttattgtgccagggttaatgttttaaattttttgtagagataatgtctctacaaaagacaccatctttgttgcctaggctggtcttgaactcctggcttcagggaatcctccagcctcagcctcccaaagtgctgggattacagcatgagccacatccagcctatgatttttcttcttttcttttcttttcttttcttttttttttgagatggagtctcgctgttgcgcaggctggagtgcagtggggcgatctcggctcactgcaggctctggcccgcggggttcacgcctttctcctgcctcagcctcccgagtagctgggactacaggcgcccgccacatcgcccggctaattttttgtatttttagtagagacggggtttcaccgtgttagccatgatggtctcgatctcctgacctcgtgatccgcccgcctcggtctcccaaagtgctgggatcacaggcgtgagccacggcgcccggccccagcgtatgacttcttaatgatgtctttgtagtacaagagtttttaattttaataaagttaacttttttttaaattgtacaagcttttagtgctgtgtctaacaacttgttgccaaacccaaggtcataaagctgttctcttacgttttcttttttttttttttttgagacggagtctcactctgtcacccaggctggagtgcaatggcacgatgtcggctcactgcaacctccgccacccgggttcaagcgattcttccgcctcagcctccggggtagctgggattacaggcgcacgacaccacgccctgctaatttttgtatttttgtagagaaggtttcaccatgttagttaggctgctttacgttttcttttagaagttttatatttttggctcttatatttagtttgtgatccattgagttgattttatgtacgtatgtatggtcgcgttcttttctttcctgtctttttttttttttttttttgcatatggatattcaattctcctagctccatttaatttgaaatgattgggcaggtacttttgagcagtgcaagtacagagcggcactgccagcagactacacgcggtagaaagccgaccttggtgagcgtgttggtgctcgacagtgagcagagaaaggatggacgattacggagcgccctcgtctccagttaccgctttctggaaacaccatccgccggggcggagctgttccgccccggtgcggtactacgactcccagcatgcacctcgcagtcggccctcggtggaagcgggaacccaggaggacctgggggtgtggcagcgaggaagggccgagccacggactgtggggccgaaactcgctcccgcccaccctttctcgaggctgtggcctccgcgagagccgagcgggccgcaccgccggccgtgcgactgccccagtcagacacgaccccggcttctagcccgcctaagcctgtttggggttgctgactcgttt

SEQ ID NO: 41759 - DNA, 2300 bp, Homo sapien
gtagttaccggaggaggcagagccggtcgcacgcctgggtcccagcggaggcccagtcgactctcgacccgggccccagcctccttgcgtggcgaaggtcgtgcctcaggtctcctggcgaacctggccgcccggaagcggagagtgactcctccccttcgtcccctcggtgcccgccaggcggcgccgtcggctgggcccggattcccctgcggcttcgatccctttccactgggtattgagattggcgaggggagaggcgcagaaacggcgtgtaagagagcctgactaccaattggaataagtttccctcctgactgttcacatgtacaggcagcattagcatttcctgcctgtacatgtgaacgttcctatgctctacccctcgaagatcctgattcagtagatctggggtgggacctcatgaaacggcgtctccctctgttgtccagactctagtgcagtggttcaatctcggctcactgcaacctccgcctccccgattcaagcgattctcctgcgtcagcctccccagtagctgagactacaggtgcccgccacccatttttgtatttttagtagggacggggtttcgccattttggccaggctggtctcgaactcctcacctcaggtgatccgcccgcctcggcctcccaaagtgctgggattacaggcgtgagccaccatgcccagcctggaaataggaggagagtaatattgcgaggggttggctgtgaaatggtttatctccaggaaggtttccgggaggaagtgattctagctgggcttgtattcagggaccagaatatccactggttctttgccccacagtaatgaatttacttccccacccctatcaggatgcagaaagcctcagtgttgctcttcctggcctgggtctgcttcctcttctacgctggcattgccctcttcaccagtggcttcctgctcacccgtttggagctcaccaaccatagcagctgccaagagcccccaggccctgggtccctgccatgggggagccaagggaaacctggggcctgctggatggcttcccgattttcgcgggttgtgttggtgctgatagatgctctgcgatttgacttcgcccagccccagcattcacacgtgcctagagagcctcctgtctccctacccttcctgggcaaactaagctccttgcagaggatcctggagattcagccccaccatgcccggctctaccgatctcaggttgaccctcctaccaccaccatgcagcgcctcaaggccctcaccactggctcactgcctacctttattgatgctggtagtaacttcgccagccacgccatagtggaagacaatctcattaagcagctcaccagtgcaggtcagtgtgggccactttgaaggccagaagtaccttggcaaatttcttcaaaatttgaagtcagggagtcagacctttgggtgcccagatgcacacttgattatggtgtagggggacagaggagaagaaagaggccagggccctgctggtagggagctcagtttgggggacagaggagaagaaagaggccagggccctgctggtagggagctcagtttgggagacagaggagaagggatctgggctttgttcctatgaagcttctaatctgaatggagtgtaagttttattcttggagacctctcagtaaaagggagaagggaagaagagaagatgtggatcttggcttgcaagtgtggagaagaaagcagagaaatacaggccctgttcattcactgactgggaagaagcaggatacacccaggaaaaacaactcagtagagatacccagagacagaactaggagagcattttgtaggaaggataagtgtgaggtctgggtggagtacggttatcagggaaagcttcctggtggaaaatgttaggccctgaaggataaggattgctgtatggaattgctgtactttaggttgcatggttgggacttctgatgggtctttaaagggcctcttttcctcttttctcctaaccctgacgtttgctcaggctctgacttctctttcatgtccctgcaggaaggcgtgtagtcttcatgggagatgatacctggaaagaccttttccctggtgctttctccaaagctttcttcttcccatccttcaatgtcagagacctagacacagtggacaatggcatcctggaacacctctaccccaccagtgagcatggggccagagcacttagttctaagactgggagctggggagaactgctttagtccacaaattctgagccacctatgggtg

SEQ ID NO: 41760 - DNA, 2300 bp, Homo sapien
gccaatgcaagaacttttactctgagatgagaaaccagtggacgggttttgtttctttttgagacagagtcttgctctgttgcctaggctggagtgcagtagcacgatctcagctcactgtagcctctgcctcctggcttcaagcaattgtccagtctcagcctcctcagtagctgggactacaggtacacatcgccacgcctggctaaattttgtaatttttagtagagttggggtttcagcatgttggccaggctggtctccaattcctgacttcaactgattctccagcctcagcctcccaaagtgctgggcttacaggtgtgagtcatcgtgcctggcatttttttttttttttttgagagggagtcttgctctgttgcccaggctggagtgcagtggtgcaatctcggctcactgcaacctctgcctcctgggttcgagtgattctcctgcctcagcctcccaggtatctgggatcacaggcgcccgccaccactcccgggtaacttttgtattttcagtagagacggcgtttcgtcatattggccgggctggtcttgaactcctgaccttaggtgatccacctgccttgacctcccaaagtgctgggattacaggtgtgaaccactgggcccagcctcccctcctccactccgaaggattatttgcttaattattcagtcgtaagatttagttacaggctttgaaaggaggagtaatgaaatctcagttggactcagctaagcaaaaaagggaaaataagtattatctccattttacagatgaggtaatgcctaatgatgacaatatgtgcggccaagctaggattcaagtcaagtttgactccagcagccgtgctcttagtcgtaaccatgaatggacagtggttccctgaactcttcctccagcttggtcccctgtccccaattttcaattactaaatatcccatcaaactggggccagccccacgctcctggccaaacttccaccgaggtgccggcagatggcgatggagccaccgacgggccactctgtctggcgcacgcatctctgtgctgccaggtcgcaggcgccgccgccgccgcacttccgggtgccattgcaggtgagccagggtctcccgagaacctcaccccccggtattcccctcaccctgaagtaagggagtctccctcttcccctcagctcctaaccaaggtgctcagtaccgcggctagggtgcccagcgggaggctgggtagttaccggaggaggcagagccggtcgcacgcctgggtcccagcggaggcccagtcgactctcgacccgggccccagcctccttgcgtggcgaaggtcgtgcctcaggtctcctggcgaacctggccgcccggaagcggagagtgactcctccccttcgtcccctcggtgcccgccaggcggcgccgtcggctgggcccggattcccctgcggcttcgatccctttccactgggtattgagattggcgaggggagaggcgcagaaacggcgtgtaagagagcctgactaccaattggaataagtttccctcctgactgttcacatgtacaggcagcattagcatttcctgcctgtacatgtgaacgttcctatgctctacccctcgaagatcctgattcagtagatctggggtgggacctcatgaaacggcgtctccctctgttgtccagactctagtgcagtggttcaatctcggctcactgcaacctccgcctccccgattcaagcgattctcctgcgtcagcctccccagtagctgagactacaggtgcccgccacccatttttgtatttttagtagggacggggtttcgccattttggccaggctggtctcgaactcctcacctcaggtgatccgcccgcctcggcctcccaaagtgctgggattacaggcgtgagccaccatgcccagcctggaaataggaggagagtaatattgcgaggggttggctgtgaaatggtttatctccaggaaggtttccgggaggaagtgattctagctgggcttgtattcagggaccagaatatccactggttctttgccccacagtaatgaatttacttccccacccctatcaggatgcagaaagcctcagtgttgctcttcctggcctgggtctgcttcctcttctacgctggcattgccctcttcaccagtggcttcctgctcacccgtttggagctcaccaaccatagcagctgccaagagcccccaggccctgggtccctgccatgggggagccaagggaaacctggggcctgctggatggcttccc

SEQ ID NO: 41761 - DNA, 2300 bp, Homo sapien
tagtagctgggattacaggcatgcgccaccatacctggctaatttttttgttttttgtagagacagggtttcaccatgttggtcaggctgatctcgaactccagacctcgtgatctgcccgcctgagcctcccaaagtgctgggattacaggcgtgagccactgtgcccggcctatgaagggtttttttcccttcccatgaagaattttaagataaaacatcacattggccaggcacagtgactcatacctgtgatcccagcactttgggaggctgaggtgggaggatcacttgagcccaggagttgaccagcctgggcaacatggtaagaccctatctctacaaaaaagaaaaaaataacagtaatcacattaatgttttagttagagctgtcttgctgcaatgtggagaagggatagtagggagacacaggaggctgggaggacagtgagaaggctgcctcagtgatcctggagaagggatgaggtctgaactgagataaggggctatggggatgaaggtggaagaataactcaactttttttaaaaattaacatattcctttattcgtttggtcagtatgtgaacctcaaatatatgctaggtgctgaggatatcatgaagaaaacagaattccctgacctcaatgagctcacattctactcggaggggataaaccataaatacgtgtagaatttcagatgctgatgagttgtgctatggaagaaattaaggaagtgaggggaaatttttccagggggtgtggtggtgggaggtgctgaactagtaaagtaggggattgcaggaagccttgctgatgttacagttgagcttcaatatgaaggtgatggagatccatttcggcatcgggaactgaagctgacagaggagatggcaaatgcaaaggtcctgaggcagaactgctgtggatggaacagagttagggaagcaaagaagtggcagctagatgaatcagaaggggaagaggcagatagtgtgcagggccatgtagagccaatgcaagaacttttactctgagatgagaaaccagtggacgggttttgtttctttttgagacagagtcttgctctgttgcctaggctggagtgcagtagcacgatctcagctcactgtagcctctgcctcctggcttcaagcaattgtccagtctcagcctcctcagtagctgggactacaggtacacatcgccacgcctggctaaattttgtaatttttagtagagttggggtttcagcatgttggccaggctggtctccaattcctgacttcaactgattctccagcctcagcctcccaaagtgctgggcttacaggtgtgagtcatcgtgcctggcatttttttttttttttttgagagggagtcttgctctgttgcccaggctggagtgcagtggtgcaatctcggctcactgcaacctctgcctcctgggttcgagtgattctcctgcctcagcctcccaggtatctgggatcacaggcgcccgccaccactcccgggtaacttttgtattttcagtagagacggcgtttcgtcatattggccgggctggtcttgaactcctgaccttaggtgatccacctgccttgacctcccaaagtgctgggattacaggtgtgaaccactgggcccagcctcccctcctccactccgaaggattatttgcttaattattcagtcgtaagatttagttacaggctttgaaaggaggagtaatgaaatctcagttggactcagctaagcaaaaaagggaaaataagtattatctccattttacagatgaggtaatgcctaatgatgacaatatgtgcggccaagctaggattcaagtcaagtttgactccagcagccgtgctcttagtcgtaaccatgaatggacagtggttccctgaactcttcctccagcttggtcccctgtccccaattttcaattactaaatatcccatcaaactggggccagccccacgctcctggccaaacttccaccgaggtgccggcagatggcgatggagccaccgacgggccactctgtctggcgcacgcatctctgtgctgccaggtcgcaggcgccgccgccgccgcacttccgggtgccattgcaggtgagccagggtctcccgagaacctcaccccccggtattcccctcaccctgaagtaagggagtctccctcttcccctcagctcctaaccaaggtgctcagtaccgcggctagggtgcccagcgggaggctgggtagttaccggaggaggcagagccggtcgcacgcctgggtcccagc

SEQ ID NO: 41762 - DNA, 2300 bp, Homo sapien
gacacagggctcccctacgaactgcaggctgtgaccgaggcccctcataatccacgttattcacctttgccctgattgccagcactctgaacccatgcgggctaatgacctgcccatcctgctccatcttagagaacatatatggagagacagcaagagacccttcaggcttgaattaaagccctcaccatgctcacgcccaaatggattatttgggtgtttaaagcttctgattcttactacaccctgccctacttcgggtactccatgtgcctgtcccctcccttgggtttcccaggccagcttaggtagtagggaggaactggagctaccctgagattttctcaagttcccaggcaagttatgccagcgttgcctccctgtcctgggcaggggccacttgttattttatttatttttaatttataatttattcaaattggattgccttggtaacctcccacacctgataattggcatcactcctccccgcttcccactctcagatattgctccaacctcaggagttgaagaggcttatgcggtgggggcaggaggagaactgctttccctcagctgagggaagaggggctattccagagggactgagtcagtagccaaagactcagcttcccctgtccttccccagtcccttcacttcccctaccctctgacctatctctgaaagccaagttatgcgtatgtgtgtgtgcacaagcttgtctttgtgtggtatgtgtgtgtgagtgtgcatgtatgcacacacacaggggttaaccacccctcacctagggctccagactccagttgtccctctcctcctacctgtgtctccttgttttggggtcctgactgaagaaggtgtccagggggcagagtcagggccaagcactggggtgcctcctctcacctggccagactctgacccacctacctcagctggggtgaggggcacccctcaaactcagtcatgtggttccaaactaccccattccccactccagactctgacccagcctcagtcctaactcctggggctgggctgaggggaacaagcatttgctgaaacttgaaaaaacaaagcaaatcaaaaacaggaaaaaattgtacctggtacttttttttagaaaaaaagattaaaaaagaaagaataaattcttgtttggaaacttgaactaagctctacttttgttgttgttgttgttgttggggagagggtgtgaagggggatggagggccttcctggagctgggactcagccctttctaccagagaggcaacaggcctgggcccatgaggtcttaggctagtccctgctgattcctggggcctggtttttctcctttcggaggggttggtgggtaaagttcagccgtagaagctgaactctgaattgtagatcaggattctaatactggttctattaatgactttagcccctcagaacttcagtgccctcatatgtaaaatggaggtgactacggaggtctcttgactaccagagcattagggatgtgggcaaggtgacatgctccagacaaggttgaacgttgaggctgtttgctggactgtatttaagaccgggcataacaaaccttgcttgggaagacagggaaggagctgcagtgtctttgaggaaagaggggaggggaaaatctcggcccaatcgccaggcaatattaggcccagtttccatggcaacgggattggggtcagtccccagtgggagtcctgggcacaacacagcgggactaccagagaatatcactatggcaaccatggcaacgagtcagctccaatccactagtcgctatggtgacagatgggggcgatactacgctctggtgggcaaactgagtctcgggtgaggacgaataattcagtgcgtggtgtctgagtgataatgcccgcgaaaaatagcctccattttggccatcaggccggggatcttcggcgtgaacagctaaacccagaacaaccacagccttcgcccttctctagaaggtctgcgtttcccagggaacaacttgacgcgccgttcgaccaagtaacgctgattgggtgagtgttgaagcgggggagggagctgccggaagtacatccgggggagcggaactgcaagaggaaaggctcgggtaggcttctgggagcgaccgctccgctcgtctcgttggttccggaggtcgctgcggcggtgggaaatgctggcgcgcgcggcgcggggcactggggcccttttgctgagggtgagagcgaggcaacctttccagagggtcaggacagagattacctgggttctc

SEQ ID NO: 41763 - DNA, 2300 bp, Homo sapien
gggcaggaaggtaaggcctctttatttatttatttatttatttatttatttatttatttatttatttttgagacggagtctcactcactctgtcacccaggctggagtgcagtggtgcgatcttggctcactacaacctccgcctcctgggttcaagtgattctcctgcctcagcctcctgagtagctgggattacaggtgcgcgccaccacactcagctaatttttgtatttttagtagagacggggtttcaccatgttagtcaggctggtctcgaactcctgagcttgtgatccgcccactttggcctcccaaagtgctgggattacaggcgtgagccaccgtacctggtggtaagtcctcttggttgtaccctgctgctttcccagggtacactgaggcctggaacatctttgatccttcaccctgaactattgtcctctgacctttgtaggtaaccaaggcctggcctatggtagtggcagaaagatagaataaggtggggttgctaagggattatttttttcctacagtgttctacgtctctgttttcctagtaagtttttattaaggcaagtaggctcttacattgatacactgtaattttgacaagggcattgaaaatttccttaaccctgttccttacactagggaaccggcaaggaagtcagcccaagggaactgggttcttattcagagttttcctcttgaaaagggtggtctagggtgaggtaaggagaagggagcttagagggactgttacttgcttgtgtctcccaagtctaggactgagggactagggggaagaggaaggagcctctttttactatctagtgatataacctcagggccctggggggtccacagcacaggcaaggcagaaacaaggaccttgggctctctgtggcctctgaactgtagaagaatggactttccctctttggctctggtgtttgcctcctgcttctgtgaaggaccgggagaaaaagcctcctaagtcccaaattatccgacttgctgacaagtgcagagggcagggtagacaggactattgcttttcttagtttacctctagagtaccctctagaaagtgtctttgaatgctcaatccttgcaaaggtttccatcctggtcatttaaagaataggaggacaagggttagggatgccggttctgctgccatttgatttgactgggtctgaactgggctggggcccagtgactcagtgggagggtggatagttttgagggagctgtgagtcatggggttgagctccatcacaagagttgggctcatttcccccattctgggcagaagctctcctatcccacttccctgtatgctctgtctccttgaacatgggcctgtgagtagaaagagtgctggcaggctgatctcagaaagggagttcagaggcacaaagaataatgctggtccctgagattaaaatgtatccctatcttaggaacccgtggggctcctctaaagaaggcaaaagaacatcaatttaagagtaacagagggaaaagtaccacttcttaacatggaaggagatagggtcccacctcaggcctttttcttctctggcatggaggaagcttcctgggcttcactagttctccagctctgaagctttggtttggaaggtggggaaagacaaatgggagtgaggtatttggggtctggggtctggtatagacagcaggcagactttgagggttgtcaaaccgtatctttaaagccctcgggcttcctattaaccgtcctggaaggaggaagggcgggggagtagggcggaggggtaagatgtggaaggcctacgcctttgaaagggttaaatggcagggcagggtgttgctttggactccggcagctgtcgggttaaggagaagggcggagcgaccttgggtaagcctacccccttatggaccaataggcgtgtgcctcttggagggggcgtgcctcgcacttgaggtcgcggggaggctggcttcctatggaccaatgagcatggtcgctttccagggagggcgtagcctgaggggggcgtggcggccgtggccgccgcggcgcgggtggtggggcactgggcggggcgggcggccccatcagctggtaggaaatggcctgtgagtcagaggggcagtggagtcggcggcgcggagccggggcggccccggggagggaccgtcgcagggaggggcgcggcagcggctggggggctgcgggcgccagggcccgctagtgttgcacacgaagctgaacagcgaagagcctagcagagcagggctcagcctga

SEQ ID NO: 41764 - DNA, 2300 bp, Homo sapien
agcctgggtgaaagagcgacaactccgtctcaaaaaaacaaaaagaaaatcagaataaagtgtgggttttagttattgttaatgtatcaatattggcttattaattgtaataaatgaaccatataaggaaagatgttaataataggagaaactaggtgtagggtatatatgaaaactctctgcactatttttacaagttttctgtaaatctaaaattgttctaaaattaattttttaaagtcaaataatttacctaaatctatacagctagtaaatactcaaaggtatgagacaaactcataagttgaacccataagttgaagtttgaagttgaagttgaagaagtttagatgacttcaaactctgtggttttcccactacccaaaacctttcttagtttacccttctgggattatgtaggcatttgtatcactgtctaaataataagttccttatggccagagaaaatacttttttctttcttttttttgcgcttccacaccactgacgttgagtaaaccagtttaagttaactactgacaaagtcacagagcctaaagaatctgagatttggccgggtgctgtggctcacgccagtaatcccaacactttgggcagccgaggcgggcggatcgcttgaggtcaggaatttgagaccagcctggccaacatggtgaaacctgtctctaccaaaaatacgaaaattagcccggcctggtggcgcgcgcttgtaatcccagctactctgaaggctgaggcaggagaattgcttgaacccagtaggcggaggttgcagtgagccgagatcgcaccactgcactccagtttgggcgaaagagcgagacgccgtctcaaaaaaaaataaaaaagaatgtgacttttgtagaacttgatcaaatccagacccaaacggtccgctcctcggagaggccacagatcggcgctgagctgggctgtctcagttctgcaagtgtcctgtgctgccatctaccggtgtctgggaagcgtcgccctcccttattgtatctcctggggagaggttggagagggcgccgcttaaactgcagaacatatgtaactgtcatgcagttcattagacacctgtacaagggaaaggcctcacttttctccagcaattgcaggccctcctaactccatatcaacactcatctcgtaaaattcacagatctcgctgacctgcctcagtaggtactgatctgactcctactgtccatcccatcccagaacccacacccgcctgcacagcgtaggcttcagaaactgctcaacctcgcagacctgaaccccaccgcccagattccctcattttcacagacccctgagattccttgcactaccttgcaatccctacggacctcccctattagtgcaaatgcacgcgcccacccagacatccctacaaagaggttagagttccggcggcagctcacaccggtgcgaaagcagcgagatagccccaacccggctcagagccctcaggctggtggctttggccctggctccatctccccacctctgccctgatccgctccgctcaggctagcagcctgccggccgaggccccgcccctctagacttgtcatcacagaagccgcacgtggccggggtgggacctcaggcgacctgcgaccatcactttgtctcctccttcctcctttggggccgccaccgccaatcagagccagcggatcctggttggagtgcgaccgcccgggtgaggcgtgagggagaaggggcggaaggaggaggggctctgagatgggagggggatcgtggtggaagggtcttggcgcgacttctgccaggctggaatccgagggggcgggtcctggtgaaaggcggagagaccgagaggaggcggggatcgggggtggggcctgggaaaagctgaggatcctggggaaatgcaaagaaaacgcgaaggaggtgcgaggtcagaagggggcggggcccgggctacaggggaggagctcgagaaattaaacgaggaaagggacaagtccacagaaggtggaaggtgggacaagggagagggtgggcccgggcgttgcgggggcggggctcagactgaaggggcgaggtttgcaggcggaggctacagctagggctgctcagtaactgccccaaccactaccacgtccccaagtgcaacgggacccacggaactacaggtgtggggcagggtgagcgtggaagaagggacgcggatgggggtgcgctttgcagacgatctggagactgctgtgtgttgagggaagatacgaagtcgcgggagcagt

SEQ ID NO: 41765 - DNA, 2300 bp, Homo sapien
agaacaccccaaaagggggtgagtggcacctttgttctaaattctttttttttttttgagatagagtcttgccctgtcacccaggctggagtgcaatggcacgatctcagctcactgcaacctccgcctcccaggttcaagtgattctcctgcctctgcctcctgagtagctgggattacaggcacgtgccaccatgcctggctaactttttttgtatctttagtcgagacagggtttcatcatgttggcgaggctgagtctcgaactcctgacctcgtgatccgcccacctcggcctcccaaagtgctgggattacaggcgtgaaccatggcgcccggcctaaattctttaaagaggttcaagtcattagaagccttctctcgattttttggtaatgcagatggcaaagggtgaaggaggtatagggtggaagaaaagtaaacaaaagaacaattgaattttttttttttttttttttaatttgagacagagtctcacactgtagctcaggctggagtgcaatggctcgatctccactcactgcaacctgcgcctcctggttcaagcaattctcctgcctcagcctcccgagtagctgggattacaggcacccgccaccatgcccggctaattttttttgtattttcagtagagacagggtttcactatgttggccaggctggccttgaactcctgacctcgtgatccgcccgcctcggcctcccaaagtgctaggattacaggtgtgagccaccgcgcccggcctaagaacagtttaatttttaagaccaggaagcaaacacagaaaccaaatacatggttttttgttttctgtttgttttttcttttgcagctgtgaggaattttactcaaattagataggccttgttacccataatttggaattctcacttggatttgaccaagtgaagtagagttggtcaatgggaaaaagacaaacaaaataaaaaaaaacccaacaatatgatcactgagcactctaatggtaagcagaaattaagaccagctggttgttaactttagccaagacaaaaatccctattcagctacttacctaggggtgcgtctcaggctgaaaacggctgtctaccatcccagaagtaggaaaaaaacccctcatcttccctgttggaagtgagctcaaactccataaaagagttacctgccttccctcgtcatggaagcaggaaaacttgccttccttgttggaagcaagtaaaactccaaaataataataataataataataataataataataatagagggagttgtacaacaaaatgaactttagatctcgaccaaattttgggagatcagggattctctggagggggtgctcctagaccttagcaaattgtcctgttggtttgagccatggagttagctcatgttggtaccaagcatggataggagatttgtcaaagatcagaggtatctccactcacaatccctccgtggttaccatccttcattcagtaaatatttacggactgattaccatacactaggcactattccagacattggagatacaatgatgagcataaaaaacggtctagataagaactgaggtctccagacatactttatgcccactcagttttgtcttttgccctagttgctaaacaaaacttaactttgctgtgcggtgcgacttcgttaacttaaaattacaggctgtcagctatgaccgctagactctaagaaagtccagtggaaatccttcaatgaaaagaatctgttcttgggtggaagccccgctcatgcaggaggaacagagggcttccattctcgcgtcacacaactgagggtcaaccccttgctccctgcagtaagcctgattagtgggcggagcttccttcaggatcgcaagaaagaaaggaggaaggggaccccgcctcctacgtgctcgcgggggggggcggggtcggtggactgggcgtgagttaattggctggggggcggggcaccacgggttggctccgcccaggcgctcgcgcggatcccgggtggaatgacgggagggagtcccggcagctcctacctcccagcgatggcgtcgctgtgccgcgcccagtccccagcctgccggccggtactcaccgctacccggagttcgctcagacggtgagatttggggcgggtccgaggcagcggcgggacgctacctgcgaccgggaccatgaggagctgccagacccgtggggccggtaacgagagcagtcgcggcacctgctgagaggaaagagggagcggtccggcgcggctggggcgc

SEQ ID NO: 41766 - DNA, 2300 bp, Homo sapien
atgagtagaatcaggttcacgtggtgcttcaaagccctgagaagaatatttctttggaccccaggcactaggggccacctgcctgggagtctccctgcctcactcctctaggcaggggagtgatgcttcaggacgtgacaggctgttctaacatgtgtctacctgagggctagttgaaggatccaggagtattttcttcttgggtgggccctgaacaaagccaaaaattgtagaaaccagtctagaaaaagtcctgctcatctgtggccactgccttctagccgtcctccaccttgcagaaagaatctagcctttggtctctctctctctcatcggggtcatttgctattcccctctgatattcaaccctatagaaggagcctggactctgatccctctgtacaggctggatggaaggggccctccacacttcctgggaggtcagagacaaactgtttcagagagtcagatggacttcccaagacttgttgagagatgtgacatggttcttggatttcctctgtagcagcctcctggacttcctgaggactcgacattgtccacagatgtactggccattacatgaaacaagaaaccaagcatctttgctgttgttaattattatatgtgccattgttacaggagattataggctagtctgtaataaattatcttatagcagcctttggggtttggtaattctgctaatgtgtggaaagccatggaaatgactgtcctttataatggtagattttggcctaatggtcctttgctgcttcacactcctccacccccatacctgacagccagtgggtgaagcctaaagtggttctggataaacaccactgggctaacatcctgtcctagacctgagaccaccaatctaattaacagagtcatgggacctacggcaccagcttcctacaaaaggtccaaaagagtagcaggagaggtattctggtgaaaactagtccatgcttctcttccctttgtctagaatcactaggacagatcacagcctgggttgtgaggacaaggcaggggcccactggggagaggtgtgcctgcccgtcttggcagaggactgaggctgccacagacaggacagaagattaggcttaggactgtaccttggactttcattcaggctctattcgaggaagaagagctgcagtagaaagcccactcccaaaggggaagaaataaggtaaaaggcctcatggcgtggaaatgggaaaagctgaaacaagaaagagagtgctcacctactctcaacctgcactaacactacttgtggggcagggactaatggggcaccagacagggaactagctccgtttccactgcttgctaaataaatccttagagttcagttgctcatttaaaaacttcctcctccccgctcctctcccaagccagccacttaacatttctgcctcaaaattacctcttgaatccattgggtcgcctcaagttcccaccaccacaagagtcgtggcagcttttaggtcctcatgcctgagttactgtgataatcccctgcttccgttcttaccctgctctcttcacgcactccaatataaagtccttctcctattaaactattcagtggtcacccatagcctccaggctgaaactccaagaccctccaagatagcgcagccggcaccgccccccttgcccctatcctgcagctgttctaaagtactgccccggcaggtccccgacaagcactgtgtgctcctacccctccgtgcctgcacatgctgctccccttgctggaaaatctgccagccttttccactgctttctaggctctgctatctggacgcctccccacagcactctacattgttataatttacttgtctctttcccctcatcagcctgtgatctacccaaaggcaggatctgagtgttgtatctccatttccccagcggccagcatagttcgggtacttcaaagccagatcggcccctaggggccctctccatggagaaacggtgggtctggcacctgagggtaggggtgtggccagaggcgggctcatgggagatgggcgtggtttgtgggcggggctctgctctacgccggaacctgggtctctagggcgtctgcgcaggaaggtgcgttgagatggcagttgccggagttggaggccgggcggcgacggtgagcaagaggctcccaaagtgggtgcccgagtagaagttatcgccttctccctcccaatattccttgaagagagactgtcccctctcagtatttccagtagctgtctatccttatactttcttga

SEQ ID NO: 41767 - DNA, 2300 bp, Homo sapien
ggaaggtgcgcttggaagaaacccaagcgggcacgtgaaggttaaagagagaaggtcaagtgcctaaccaagatcctaggacttttacaggctggcctctttcccatgattcttcccttagagtgggcttcccgaatgcgcagtgctttccttcccgttttccggtggagggtgcccccaggagatcatacgtcaccatttttgtctcttaacacgcatgcccagaaagttgcttctccctgaggcctgcattcaattagcattttgatgttaacatgtgtggaccatcaggaaatggcctctccctggcccagccgaattatcctttttaaagaagcaatgaggtaattatggaactgtcactggtagagggtctgactgcaagttgtccaggttcttggcgttttgaacaaagaattggacaaaacgcccagcaaagcaaagaaagaatgaaggaacaaaagaaggaaagcagggatgtattgaaaacgaaagcacactccacagtgtgggagcagccggagcagcggctcaagggccaggaaacagaatcttcttgggtccaaataccccctagaagttacccgccacttcatgctcacctcatgtaaatgaattcgtagcctgcaatcagtctgattggttgcagaaagcagccaagcagaggctgaagtgaagttacaaaggtcgcacacctgtgcaaacatctgattggttgcaagaagcaaccaatcagaggctagggtgaagttacaaagttatacttctatgcaaagttagactcggctgcagtcagtctaattggttgcagatagccaatttcccatctgctgggcagaaaagttgggtggggggtttgttacttaggtgtggaaagttagggttttcctttcaatttagttccaggaagttggcatgaaccagtcttaggttccctgcctccagtccctattctcctgcctcagaaccatcacccaacatccctagtgggtagcaggggagaaccctctcctgccccgctcatgcctaactacctgtaacagtttggctgtgtccccacccaaaatctcatcttgaattgtaattcccataatccccctgtgtcaagggcgggaacaggtggaggtaattggatgatggggctggtttcccctgcgcccttctcgtgacagtgagtgagtcccacaagatctgatgattttataagcgtctggcatttcccttgcctgcactcactctgtcctgccaccctgcgaaaaggatggctacttctttgccttttgccatgattataagcttcctgaggcctcgccaacaatgcggaactgtgagtcagacctctttccttcatagtatttcttcatagcagtgtcagaacggactaatacagtgggtttcccataacatttgcaggactgcctgccccatccccctctggctgtaaacagcaggagtcacacacaggcatcttccatgtcccccacacatccggccctgaagggcagggggcgcatgggttctacgtttcatcaggggttccgaaccctggctatgcactggaggccaaccccacctcaccccaccccactccaccccagtggttctgagtcggtccagtgtgaggtcagccctccttctgttgtttggttagtttccacactaggttctactgggaagccagcgttgagaaccgccgcctcaggcgaagctgggactcacacccaccggccctggaggcccgcggaaggtttccctgggttccagcacccgggagccgcgcgtcgccaggcaccaccccgcgggggcgggcgcgggccgcagaagattgggccacggcggaagcctctccgctcccttagcgggaaagctctgcgcgtgactcggctgcgcccatcgctgcgggagccggggagggggcgagcaccttaggccgggcggaccgaaccaacgcgccgcccggaggggcggcctgagggcaacccagatcggaccatcgcgccacgccgacaggggccggcctttccaacccgcccggagggaggggccgccggcgcctctagcctgcaacgcgacccctggagggcgagacacgccgccgccgccgccgccgccggcgcggaaggacgaggctgaggcgagaaacgaggtaggaacgcctctccggaggcgggcagggtcccacagacccactgccccgcgttccaaggtctcccttaggggagggcctgtcttcccacctatgtgccttcagcgcctgcccttcccttcagcccttccccctcggctgcacccgccctctg

SEQ ID NO: 41768 - DNA, 2300 bp, Homo sapien
ctgacctgaagtgatctgcctgccttggcctcccaaagctctgggattacaggtgtgagccaccatgcctggccccctttgcccatttaaaaattggattgtctttttattactgagttgtaagtgtttttaaatatattctggatagaaatcccttatcagatatatgatctgcaaattttctcacattctgtgggttttcttttgactatcttgattgtgtcctttgaagaacaaaagttttaaatttttatgaagtcagtttatgtttttttttttattttttcattttgccagcaggaagtcaaagtttttctgtttttttcttttgtcacttgtatttttgatatcatgtctaagaatgtgttgcctaaccctaggttatgaagaattacttctttgttgcctaagcttcttttttttagatatggagtgtcactcctgttgctcagtctggagtgcaatggtgcaatctcggctcactgaaacctccacctcctgagttcaagtgattctcctgcctcagcctcccgaatagctggggttacaggtgcccaccaccacaccccgctaatttttgtatttttagtagagacaaggtttcaccatgttggccaggctggtcttgaactcctgacctcaggtgatctgcccgcttcggccccccaaagtgctaggattacaggcattagccaccgctcccggccgcctaagcttctttttgatagatttttttttttttcacatggaaaacagtcttctctttcaagcctattgagtcaagtctacccaccacttattctgatttacacacaaggagcttctcttttttttttttttttttttgagacggagtctcttgctctgtagcccaggctggagtgcagtggcgccatcttggctcactgcaagctctgcctcctgggttcacgccattctcctgcctcagcttgctgagtagctgggactccaggcgtccaccaccacgcccggctaattttttttgtatttttagtagagacggagtttcactgtgttagccaggatggtctcaatctcctgacctcgtgatctgcccgcctcggcctctcaaagtgctgggattacaggcatgagccaccgtgcccggccaagcatctctttttagattattcttgttcaacaagacttccatatgccaagcataagacaccttctatatgccaagcagtatgctaggttttatgggaaatacaaaattaaaatgatattcttatatactggataatggagatgtacagatgactataactccgactttgcagtctagaagagatgttaaggcagatatgcaaaaaagaacaataaccatgttaagtgacatgatttacttaatcaaaacttctcagggaccgatgctattgctgatgaagtttgccatcaatatgcaatgcaatgagaaagtacagtatgctttttcttataaaatgatgatcatcaaagtaaagttttttgtaatgatcctacttgacaatataagaagttggcaatccaatattgatccccgttttttgtggaagttgttttcttgtctgtaaaatcaacaacctgcaaccactggttcggagaacagattatttctggctctggggtaatcagagaagacttgatggaggagttgctctgggtctggtaggtttggataattttgaacagggccaagtgtaacaggaaggagagtctgaatgaacaaatacaacagagtggaaatgagtttctgaaacatgtttcaaggactgcatgatgggaaggcaaggttgagtggagtagagtagacagccaaggctgggcacggtggctcacacctgtaatcccagcactttgggaggctgaggcgggtggatcacctgaggtcaggagttcaaaacaagcctggccaacatggcaaaaccccgtctcttctaaaagtaaaaaacttagccggggcatggtggcaggtgcctgtaatcccagctactcgggaggctgagacaggagaatcacttgatcctgggagacagaggttgcagtgagccaagatcgcgccactgcactccagcctggatgacaagagtgaaactcaaaaaaaaaaaaaaaaaaaaaagaatagacagccgagatggatgacctctaaagccaaaatgaggaggctcaacttgattctctgggtaatgagaaaccattaaaaggggcaggaggagtggcatgttgaagaaaggtggtgctttagggagatgaatctggtagtactaaaaagtaaattgcaagtggggagactagtt

SEQ ID NO: 41769 - DNA, 2300 bp, Homo sapien
tcccttatacgtatacttattagccatattttttatgcattgtttgttcatgtccttgagcatatgtgacttgcctcagactttaccacattccacatgacgagctatgaccctatggtctacatgagttaaattttaagaaattgattgtgtcaaggattcagttaaatgatgaataagagaaaggcaatgagggatttagactcagggtgagtgaaaaggaaatgataggaataaaaagagaaaggaaatgaatgaattttggaacattacatgtgaggagtcgaagggaatgaagactgttgcgacctgaacgtggaaacacaggagactagaacttgagcaggccacactgccacggtgcagccaagagaccagagaagctcaggatgggttctgtgtccttggcaccaggagaccttgaacaagagagaactttgctttagcctataagaggtaaaactgggaagagaagactttctagtggatcccagtagtgaaggttctaagctaaaactgggcagcatttgggcacttcaggatgtctgtatcctgagctagacgcatgttaagaatgtattatgcctttcacgtttatcttgtgtgatgtgttagaatgatacaaaagacataaaactaggtccccccacccccattgaggaggaagaggttgacatcagtcatacttgcagtcaccctaatgcccaactcagtgtctgcattcaagaagttctagtatagtagtgaggatagtaaggatacttagcccacggtcatcagaaagggacaaatattctggggcttgtaggacgagaaaggggatcagagataacagtcacttggtcagatgataccgtatattttaaaatgcttcttgcaaaattatagcttattgctatgagttcatattattcatgattttccctcttggctgtaaacttgtgtgctatagctgtgtctaagccttaaacatcctagatggttttttcttaattgtgtcattattcatagtttttttgtgctaaggactggtcattgtttactgccaaggagagggtccttgaaagagaaagggaaagtactgcccaaaccttcatatgtggcattagaaggacttggccttttgtcataatttgatgcatagtgaccttaaaattaagggggacctcaggtgctgcacctgtgcaatgcagaaagcatggttacgtccccacctgcctattgggctgtgtggtcaagctccatcttgactcaagccttttctcttcctgggctcttctccatctgaaaatgatgtagggaagggcatgcccctgacttccagggaggtgacattaggttccctttctttccctctctctccaggtgccaagctctcctgatgaaatgtgttctgccccactgggctccagggacagtgtctggtgctgttgaagcccttattcgaactttccagaatggatagtcccccaaagctgactggagagaccctcatcgttcatcacatccccctggtgcactgccaagtcccagacaggcagtgctgtggaggggcaggtggaggtggtgggagcacaagacctaatcccttctgcccacctgagctgggcatcacccagcccgatcaagacctaggacaagctgactccctgctattcagcagcctgcactctactccaggaggaactgcacggtctatagacagcaccaagagtaggagtcgggatggaagaggccctggagcccccaaacgacacaaccccttcttgctgcaggagggtgtgggtgagccaggacttggtgacctgtatgatgacagcattggtgacagtgccacccagcagtccttccacctgcatggcactggccagcccaactttcatctatcctctttccagctgccaccatctggccccagagtgggcaggccatgggggacaacacgcagtcgggctggagtggtggaagggcaggaacaggagccagtgatgaccttggatactcagcagtgcggcaccagccactgctgccggccagagctggaagcagagactatggagctggatgagtgtgggggacctggtgggagtggcagtgggggtggagccagcgatacctctggcttttcctttgaccaggaatggaagctcagttcagatgaatccccaaggaaccctggatgctccggctcaggggaccagcactgccgctgcagtagcacatccagtcagtccgaggcagctgaccagtccatgggctatgtgagcgactcctcctgcaacagttcagatggtgtgctg

SEQ ID NO: 41770 - DNA, 2300 bp, Homo sapien
ccatggagtgtggttgaggcttccacacagctaggtaggtgctgggtgccaagacggggacccagggctgaatttagggctccagaaattggtcatgtgacctgcaaccctggcttcctcccaggcccatccaccaaggtcctgcatggcctctacaacaaagtcagccaattcccagagctcaccagtcataccatgcgcttcaacgccttcatcctcggcctgctcaagtgagtgcacagagcagcaagatcccctaaacaacttgccctgccccccacccccgggctctgcctgcaccaaggaaacaacgccctggacagacagaaagggtggatctggagggtcccctcagcccgctatggcctctcagtaggtcactgcctccccactgtgcccatgactctgtcactggtcaccaacgtggtctgcttttacaaatctgtaatctggcttatttggaaattagttgggtttcttaatttctctggaccttgtaaaccctgatcctctccattccagcactacttccaaatcctgcttgaccctaagtccaccttgggacccacatcctagtaacatgctttctcaggtatgggcccaggccattccctttggccctgagctgcctgtactttcacacagtagctgccttgatttcttaggtctactgcaggctgactccactccaggaggaaacaattggcttgtaaatcacatgtccatctccctccacacatccccactgactttctggaattaggtgaaatgaatcgtgccatggaagggcgtgttcacctattcttcctgtgcctgaccccctggatctgtctccttatctggctgtattcacacaagactcaactctcttcacctgtctccctacagcatccggtccctggagttctggtttaatcacctctataaccacgaaggtaatgcctagaaccctgcaggtcaaactcaatgggtcagaattcagaggcacaaaagaggaaggaagagctgtcttttcattgctggaggtggggagggggaccacacaagcgttcatcctcagagcctcaggcttccacccaaggccttccccagcctctgcttgagttaaaaccttgggccaggcatggtggctcatgcctgtaatcccagcactttgggaggccgaggcacgtgggtcacctgaggtcaagagtttgagactagcctgggcaacatggtgaaaccccgtctctactaaaaattcaaaaattagccggctgtggtggcgcatgcctgtagtcccagctactcgggaggctgaggcacgagaattgcttgaacctgagaggcagaggttgcagtgagccgagatcatgccactgcactccagcttgggcaacagagtgagactcagtctcaaaaaacaaaacaaaaaaccttggagccagcaggatactctagcaatctgggagttagggtggccaggaatccctgcatctcactcctctaaactcagggccaccgcctggggttggagagtttaggcactgcacagctgtgggcagcagcgtttatacttagtacatgcaagttgactagtgcacagcctgcaccgctgtctgcagcagctctgcccagactgtctttcaaagtcccacttgggccaggctctggttctctgtgtggatcagtccctctctcttttcccctagacatcatccagacccactaccagccctggggcttcctgagtgcagctcataccgtgtgtcccggcctctttgaagagctgctgctgctgctacagcccctggccctgctgcccttcagcctcgacttgctgttccagcaccggctgctgcaaagtgggcagcagcagcggcagcacaaggaactgctgcgggtgtcccaggacctgctgctgtctgcccactccacgctgcagctggcccgggcccggggccaggagggccctggagacgtggacagggcagcccaaggggagcgggtgaagggtgtgggtgcctcagaaggtggagaagaggaagaggaagaagaggagacagaagaggtggcagaggcagccgggggctcagggcgtgccaggtgggcccgaggtgggcaggccggctggtggtaccagctcatgcagagctcccaggtctacatcgatggctccattgagggttccaggttccctcgtggtagcagcaacagcagcagcgagaaaaagaaaggggcaggaggtgggggacctccccaggctccaccaccccgagagggagtagtggagggggctgaggcctgccctgcctctgagg

SEQ ID NO: 41771 - DNA, 2300 bp, Homo sapien
attacaggcgctcgccacatcaggctaatttttttgtatttttagtagagacggggtttcactacgttggccaggctggtctcatcctttcctgattgaaccacagtcacagcctccttcctaatcagtctcccggcctccatacaaccaccgcaatcatcttacaaaaaataggcacctggctctttggcttggcattaccatcaccaactactacagtaattctcaaacgtgataaagggccagaacccagtgtcggttaaaagatctatgatattaaacaaaatgaggcataaattcctagtgtttacagatgtcatacaataaaaagcaaattcacaaattagttgtagatgttaacattaatgtgatgaatgagcgtgtgctgaagaccaaacgcctccagaaaaaagaacaggatgcacgtgccccgtgcaattctgtgaggttggcctgcctccaccggctgtggaaggattgcgaatgtctcccattcctctcgctccaaacttgtgcaataccttcccttgtacagcgcaccaagacagcatctggccttctcttgactctaaggcatcatgtatcatttatgaccgtctttattcttttctcagtagccctcgacaagcgagtagtatttcttggctccaagtctcataaacgtgtaaccagactccattggaagacggtaaccccacgcgatacggactgtgcttgtattaattctcttttaagcttactacagaaatatcaatacagtacttgagaattcctgcaggactcagcctcgcttcctcgaggagctctcagcctgcctccgcactcgagacggcagctttctctccctccgcccaccgttccgccgctaggtggcaggcggctcaacgacgcccttttaaaccgtttgccccggagtggaccgccgggatcgcgtgtcaccacccaaccctagcgatgattggctatttcgccgaggccggaggaggaaccagcggcagaaccggaagcgtctggtacggcgagtgcacggagtcctgagactgcgtgcgcacccaggcaccgcgccgacttaaagaggccagttgcagcccctcctccggccttagggggcagaccgtgttcctacgtggagggcggaaccctcacactgaggagggctgggtcacactgaggggaggagtcaccttgagaggaggggtcacaatgactagtggatttcctcggaggtggggtctcactgcgtgggaggaacacagagcaagggggtgcagcactgaggggttctgacacactgacggtggcagtgccacactggggaaaagtgcccccgaaagggaggtgtctcactgaggaagggaggggtctccgagggacagcgttctttgaggggggtgggatcttgcggaaggacgggcttccctgcaggtggaggcttctctcttagagtcttttgggcaaagtagtaagagggaggtcccggctgggtggtcacagggcggaggacctggactctcttctttattgggaggcggcaggatgaagtgaggaggagtcggggctaagctgggtatgggccggccaaaggcttcctatagccccggggtatcacaacctcccgtgaaggtagaaggtgttagggaggccagaggttcaaggtgtcggagtcgaagagacctgggaaatgggcaggctgggccggggcgcaggccaggaaggtggacaggttgctaggctacctctgattgcggctgggcctgaggggcctacctttctgccccgttggtccctggagcccaggaatccggcaggtttctgagcccgaccctcaacggacagtaacccagggaggagaggggactccctgggcagctaagcttcgcatgcgcaccatcagcccttaattccctcccgttattcaagctcaggccggagcttatttgacccgggcggcccagggcatcgcggccggaaagcggggaggcgggggtgcgcacctgagggggcgtggccgctgccgggaggccgggctggaaggagttaagcggaggcccggcccagccccgcccccggcaggccgcggagcctgatccccggcggctaagcggagcagccgccgcccgcccgcccgcccgcctccgcccgcggcaagccagcccgccggcgccccggagcgctgccgccaccgtcaccgccaccgcccggtccaggcccaagcccaggccctgcgcggagcggagcggcgcggcgtccacccgggcccagccagccggcgcggcgggggcgggtccaggatcttcggc

SEQ ID NO: 41772 - DNA, 2300 bp, Homo sapien
catctggggatccccttcttttttttatttttttttatttttggagacagagtctcactctgtggcccaggatgggcacaatctcggctcactgcaacctctgcctcccgggttcaagcaattctcagcctccctagtagctggaattacaggcacatgccaccattctcagctaattttgtatttttaatacagatgggatttcaccatgtttgccaggctagtctcaaattcctgacctcaggtgatccgcccacctcagcctcccaaagtgctgggattacaggtgtgagccaccatgccggccaggagatccccttcttaagcctctctacaggtcaagttaggcagcaagcccatgtattccatttttttttttttttttggagatggagctttgctcttgttgcctaggctggagtgcaatggtgtgatcttggctcactgcaacctccacctcctgggttcaagcgattctcctgcctcagcctcctgagtagctgggactacaggttcgagccaccacaccaggctaatttttttgtattttgtagtagagacggggtttcactatgttggccacagacacctttttgagtgcagactagaagcttggttttggcattttacctggcatctacatcatgttcacctgtgtattggatctgaaaactgggacattctacagtttgtggaactcctgcaaatgttcctgcaattgatttactcacacactgcccacacccaccccctgtacaccacaggttcaagtatttgactcttcccaccccacccacccctgccaccagctgctctataccctcccactcactctcagggcccctgaggtccccagggagtcaccaccacataccactctctgtatctgggggaaggtctaggttgttggaaactttaatcaagcaaggacagttaacagctgcagaggcaccttaggaaacagtgagcttcaaaaaggaaatacttgtaggatctcttgtgatgacctttgacgacttttctgaaaatgacccgtcattctctgccatggaaaataacagtgatcacaggcagccttcagcccacagaaggcttcctcctccaggcaggctctgacatagccgctcacctcacagatgccctaacagactgcaaagtcctgggaacatgcatatccatgcacacacatgcacacgtgcctctctacaagtacatttttgaggtcacagctttgcctcagtggccacttcctctagggctggctgggcggagctattggcagagctctagggtccctggcagtgtcctgccacacaccaccaatcatccgagctgttggcatgtggtgaggaccttttcccccttcctttttcctccccacagctgcaggagggggattctgcggggcggatgtcactttgctaggggcgggttcttcccacccccacactacatcttgttctagctccttcctatcccggatgtaggccattttggggttcctagtaggggtcacatcccggtaaaagaacattagggagcacctttgggcacccctgctcagcagccccctttcccccaactggttccctctctcctccatcagccaggcccccaccacctatgagggcctcgcggtccctgggtcctccgccacaaatgccccctttttccttggggctgggtgggaagggacagctttgggactttttaaagaaagaactttgctaggaaagtaagagacgaaccaaaaccaaaccaagaaaatgtcaagacctccgctggtccggaatctgcgctcggcctctggctctgttctgctcctctgccttgacttcacctaggaagctgcagccttcttaagccctctgcaactcccttgctcacctgctccctggctccccatgagggtgcatggggggcagtgctgccacttgcctttccagaggtgctgcagccatggctcttccttaccttcacctctggcccaggcctgttcctgaacccccagttactggaacccccaggatgatgagaagcgagggatgcaaaccaggaacccccagtctcatggggagaacggagcctcaccctggagctggggagatcgtctgggtcagtgcagctccagctacacatcataagccccagtggacaaggcagccaggaggagggtggggcagatcagggcagataaccagaaggaccgagtttggggcccagcatggcccatatgggtttaagatgcatggagaggaagcacagggaggacatggggacaggcccatcccctacccctg

SEQ ID NO: 41773 - DNA, 2300 bp, Homo sapien
ccccatctctactaaaaatacaaaaaattagccaggcatggtggcgagtgcctgtagtcccaactactctggaggctgaggcaggagaatcgcttgaaaccaggggtggggtggaggttgaagtgagccaagatcacaccgctgtattccagcctgggcaacaagagtgaaactctgtctcaaaaaaaaaaaaaaaaaaaaaaaaagacctaggttatttgtaaggactggctcccaattcctccagggctgtcagaccagtatcgacagaaccagtgagacaagtaacaaggaagccaactttggttccaaattttaaaagttctatcaatcagaaagattggaagagagtccttggaaaggtagtgaggtccttaccaaggagaggttcagcttctggaagtgttcaagaagaaatcatagggcagttcctgcagtgggtgtaactttgggccagatctgtcagcctccttttggctatatgattctagaaatttataagctagacaagggatctgattaactcacacgttaagtagaaatatcttagggccaaatggcatgacagtacatttaagtcagaggagggtggctcaaggaggaattgggcaataagtgaagacatcagaggttcagcatcttcagctggctcctgtctgttggtctttcccccacagaattagtcagaactcgtgactgcgagagatagaaaacataactttgactgaagccaaaaaaaaaaaaaaaaaaggccgggcgcggtggctcacgcctgtaatcccagcactttgggaggccaaggtggacagatcacctgaggttgggagttccagaccagtctgaccaacatggagaaaccccgtttactaaaaacacaaaataagccgggggtggtggagcatgcctgtattcccagctactcgggaggttgaggcagaagaatcgcttgaacccaggaggcggaggttgcagtgagccgagatctcgccactgcacttcagcctgggcaacaagagcgaaactccgtctcaaaaaaaaaaaaaaaaaggaattcattagcttacatagccaaaaagttcagaaggcaaatatagctctgggcatgtctagattcaaggtttcaaatgaagtcattaagactcggtctgggccaggcgctgtggctcacgcctgtaatcccagcgggtggatcacttgaggtcaggagttggagaccggcctggccaacacggtgaaaccccgtctctattaaaaatacaaaaattagcagggcatggtggtgcacacctgtagtcccagctactagggaggctgaggcaggagaatcgcttgaacccaagaggtagaggttgcagtgagccgaggttgcaccactgcactccagcttgggcaacagaacaagactccgtctcaaaaaacaaaaacaaacaaaaaaaaacttggtctgtattatgcattgtatgcgtatatcaaaatatctcatgtactctataaatacatacacctactatgtacccataaaaattaagaattaaaaaacacttggtttctctccacaacccagctctgtttccctccttgtaagaaaaccaagctggaagtttaaacccatctttgagagactacagagcagggccaaagatggaggtgccctggccggatggcttccaaagaccctccccacctataagtaatttcttaagaacctggccaggctcggtggctcaagcctgtaatcccagcactttgggaggtctaggtgggcggatcacctgaagtcaggagttcaccagcctgcccaacatggcgaaaccctctctctactaaaaatacaaaaataattagccgggagtgttggcgggcgtctgtattcccagctactcaggaggctgaggcaggagaatctcttgaacctgggaggcggaggttgcagtgagccgagatcgtgccattgcactccagcctgggcgacaggagcaagacttcgcctcaaaaaaaaagaaaaaaaaaaagaacttcctgctgttgaacctttgactgtcccggagaccctccctcttccgttttcaatgtgtccctatcctcctagctaggctttaagaaagaggagggacagctggggccctaggagctccccctgagggtctgtccctgggaacggggcgctaggacgggcactccttctggctggaatgctacgccggtgagggaaaggagtccactagggaagtacctggaggtggagacggggagagaaatcacaggtatttgtgagtcgatcagctagagggtgtggcaag

SEQ ID NO: 41774 - DNA, 2300 bp, Homo sapien
ctggaacaaagttttatttttcaagtggatcatttaaaaaaatgctttatggccaggcacgccacttctctccagcctgggcaagtgagccgagattgtgccactgcggtctggtctgagcgacagagggagactccatctcagataaataaataaataaaattaaaacaaatttaaacattctttatatgacaaaattattctcaatggcaattataaaatgaataataagggccaagaaataaactcagtgaatattttctttccttgaactttgtaaatataatcatgtcagcataaaaacagccatgcattgcttaacaacagggatatgttctgagaaatgagtcactaggcaattttgtcattgtgcaaacatcatagagtgtattttcacaaacctagatggtgtagcctattacccatctaggctacatggtatagcctggtgctcctaggccccaatgcttacagcatgttaccatactgaatactgtaggcagttgtaagacaatggtatttgtgcatctactgtagagacagggtctctccgtctgtcgcccaggctggagtgcagtggcataatcatagctccctgcagcctccaactcctgggctcaagtgatcctcccacctcagtctcccaagtagctaggactacacgcttgtgtcatcaggcctgtctactgtttttgtttgttttttggtagagatggagggtctcactatattgctcagactggttttgaactcctggcctcaagcaatcctcctgctgccttggcctccaaagtgctggtattacaggaatgagccactgcacctggtccactacagcaatttaaaagttagatctgggctgggcgcagtggctcatgcctgtaattccagcactttgggagaccgaggtgggcaggttgcttgaggtcaggagttgagaccagcctggcaacacagggagacctatctctacaaaaaatgaactagattagctgggtgtggtggcacatgcctgtagtcctagctgcttaggtggctgagatgggaggatcacttgagcccgggagatcgtcaaggctgcagtgagctgagattgtgttactgcactccaacctgggagacaaagtaagaccctgtctcaaaaaaaatataaaacttagatccataaaatatttttcagggaggataattttatcactgattttttttttcagaatttctggaacatggtgataataagaggactgatttttattttttaaattctctacagacaatgcacccccttattgcctgcaactcaaggggcaggacttctgccatccctattgttggcatgccactgcactgattttaaacttttaaaaaatgttgtatgggctagacaaaacacatctctgacttctggtctcaggtttatatttgcaacttaaaatccctcttcctacatcaatagccttgcacgtgatggagttagctctaggtatggcaggtactacacccgctgaagtgaacatgtgcaagatagggctcagtttcccaggacagtcctacagcaaagagttttaaaatgcaattaattattgagagtgacagttcttacagacagtttggatgaagtgggttgaaaggggaggtttgggggtgtcccccaaattataatgcccccaatgaaacaataacaagcatcatctaaacacatatcctctcagatcagccttagggtgtgatgggatcagaggtaccaggaggctcccccgacccttccactttataccatactcattgaggaatacatctttcttctgggaccagagtcagggaggaaggtgggcatcctggagcagaaggggtgttcctgtccttgttagtcctgcttcacaccacttctgcccccaccccccgccctcagagtcctcagggactcaactgcccgtggcacattacccacaggcctgcttctcttctcaaggggggcaaagggcctgggcagcgagggtgggggaagctcaggagctgcaggagtggcgcaggtgcaggcacagggcggggtctttgttctttttttcatccctcccctcccccttcctccccggaaaccagagactttgccaccaccagtattggggatgctgagctgcggggtacgggcctgaggagggatgggagtaagaagtgctgtggaaaccgtcaggccatgaaccaggctgaccctcggctcagagcagtgtgcttgtggactctcacatctgcagccatgagcagaggcgacaactgcacggatctactcgcactgggtg

SEQ ID NO: 41775 - DNA, 2300 bp, Homo sapien
aaaaactggtgaaatcaccaccctgcctcttacctgattagtagcatacttaaccttgctgaattgcagttgcctcattctttgaaagagcttaactatattacccttttgggtcattttaaccattcattaatttcattcaacaacgattcattgagtgcctgctatcgccaggcgccacgtgctgtgctaggctctgggagtaaaatggtaaagaaaaaagagaggtggctcctgcccttgtggaatttaggaccagcctagctcaagggtctccaacacccggccacaggccagcaccagcctgtggcctgttaggctccgggccacatagcaggatgtgggcagtggggccagcaatcattaccgcctgagctccgcctcctgtcagatgagcacggcattagattctcataggagcgcgaaccatattgtgaactgtgcatgggagggatctaggttgcacgctcctcgtgagaatctaatgcttgacgatctgaagtggaacagtttcatccggaaaccatccctccaccccgcttcgtccatggaaaaattgtcttccacgaaaccggtccctgatgccaaaaaggttggggactgcttgtctagtggtattgaagaaagtgaaatagcggcactaaagaataaattagaagttgaattaagggttccgaatgatgggaacacacttgagctgagaactgaaggtcgtgtagaacccagtatgcagaaagggaatgcagcggcatgtcagggagagtcagtgtaatttcaactgtctggcttacagtagtagctgctcaagttaaaaaatcactagagtccgtcggggtggcacgtgcctgtaatgtcaactacccgggaggctgaagcgggaggatcccaggagtttaagaccagcctgggcaagagagcgacccgccgttccaaaaaaaaaaaaatcactaataagtaggcacggttctaacttgagtgatcccatttaatcatcatagctcttgaagtaagtgcttatcttcattcctcagagtggaaaggaaggcacggagagagaactaagtttcacaaggtcaccgctcttgagtacaggaggcaggattctagcccaagcagagtccatatgttgtgtaccagctacacagtgaatggtggctactatggcgtttgccaaagggagagggaggtagaagaggaggctgtttcaggaatgctccatatttggagtaatgagcacaaggacttcatagcaaggccaagaacagcgtaaagctgcccgcgcatgaaaagcagccgcgttgaccgggcgcggtgtcacgcctgtaatcccagcactttgggagggcgaggtggactgatcgcttgacaccaggcgttcgagaccagcctgggcaacaggtgaaaatccgtctctacaaaaaatacaaaaattagccaggcatgatggcgtgcgcctgcggtcccaactacttgggagcctgaggtgaggcatcgcgtgagcccggggaggtcgaggctgcagtgagccgtggtctcgggaacaaaaaacagccgcgctgagaatgagccccgtgtggttggtgcgcggacacgcactgcctgcgtaactagagggagctgacggatgacgcccccgcgccacgccgctcagcgggatacgcttcttggcggactttggagtgggaagcggggaatgtctacgtgcgtatgcacgtggcactctctgcccgaggtccggggactttcccctaggcggaaaggggaggaacagagtcctcagtgtgtagcctaggatacaggccttcagcacgaaccacgtcctcagcttcacagagtagtattttatagccctaaagaaattgtgttttatgattagggtgagaaagttggtggcgtgagattaaaaaaaccgttttcgggcataactttctaagactataggctttcagaggcattgtggctagcagaatagctaatagacacgaaatgaacaaatacaggaaagctagaatgacactatcttatgcaaatatggtctggccccgccctacggggagtgggcgtggcctccccggagccggccggcctgctcgcgtgcgcgtgcgcgttggggcggccggccaatgccggaccgcttcggcaccgcccgcccgatccctccacccgtgggccggcaatggcgggcgcagtttcgctcttgggtgtggtggggctgctgcttgtgtctgcgctgtccggggtcctaggagaccgcgccaatcccgacctccgggcacacccaggtaccagctagggctgct

SEQ ID NO: 41776 - DNA, 2300 bp, Homo sapien
cccgggagctgctagagaccgagcggcgctaccaagaacagctggggctggtggccacggtgggggacctggcacacgctcccattataggacagggaccccagggtgtgggagggtctctgcgaggtcggtaacccggagcatgtagggagcctgggcagacttctgcggtttctgggggcgcttggcgttagccttctcttcctctaggctaagaaccaatgttctctccttccgcagtactttttggggatcctgaaagccaaggggaccctgcgaccacctgagcgccaggccctgtttggctcctgggagctcatctacggcgccagccagtgagtggaaggggcacagggagaggaaaggagggagagtcctggcctgtggccgtgcacagagcttggagtcagacttaggttctatttggagtccgccagttagctcacctgtggccttggcccagggccttagcatgcccttgttctccatctgtacaatggggtaatagcactactattagtgctattctcatgaaaactaaatgaggtggtgcttgagtggttctagagctgcccttttgctgtccttgcccacacagggagctgcttccctacctggaaggaggatgctggggccaagggctggagggcttctgccgccacttggagctctataaccaatttgctgccaactcagagaggtcccagaccaccctgcaggtaacctggagatgacctcaaatcttgccccttacctttccccttcatctggagacccaaacttcatacatttcctgcatttatagagccctctgggtgctcagctctgtggtaagttccttgtagagaaacgagagtttctctcaggagcacagcttactgaaggctgggaatgtggatacagatgaatgcaatataaggagtggcttctctccctgcttccaatcctttctccctcactccaggagcagctaaagaaaaataaaggtttccggaggtttgtacggcttcaggaaggccgccctgagtttgggggccttcagctccaggacctgctccctctgcctctgcaacggctccagcagtgagtgaactcttgattccagccgcctctctcttttagtttgtatgactgctgccctcagctttgtgggatgccttggggtcgatcccaaactcttgcctcgaccctgagccaaattgcttctaaaaaccttttgcaagagtaaatgtgaacccattggagtacccagggtctgcagcctgaggccctcagctggaactgtggaactttaaattgaagtgagggggcctgtactagggcctgaggcacggtttctggaaaagtttcagatgcggggctggcctgggttagaatttctgtctctgggttaagcctgagttaagggctatagtcaggctgtctgtagcatcctccttgggttgataaactttcatcttccaatctggcctcctgaagtatggctagtctgccagtgactcttcagtgtgggatggaagagggctgtgtggtgtgagcctggttctgagtcctacatgaaagaaggggatacagtagccagaagcagatctttcctggccttcaattgaagtatgggtagagggtgatctgcacatcaggcagggggaattctgcctggctctgcttcccctcagacttcccactgttgaattccaggtatgagaatctcgtcgtagctttggctgaaaacacaggtcccaacagccctgaccatcaacagctcacacgtaggttcttgctcctcggcaacgcaggctggaggcttcctctcctgtattcctttctgattctgacctccaacaatgtctggtatgaccctatcttccactgacatgtatacagtgtccctactgctctgccttttcttcaagaagtcagaccctgaccctggtcccttccagaataacctctttcacaaccatggcacccaaagtcaaagttgtatggggagtaaggtgggagatgttattccaggggctgcccgactgataagtgagactgcccagagagtccatactattggtcagaaacagaagaatgaccagcaccttcggcgtgtccaggctctgctcagtggacgccaggcaaaggggctgacctcaggtagcttgcctacttccccttcaatcctcaactgccccatcttttatttttatctaactccaaatgccgaccagctgctcttttcttactcacccttcttcctgtactgacccagcacataacccctattttctcagcctccctttcctcttatt

SEQ ID NO: 41777 - DNA, 2300 bp, Homo sapien
tctcttgcccaccatttcatcttcatgcctagcacaggacctggcacatgattggcatttaatttttttttttttttgagacagagttccgctcttattgcccaggctggagtgcgatggcatgatctcggctcactgcaacctctgcctcctgggttcaagcgattctcctgcctcagcctcccaagtagctgggattacaggcacgtgccaccatgcccggctaattttgtatttttagtagagacggggtttcaccacattggtcaggctggtctctgacaacacataaagaagcacacagccattgtaactgtaactcccgacctcaggtgatccgcctgcctcagcctcccaaagtgctgggattacaggcgtgagccaccatgcccagcctaattttgttgaatgactgatgattgttgttcaaagcatccctagtgcttctccagcatccatcggattgaaagcaaaatttgaggataattaaagaataaaggggttattgactatcctctgaacctcctcctgttggcccctcctatctttggctgtgggagcggagtttagcagctgttccaggtagagtatggtgtgcctgacttgctctgtgggagactcggtccccagggaattagttgtcaccaactgttttcagtgtgtcttctcggctttgccctcttcctcttctagagttgaatgattccccaaccgatgctcacaggaggctctattccccacccctcttccacccacccaaagcactaacacacactggcagcattcacaaacacacccatcaccaactgcaccccaggtgttgtggtctactctcatcacctgggctcacagtgacaccaattaccatgggattatctgtcctcttccatgtttgagctcttagtgtgtggactgtcccacattcacttgagacagtgtaaccagtcctttacctatctggtatcaccaccagtttccttgggacataagcccaaggtacagtctgatccaaactctccccttccttcatccaagcccttcaagttattcctccctggtctaagcccagcattattcctttcttagaattcttagaatgtcagagctggtggggaggtggtagagacctcagaaccctgacaatcctctggttcttggcttgcggcccagattcctaggagtccaaaacagtagggagggagcctaaagtttctgacattttgttttttttaataactttttttttctaactacaaagtaatgcatgcttaatgtagaaaacttgggaaaggcagaagtataagagaatttttaaaatcaccctgtttgtcccattcatccctttagcttcagtgatccagtgcctggcacagatacagattaggtacttaatacacatttgttaaacacattatcttcaattccattacccggagataaaaaccacagttaactttttatttttattttttatttatttattttttttttggagagatggagtctcgaactcctgggctcaggtgatcctcctgcctctgcctcccaaagtgctggaattacaggtgtgagctcccgtgcctggcaacagagttaacttttgattgttttgccttccaacattttatatatgttttatacaaaggggattatattatacacctttgtagcctgctttttttcctctcagcaatatacttactatgtgcgttttcccatatcgatagcttctttacaacaccatttttaatactttcatatcattccttcaaatggctataccttttcctagccaattctgggaacaactgaccccctggcatttggcatgggcccaggacagaatgtgtactgtaatgaccgccccccgtcccaattctccagataggacattaagttcctgccagcatctgcagcccgtctcctgactcaaagttcaggctgctgctccaacatagtgccactcagaggagggctccacacctgcccccaaccttgccctgccctgccctgccttggccggcgccgcgcacctaaagcgccgctctggcggtggggctggacagaagagaccctgcgcggtccggccgctcgccgcgcatgctccttcctgcgcgctgccctccccggccccgcctccgcggctcccgcccgcgagcggttgggatttgaatctgccgcggactgcagccggaagtgtcgatccctcagccagggcatggagctctcctgccccggttcgcggtgcccggtgcaagagcagcgtgcccgctgggagcggaaacgcgcctgcaccgccc

SEQ ID NO: 41778 - DNA, 2300 bp, Homo sapien
attgttaaaagggcagactagccaggtgtgatggcgtgtgcctgtagtcccagctacttgggaggctgaggcaggaggatcacttgatcccaggatttctgggctgtagtgtagtataccagtcaggtgtctgcactaagttctgcatcaacctggttgcctaaggatggttgaactgacccaggtggaaattggagcaggtcaaaactcaatgctgatcagtaacagggtcgcacctgtaaatagccaccgccctccagcctgggcaacacagtgagatcccatctctaaaataaattttaaaaataattaattagaaaaaaaaaccagcctgtaatcccagcactttgggaggccaaggcgggcagatcacctgaggtcaggagttcaagacaagcctggccaacatggcaaaaccccaatctctaccaaaaatacaaaaattagctgggcgtggtggcaggtgcctgtagtcccagctacccaggaggctgaggcaagagaatcgcttgaacctgggaggtggagattgcagtgggccgagatcgcgccacttcactccagcctgggtagcagagtgcgactctgtctcaaaaaaaaaaaaaaagaaagaaaagaaaagaaaaagaaaagaaaagaaaaaaactgggaggcctaagcccattcttggtgtcctcacactcttctgccccatctccttgcacccagtcttcccctgcaatctgtgctccatactagccctcaagccctcaacgtgacctagtatgagaactggattctgtcactctcctgctcataatattttatgccttccctttgcccagaatatcattctccctattgtttttaccaatggaactggtatttcttcaaggacatgatcaaatttgcctacttctatattatcttctaaagcagaattcatctctcttccctcaatatgatgatattgacagggtttgccctcactcactagattgtgagctgctcagggcaggtagcgttttttgtttttgtttttgtttttcttttttgagacagggtcttgctctgtcacccaggccagagtgcaatggtacagtctcagctcactgcagcctcaaccgcctcggctcaaaccatcatcccatttcagcctcctgagtagctgggactacaggcacatgccattacacctggctaatttttttgtatttctagtagagacagggtttggccatgttgcccgggctggtctcgaactcctggactcaagcaatccacccacctcagcctcccaaaatgagggaccgtgtcttattcatttccatgtccctagtccatagcccagtgctggacctatggtagtactaaataaatatttgttgaatgcaatagtaaatagcatttcagggagcaagaactagattaacaaaggtggtaaaaggtttggagaaaaaaataatagtttaatttggctagagtatgagggagagtagtaggagacaagatggaaaggtctcttgggcaaggttttgaaggaagttggaagtcagaagtacacaatgtgcatatcgtggcaggcagtggggagccaatgaaggcttttgagcaggagagtaatgtgttgaaaaataaatataggttaaacctatcagagcccctctgacacatacacttgcttttcattcaagctcaagtttgtctcccacatacccattacttaactcaccctcgggctcccctagcagcctgccctacctctttacctgcttcctggtggagtcagggatgtatacatgagctgctttccctctcagccagaggacatgggggccccagctcccctgcctttccccttctgtgcctggagctgggaagcaggccagggttagctgaggctggctggcaagcagctgggtggtgccagggagagcctgcatagtgccaggtggtgccttgggttccaagctgagtccatggccccgataaccttctgcctgtgcacacacctgcccctcactccacccccatcctagctttggtatgggggagagggcacagggccagacaaacctgtgagactttggctccatctctgcaaaagggcgctctgtgagtcagcctgctcccctccaggcttgctcctcccccacccagctctcgtttccaatgcacgtacagcccgtacacaccgtgtgctgggacaccccacagtcagccgcatggctcccctgtgccccagcccctggctccctctgttgatcccggcccctgctccaggcctcactgtgcaactgctgctgtcactgctgcttctg

SEQ ID NO: 41779 - DNA, 2300 bp, Homo sapien
atccctcctgcactggagggagcccatctccagcctcagacctgaagctccaaagggtgattctttatgaactaggccacagagattagtggccagaccaacaaactgaccttcctcagcgatttcttccaagcgagacagcaactgctcataggcactgttttcttccgggccctcctgggggatgacattgtaagacagatgagtgcatgtatccagggccatggctgaaggccggaacatgaaggggggttcccatagacctctcccattcctcagctctgagaatgctgagggaacataaaattgtaatggttgttgctttttgttgttgctgttgtttttttttttagagacagtgtctccctcttaaaatcctatgtattatttcaaactctatgtactcttgctgtgcgaaccaacaagcttggtggactggttttcaatgacaagctggagagagagggagagagcccactttacttaggatactaggctctcagtgacccgtgcccttctgacgtttgcagtctcactcactgctgcctccgtacatactccccacaggaaaccatatatacacctttgtgttggtgtcacctctgcattcaccttcatgattctgtgtttggcttttcaggtgaggtcctgacatgccacttcttttatttattattcttttttcttattttgcttatgaacctaatgttaagaacattatgaacctaagagtatgaacatattgacatgctatgatggaggcatttctctgaactttgtgctgtgtggctggcattaaagaatcagtgagtgtggctgggcacggtggctcacacttgtaatcagcactttggtaggctgagtcaggcggatcacttgaggccaggagtttgagaccagcctgaccaacatggtgaaaccctgtctactaaaaatacaaaaaaaaattagctgggcatggtggcacacacctgtaaccccagctactcaggaagctgaggcaggagaatcccttgaacccgggaggcggaagttgcagtgacccaagatcacaccactgcactccagcctgggcgacagagagactgtcaaaaaaataaataaataaataaaagtgagtgagtgaacctagcaggcatctcaccatcccttccctttactggcctcctctaatcatggtgtatgtagccattccctaaataggccatattctgagtctttgcacattctgtttcctctgcaatgaacacctccttttcttttctaccagtgaaggctttaagtgtcacctcctctgtgaccaccatctttactatgtccttcctatgtgtctgtcatgtcagcctcccccactggctgtgggctccttagaggcaaggacctacagcttcagaatccttgttgggggctggtgcctggttcacagtgggtgttaaatgaacaaacagtgcgtgaatgagtttgtcagccaggggcctgagtgagcttgctgggatggggtctctggctccacgatagagtccgggaggagcatgggatgggaaagcggggagtagggggtgtccaggatctggtacctccagaaaggcggccaacacggccaggcctcccgggcgccccaaggcctcgtcaactctggcaaaggcggtgctgaggtgaaccacgtggatctgaaaaggacacgagggtaggagagggccacgtctctggccccgctccgccccgctcctttgccccttctcggccagctccgcgctcacctcggcagggaaacggtggccttccacagtgtgctccgagcccggacgacctgcagccccccagtgcagatgcagctgcagagcccggtactcccgcccgggacccagagccatctctagcccaggaggcagggtcagttgcactgcgtagggagaggcaagtgagccggccccgcccggtagggccagcccaacccccgggcaggcactgccgcgacggttcccttccctgcgccccgccccatccccaagtctcggcggggagaccccctcaccactgtggccattgttgcgcaggcgcagttctgggagcggcgggagctggaagcccaggagttccagggggcgcagggccgggcagaaggcggcgagctgggggcggatatccaccggggactggaagcggcccgcgcaggctggggacacccggggccagggcgggtcgcctggggtgggagagtatagtgaggaagtctgacgcctaggtcaggaacttagggaacccgggtagaaaaggtgagggggtgggacggtgggcgg

SEQ ID NO: 41780 - DNA, 2300 bp, Homo sapien
tgaggcggtgggaagagaagtggccagggaaggcttcccagaaaagctgacacttactgagtcttaaaggccaccaggaatcagccaaggggatgggcattttagggagagagaacagaatgcataaactgtggaagctttaagaaaagtatggctatttccagctcctgcacgtagctcattatgaatgcagcatgaggtacaagtatgaatactgggggtgaggttgggcatggaaggagatgaggccagagaggcaggcaacagccaaaacaacgggccttctataccatattaagaaatgtggattttttttttctcctcaaaacaggcagggtgcccgcacgcctgtaatcccagctactcaggaggctgagtcgggaggatcacttaagcccataagttcaagaccagcctgggcaatctagcaagctcccgtctcaaaaaaggtggggggacagggattagggaggggttttggagaattttagataatattcgcattaacttttaaaaagatatttgacaacaatgtcatgggacagtcaaatgaatgaatgagttgaggaactagaagtaagactacaaaacagactgaagaaaacataaggcgcggccagaggccagcccagaccgacccgaggaggaacctccttggtagaaggcagcctctccaggattaggtggttgtgagacgcgaagggcaggggatacccagtggtctagcataggctactggtggatgaggcgtcttccacggagttagaggaacactgcgaggtcaggccagggttgctctccgtgtggctagcaggcagctaaacagatctgaatgcatttccacgccacctccccaccgccccggccagcggcctcgggttcccacggtccccagcccactgcaaaatccaggcctcccgcccctctatgactggagggtgggggcgaggctagcagctccctcccggcttcctccgcttgttctctcctccccttccccctcctcccggcggctctccacttcctttccccccaccccaccccagggaaaaacgaaaacaaacaccctcgcgcctcgcgcctccgactcccagaccccacgacccggctccggcgctggtttggcggcctgggtgggagaaggcacctcgccccggaccccctatgccccgcagctcagtgactcttcccctcgccctccgccttccccgccgcagcccggctccgcctcccaatggggaaacatcccaaaaaagggcagaaaagaaatttcagcataaagttggcccactgggaaagagaggagcgtccgcggggagcgggggagaagagggaaggcgcgcggaggggagtggggccaggcggagccaggggcggggagcggaggggctcgggacgcgtccgggtgggagcgggggcggggaacgcgcggtgaccagcctggccgcagccgcgtggaaaatatgcggggcacgtggggggcggggcggggagctgggtcctgagccgccgggtgctcgcaggaagggcctggctccaggggcaggggctgggaggggaggcgaggggatgagaggtcaggccggtcctgggggcagcaagcccggccacactccccaccgcgaccggggctctgggctcgcttcctgcttcagtttccccaagctcccgatgagactccgctactaccaccacgtcgataacgcaaacctagagggactcagggtaaactgaggcactcaaactgccgaggagctccgcctcccgagagacatttaatccggggggatttgcaggaaacttctaaattaagggtagcggctgctgcagctgagggggggcacgccggtccctgcgcccgggcagctgccgtgagctcacgccccgaaatagccccaggggccccagccgcagctgccactgggtccggctgtcactcagaggaagcacggagcccccagcccaagggtcccctccccttcgcatcgccggggtttttccagccgaccgtcggccactttttcctccgacggctggcagggaagagggggatgggggcgggaccccaagggaggcggtccccagtgggtgggcgaagggggcggccgcaccccccggccgggccgtgcttctgcccctacaaggtttgggccgaggtgggggagggtcctggttgccggccccgcccggtccctccccgccttttaggcgcccgcgtggccgggacgtcccagtcccgctccgtcctcctcgcctgccaccggtgcacccagtccgctcacccagcccagtccgtccgg

SEQ ID NO: 41781 - DNA, 2300 bp, Homo sapien
gacattggcaatgtctaagtaaagctggagctgggatgggggatggggtacagccagtggctgggtcaggctgagtagaggatagtgctgtggtcagtggcagggtcaggctgggagtgaagtgggggtgtggtcagtggcctggctgggcgtgggatcagcaagacccagtttcctctttgggtctcgtttcctcttttctgttggggagtgggggaaggggatctacaaatggtccaagaaattaaaagaggcttagatccagggggtgacacacagcaggggatgggagtagggtattcagcagatgaccaggtggaatgtaggtacatgactgggtgaaaatggtaggagagtaatttaaaatgatgggaaagctcaggttttgatgagggtaaattcaggtaggatgtgcggattaaaggttggtgagggaggtagaactaaggatgggaacggatgataagatgagcatgggagagttaaaggcaagggaagtattttgtaaggggataggcaggatgggtgtgaaatgcagagtcagggatgagagttggagaggagggcttaataccaagagaacaagtgaagtgggagaagcagggctaaactttcaggggattcagttattcccttctcccatggcaacagtgattccttggttagcttcccccatagtcatcagctccttcttccctaggcagtccccaacttgtgactaggccttgtacatcctgggtccctatttcccacctatgttgtctgtaaacaacacagtccagaatctctgtcccctaactgtggtggccacagcaagggccttgggcttagagaatggaataaagaagctggaatcccagatgcctgcaattctagctaaagccagaacgctagcctgaaattagtttatctctctgggtaaaaagaagcccctgtaactacataggaataaaggatttccctacaaaagaagggcatttacctactgccaacctcttaaattttatctgctcaaggtcaactatgctagcctcaaaccacaacccctaaagctgccccaaattcctaacattaaccccacctctaatttgtttcctgattcccagtaccggcttggacattcatccctttcctagcacagactcatatccaatccctgatccctgaaactgatctaagttttgcctttagcaccaaatcccctgatgttaaccctaaatgttgacccctaagcctaaagttcatttataatttgattcctaactcacgctttcactgtttatccttaacaccgaccatgccaacattctttaatccctcaaacaagctctaacctgattcctgttgtttgttgacccttaacctgaccctgaactcaaattatgacgtatgatggccatcccagcaaacaagataatgaccgtaatctaaaccttacctatctaaaacggacctgactcacactaactcttaagttttaaccccagcttttaactcctatagcgacccttgattcctaaacggaccccacctaatccccaactcacccaaagctttcctacccacatgcccgctatcagctaacaccaaagcccgtccccgccctgcgccccgctgccacccgactcctcacgctccccaaagcctatcccagacataggactgctcccaggaaaggcctgtcttccccaagacggcctacttcacgccgagctcaagccgagatgcgctggacgctgacctctccaactaataggacccgaaccggacacgcaagagaggcagggcccgcccgccccggggccaggccccgcggccccaccctaaggcccccgcccggcccggtctggcctacctgcgctgcctggctctgcgccccgcccgccggcccgccgccccgccgcttctcgggtcgccctcgggctccggcctcgccctcccttcgacactctctcggccacttccgtcctgggaacgtcccccacccgcgggcggcgccctgggcccgcgctctatggtcgcggggggcaggcaggaagctgctctggccccgttctcgatgctcgggagccgccaaagcccggcagcccctccctggcaggaagcgagggtgcggcgcaatccggagaggacgccaggacgacgcccgagttccctttcaggctagaactcttcctttttctagcttggggtagaaggcggagccggagccccggaacccccgccctcggggtgcgaggcggcagcagggccgtcccctacatttgcatagcccctgggacgtggcgctgcacccaagc

SEQ ID NO: 41782 - DNA, 2300 bp, Homo sapien
gagcttaaagaaaaaaaaaaagacaaaatttttaactcatcttctcaggatagactgcatcctcttagtatctgtcaaagatgtgctctagccagtatcaaggaaagcaagagagtgacttgtagagacaataactctattgctacagtttccaaatcccatgaactttcttagtagccacatcacactgctgactcatcttgtactttgaagaaattaaaattcttcactttgggaggccaaggtgggtagatcacttgagcccaggagttcgagaccagcctggcaacaaggcaaaaccccatttctactaaaaataccaaaaaaaaaattgccgggcagggtagtgtgcacctgtagtctcagctactcgggaggctgaggtgggagaatcacctaagcccagaaagtcaaggctgcagtgagccatgatcacatcagtgcactccagcctgggcaacagagcaagaccttgtcaaaaaatatatatatattcctgtaacctttctattaatgagcactgatttcatcatagtaccccagtactctgcttgtgaagttgccactcattgcttaaaactgaaaactaaggattttacatttattcatgtactgcttagtccaaccctgttgaactctctaaacagttctaccattcagcaagaggtggattactatgaagccaacgaagtgtcaaggcccttcacttacacagtcctttccaaggcccaatactaatgttgcactgataattttgagttatttttttaacagaacaccaaaatttgtataagcccaacaaaaacgaggatctgcccttgcatctggcatattgtgtacctgcctcaacttcctattagcaataaatctactaagtttctcacctcaatccttttttaaagttattgatataaagttaacagaatttgcctacttgggacttttaatcccttttcagcctttgttcaaccaatgagagtcttaccttagtgagaggaagtgtctcaggcagaataagcccctccttctccaatagactcttctcctcatctgtcagtactagcctagcaatctcctagggtaacaagaaagtggacggcagttgcatggggatgtcagagaggaatggggaatcctgcccccacctggggaatgtgagagtaatctcctgaaaatcaagtcaagtacctgctctgccagctcctccatatgctgtggagtcatctgggtcccctcttttctacagctctcactctctgcaaaagggaaagtatgaatagccaggcccatgaaccctgtcctccccgcaaacttatttcagactcacctagatccatagagacagtttcccgtgggagggagtaggtgtggtcatggtggacaaggcaggggttggaggagctgagaatgttcaacgacgctgggggactcagcagggagcacagcaaatcatctacttcccagtcgctcggtacctgcgcagggttccaatgaacaggccttgaccttatcaccatcacctgacttcatggacatcccacgctttccccagtcagaaccccaacctacctcagaaagcggcagcgcccagtccagtggggccctcacggcctcatcgggtgccgtccccaaatctccactttcctctagcaggaaggccagcaggtcttggtcaccagcatccaattccagctccatttgggacaactacggaaagggtgggccaccgggccccaacgtccgaagcccagacacgagccccaggccagctgtaggcctcgggcacctatccactgtccctctacggccgggattccccgccggcggctttccatagccctctccggacccgcctcccaggctcaattctcctcagcctccaacgcagcgaaagtgacgcaccccaccccgtggcactgtgggacttggagttccctccaactgagaagaggcttgggtgcagcgccacgtcccaggggctatgcaaatgtaggggacggccctgctgccgcctcgcaccccgagggcgggggttccggggctccggctccgccttctaccccaagctagaaaaaggaagagttctagcctgaaagggaactcgggcgtcgtcctggcgtcctctccggattgcgccgcaccctcgcttcctgccagggaggggctgccgggctttggcggctcccgagcatcgagaacggggccagagcagcttcctgcctgccccccgcgaccatagagcgcgggcccagggcgccgcccgcgggtgggggacgttcccaggacggaagtggccgaga

SEQ ID NO: 41783 - DNA, 2300 bp, Homo sapien
aagcccctgggcctgggaggttaagagtaagtaagaggagctggggagctagccgggacccagtgtactcgtggagcctgccctcacagtccctgaccccttcacaggcagctaccacggtaacccacatcacagcctttgaccctgacagcacggggcagcaggtgtggcaggatctacttcaggatggacagctggactctcccactggtgatggggggtctgactgggagatggtgggaagagaggttgtccctgtcttgggaccaggggtgggaggcctggtaataagtaggccttgtttccatgttagggatccctatccctggggctgaaggggctcctgtcctgaattctcttgtgtttctctcaggccaaagcacccctacgcagaaaggagtaggcattgctggagctgtgtgtgtttccagcaagttgcgacctcgaggccagtgccgcctggagttttcactggcttgggacatgcccaggatcatgtttggagctaaaggccaagtccactacaggtgaggggaccaagaaagtgtaaggatccagagtgctggggctctgacctggggcttgtgttcatccttccccttcccaccccaggcggtatacaaggttctttggccaggatggagatgcagcacctgccctcagccactatgcactgtgccgatacgcagagtgggaagagaggatctcagcttggcagagcccggtattggatgacaggtgccagtggggcccatttcttgcctttctcctgggcactcactccaaatgggactcctcgatttactctccacccaccaaagtcagtagacttgcactgggattcatttgatgatcccactctgctgaacccccaaatcctttccatcttgggaggtacatgttccttaaaccatttcctcctcctcgcttcccagatcactgcctgcctggtacaaatctgcgctgttcaatgaactatacttcctggctgatggaggcacagtgtggctggaagttcttgaggactccctaccagaggagctgggcagaaacatgtgtcacctccgccccaccctacgggactacggtcgatttggctaccttgagggtacaggatgctggtgggctgggatatggcaggccatccccaagtcaggatgatggatttgcctaccccagggtattggttaggatgagggggtgttgggtgtggactagtaacaatgccccacctctaaatctagaggacaagctacagaggggtttgaaggggaagcaggaattctggcaacagtgtgtctcattcattcctccaggccaggagtaccgcatgtacaacacatatgatgtccacttttatgcttcctttgccctcatcatgctctggcccaaacttgagctcagcctacagtatgacatgggtgaggatcccttttgtgccgcttctgccctcttggctccccatacccccgaacttctgtggtccctcagattgtctcttctttcccttcccttcatacgtatctgcatgctgcttactggttccccactgcagtcacacacatagctgtgtgcccctcctcaggcatgcccattccctgcctcccttctgtgtctctcccccagctctggccactctcagggaggacctgacacggcgacggtacctgatgagtggggtgatggcacctgtgaaaaggaggaacgtcatcccccatgatattggggacccaggtaaaagtccaccccaaggtcagcttccctccctcaacttttgcaccctctaccctatccaccaatgcaagtgacccaagtcccctcctctcccacagatgatgaaccatggctccgcgtcaatgcatatttaatccatgatactgctgattggaaggacctgaacctgaagtttgtgctgcaggtttatcgggactattacctcacgggtgatcaaaacttcctgaaggacatgtggcctgtgtgtctagtaagggatgcacatgcagtggccagtgtgccaggggtatggttggtgtctgggaagagcctagctggttgttgcctttcctcggtacctaggtcttcaacatcttggtccctctctaggctgtgatggaatctgaaatgaagtttgacaaggaccatgatggactcattgaaaatggaggctatgcagaccagacctatgatggatgggtgaccacaggccccaggttagcgggtaggggtttccaggaggcctgaggtgagaaactgggcaacaagggattgtagggctcaagaaagaatgactcattgtctat

SEQ ID NO: 41784 - DNA, 2300 bp, Homo sapien
atgcccatcttttcttgatctcattgttcctaccacatgcaactcagtgtacttctctatgtacactagatcctattttgatgcaaaaacttttggggtcaaacttggactgaattgattccagaagcagcctggagggatgattcttctctgctacaggctacccacaggcaccaacaaagccagatgtgcaggcagcatcaggcccttcccactccccagggctagggttagataactgatctccccatcacagccccacagcactgactggggaaatgaagggtctcctactctagaaactgtaagggcagggtttcccaagctttatgcctccctccacagttctgtgtgtattgtgtagactgagtcaggatgacctcagggtgatgctttctgtcctcacatccacctgttcctgttaatgggtctggctcctcatcactagtctttgaactcagtggggatctagatgggttctacatctatggcagtgcctctctgataaatgacttaatatcaagagctctctatcccagaacagaatgacagcaccttctcatcacttcagaggtgagggcagggaggctcttcttacctactccctggagctaaagcttgaagaaagaagcagtagtgttgggactctaacagtgtgtctaatgaggtacagagaatgccccagctgcttgtgggaaataaggggttgagacccccccacccccaaataaaacaacattgtgttagtatcacagcagccagattatcctttcctaccttgccacaaagtatagctaatcccaaagggaagtcattggaaaccagtatgtgagaagagcctgaatgggaaaggctgattgcatgaccaaatgttcctaccctttccttctgaaaagacaaaacactgggagggaagggtgttgcaaagagatgtgacctggtctcacggtccaaaaccacaggcctaaaatatgccagggatagggaccgcttcactcagacaagaagcccaactgctttcttgccctttcccacctctgctagaagttttgagctggaacaaagtgaagccaaaggcattctaggcaatggggtctactcacctcaagcccatgcctatatgctttatcatgttgcttagggagacgttgttagcttgaaagggtttcctcttctctgtaaactcatgagccagacagatgcgccagccaaagggaggcacctggtagcccatagctttaccctcataggaaaccatcagctgcccagagtcctccggattgcagcagtccgtctcttttgggggtcggctgtcttcgggactcttacagtctgtaacctgcacatccttggtgccgccagtctcttcagggcaataaacttgtggatcctctttggcacagcttatctgctccgaggctgggacgccggttcccatgttccctggatcctgggtccccatgacctcgatggcgccaagtcccgagccctcggatactaagtatctcgccagcctattccagatgcgggcgccggtcgttgttaggtatcgtcccggagggccgggcgttggggaaagcttaaatgagctggtgtttcagtggagccggggagctcttgcttcagtgggggcggcgacagcaaagaagccgccttgggctctccttcggttgtctctgtaggtcctggacgggaagggtcgggcctcgtcgtcattgagccgacgattagctcgcccggccaaagggcgactgggcccgcagagaggggaggagccgcggggccagcccaccaggcaccgccccgggacgggcccgcaaggcaccgcccccgggacctcggcccggcccctgggccacggcaccgggtcccccaggattgggcgccaggtcccgccggccggctccggggcagcgcccgcgcccaggtgccagcccgtgggaaggtgaccctgggcgccgggatgacccgagccctttccggtctggcctgccgggcgcttccggccggaagggactccgcggagggtgggggaccgaagggaagtcccgcctctaccgcccagcggacgccgccgccgccgccgccgccgcgtacctagccaggtccctgaggggcgggcagatgaggcctaggggtgccgatccctagtgtcgactatgcgaggtgactagcggcggtgatcttgggctgggacgtggaactttgaggaaagggggagcggaggccagtttgggaactccgcgggggtgcccagggagaagaacccgtcgcacaggggctggggtctagggcccaga

SEQ ID NO: 41785 - DNA, 2300 bp, Homo sapien
cctccaagaatggactggatggggctacagcctcatcctggggaaaccggacatcctgaaggcctagagaaagaatgagtggagaggtaatgctgagagggaacggagatgagagtagaggttagggttttagattctaacatgagatggctaaaggtaaggggtgccagggctgaggtttacatctctatctccagaaccctccctcccttcccaactccctagcactgtcactgagaccaggaagtttccctgcagtccctcttgcaagccctctaagacaatttctgctttggcatcgcccttccccagcccttccctccaggagcccttgcttaccagtcagcacaagaaccctcagagggactctgagtaaagtgataggggagttgacacgctggcagccaatggtcagtttgtagacgtacttgactgactgaccccgaaaggagggtggtccctctatgggcagcacttcactgtaggagtctggttgggaagtagttgtcaggacagccagaggcaccagaggagtcctccctccaggagacttagaaggcaattcagggatggggacaatcactcacatgatttggactctccaggatcaagcctcaggtcacagaatagaattttcggtggagtagaaaggatacactggcccctctcacctgaaaaaggtaaaaatgactaatttaatgacccattgtccagtactgaacaagactagcacggcaagtggagatagtgaaaggctgccaggccctccgtccctgctgtgaaatgggaatagtcttctacccctaaagcaatagtcatgctccccaacatccccagcatgacagggactataagaacaagaacaattaacaacttcacccatgggtgacaatgcctccacacacaccctccgcaccccccctctcccaggcaaatgcccctctctaacctcggtgtggcagaaagacagtctggctgtcgggctggacatctggctgactagagtcaggaggaggcagtgctactcgactctcactggcatggaactggcagtggatttgggcactggcccaggccagggcctcactgtgggaaaaggaaaaggaggcatcagaggtagttcctgacctcacaaatgctttcccaagctccctatcacaccatcttaaccaacaaggttagatggctgtcctagtgatcaggaaatccacaatcccaaagagaaaccattaaataaagagtagcagactgtgcgtaaaaaggggaacgggggaggggaaggaaagcgtacagctatgtcatccacatcttctgttaaagagccctctcctacaatgacagcacagtgagcaagaggaggtggtgtcgctacaggacaacctgagctctgcctcagccccagagataatctggcttcttcccagaagggccaccaccttcagtgccagcatccccacctggatgcagaagtggccgtgggcggaagggggttggtgacggtcactacacactccagcgcctccccagccaaaaatacaggaccccggctgagctctgctaccacttcaatcatggcagctccggaatcagatctagaaggaaacaaggcggggcggaggtcagcaccttgacagggaggggcgttgcggtgagcacctagggctgagggctgaggacaggggtggtcagcaccgtggtgcccgagggagctcctggatataggaggggtaggcgggtgggagggaggcgactgaagactcagtactgcccagggggaggacatcgctctgggccctagaccccagcccctgtgcgacgggttcttctccctgggcacccccgcggagttcccaaactggcctccgctccccctttcctcaaagttccacgtcccagcccaagatcaccgccgctagtcacctcgcatagtcgacactagggatcggcacccctaggcctcatctgcccgcccctcagggacctggctaggtacgcggcggcggcggcggcggcggcgtccgctgggcggtagaggcgggacttcccttcggtcccccaccctccgcggagtcccttccggccggaagcgcccggcaggccagaccggaaagggctcgggtcatcccggcgcccagggtcaccttcccacgggctggcacctgggcgcgggcgctgccccggagccggccggcgggacctggcgcccaatcctgggggacccggtgccgtggcccaggggccgggccgaggtcccgggggcggtgccttgcgggcccgtcccggggcggtgcctggtgggc

SEQ ID NO: 41786 - DNA, 2300 bp, Homo sapien
gggagtttgaggtgcactgacacagtcatttctgaacagtgaagagatgacaggtagggtggtcccccttgaaaagtcagccagaagtagctgtatctgatgcactaggtggcagggagtgagtcttggagtaaatgggactgaaaacgtagaaaaaccaaataaatgccaaagagactatccctatggagaatacctagaacatgggtctttgaagtgtggaaaaatgaaagaaatccaatttgaccagggcctttagtgccaaagagatggctagcaggagagtggtgagaaaggagaactggagagttcacatgagcggaaataggaagaaatggatccaaatccaagtgagaaaaagcaggagacttaaagttagcctggcaggatgatgagaaaaggacatcttgtcctagggtagaggcgagggtgcagatctgggggaagaaggcttattgggaacagtttctcaaactagacattcagaagtcaatacaagggccaaaaccaaaatgttcctggaggtacctgtttttgaaagaggtgggaaaggtgacatggattaggggtctccatcccccaggccacaggccagtaccagtctgtggcctgttaggaagcgggagcacaaagcaggaggtgggcggcaggcgagtgagcattaccgcctgagctcctcctcctggcagatcagcagaggcattagattctcacaggagtgcaaaccccactgtgaactccgcatgcaagggatctagattgcacactccttatgagaatctaatgcctgatgatctgagatgaaacagtttcatcccaaaatcatctccccgctgctatccccctccatccactggtggaaaaattgttttccacaaaaccggtccctggtaccaaaaaggttggggactgctgacaaggagtatgagtgtgaaaggtgcagaggtctatgccaggagacagccatccccaatagaagccctcagctatgcacaaactgcttaatgtcattcaaagaaaataatgtcgcccattttgcctcagagctttagccccaatcacagcaactgctatttcctgacgcttacgcaccagagatggtgataagagcactgcacgcattatctcagtaatcctcataacagcccaatgagttggcattactatccccaatttatagatgaggaaacaggctcagagaggtgaagtaatctgaccaggttacatagctaagtggagtcaggatctgaatccaagaagactgtctctacagcccatgctctcaataatccatcctgggctcctccagaacctgtgggaaactcagaggatgccaaatgataaattcctaaaaacctcactccattatatatgggaggaaagagaggacacctctgtgaacctggagtgattcatcccatcagggcacttagagatgctcctctttgaaaggggaaagaaccatccccagatgtggggtgatcccacatctgctgtatgtttgaaggtgataagcaatggacagttcacctctggaatgcctgaggaaaagagaccctccccaccatctctgaggggcagccctatttcttggatacattagggaaaccctgccctaggatctgagggaaacacagtctccactccaggtgcctgctcactctcctggagcttctggccgtcgcaccctattgcagctcctgggtttggctggggcacaggattaaccatccccaggaaatgcctccctccggtccaggcagggatcccagcatacacacccctggtggtggcagtgggggagaaagggggaaggtggaatgcttccttctctccaggtcagggaagagatctggggaccacctgggggccctcgcccctcctgcctccttgctggggaagtgcccagtccagtgccccctccatggccacctccctccctctagctgtgccggggcatgaatcagctctcacagcttgttaaagctagacctcttgttttcatgccctcacctcaggaaacagagttacaacttttccagctctactcagcagggggccagggtcctcactttataaacatccccagcctgtgagagcagagggcagggagatagtgtgagacaggagcccaggggagaaagacagaaactaagactcaaggagcaacgcaaagcaaagtcaaggagtcaagaccagagtagctgagcagaggccaagaagggtctgagagggctgtgcagcagcaatggccctaaggatgctctgggctggacaggccaaggggatcctaggaggct

SEQ ID NO: 41787 - DNA, 2300 bp, Homo sapien
tttcccttccctctcatgatctctcctcagtaaaaccaaggtgcatttttctggacccacctatcttgggggtgattaggagtagagggttgtaaatacttaaaatttttttcctttctgatataattattgatctccttctagaagtcctgtcgtctttgctggagaatttttatttaagcatccttttgtagaagaatctctaatgtccttttttcatccagatctacacttgatgaatcctaaagctatttctacacagttcctttattcatttttccttttttttttttttcattttttgtgcctgttatttttcatgggtttatcatctctttacaaatgggctgcgtccactgaggggcagcattgatttcccgctgctgtcactcagcgcctcagcctcctttgatcccttttttggttcacccttgttgcccatacttactttcctttattgtcagttctaatcttctccttttctatctctttaatgaaattcaccattttaaaaaagatttctggggtctcaaaagtttttcaggggatctcgcataagtctctgcattgtgacctaaactgtgtagcactgatttccaatggattggggctgatgggcggggtggggggccattgttgggagagcagaatatcctcatgaatagagtttctcagtgacactgttaacattttggaggataatcctttgttgtggggggctgtcctgtgcatcgtaggatgcttagcatctgctcagtagatgccaatgatattatctcagatgtgacaaccaaaatgtctccaaatcctgccaaatgttcctggaagacaaaatataccctctactccagtgtatagaattactgtactagaatatcagctttttgaaattgattaaatggttatactttctcttcccaactgctgatttgtagctggaattttaaaagtgtggtctttgacttacttggtaggtggtagcttcttaaaattgcaggttcctgagcttatcctagacctactgaatcagaaacgctgaaggtagaacccagagatctgatttttacaagacactaccttcccacccccaaccaggtaattctgccctaggcttgaccctcctgtggcataactgctgcattatctacatttttttctcctgcaagtcttcctggtgttccagctttgcttccgcttttggccccatgatgccaacacaaataaggaggcctcaggttaccaagacaactggagcacaggaaactgtacaggctcagtgctcccacaagcatcatggactgtgattatgctggcttgctttctccttagggactcagccatacttccttttccccatccccaaaactacccagactggcagagactgaggcccaagccacagatcctgatttcacagacctggtagtagatttatggggtgggtaggataaggaatgatgaatgaagctttccttctagcattgatatttcatgtcattttggtgataattgaatttgtaatcatgagaactacatttccctgggagttggttgttagatgcaagttttggaatcaggatgcttctctttatttattatgttatttatgcctgcttcactggaccttgagtcttagatgtttttgcatccctagctaaatgtctttacaatttgctttgggccaaaaggtttggcaatctacttctagtacactggaagcagctaatgttcagtaagaaaagaatatttttagggccaggtgcatggctcatgcctgtaatcccagcactttgggaacatgaggcagatggagtgcttgagtccaggagttcaagacctgcctgggtaacatgacaaaaccctgtctctacaaaaaagaatacagaaattagccaggtgtggtggtgcactcccgtagtctcggctacttgggaggctcaggtgagagaatcacttgagcctgggaggtcgatgctgcagtgagccatgattgtgccactgcacttcagcttgggtgacagagcaagaccctgtctcaaacaaacaaacaaacaaacaaaaaaccccaaaaaaacaaaaacaaccaaataatgaatttgggttctatttacacttagttatcaaagctagtcattttttaaaggaggatcatctggcttgattaaattaagtttccttaaagccacaaataaatgaaaacctacttgcacttagatgctttaaaatactgactctgactgggtgtggtggctcacacctgtaatcccagcactttgggaggccgaggcaggcagatcact

SEQ ID NO: 41788 - DNA, 2300 bp, Homo sapien
aaaaatcaactattctatttggttgacttggtctaaagtatttctcatgttgtctcgtcattcttttgactgttccttttttttttttttgccttggccagataggacaaaattccttttcactgcagtattgggagcctggaactagagttaccaacccctctgcgttaaagaaggagctgtcctgaggcttccatctctactgggcttgaggcaagaacattgttagggacggcctgctcttggcctctgtgccccagggattgcaaatgcatgttcctcaaaggtaagggctgtatcattcggctttctttgtattcacaggtacagcttgtgctaggcagccggtgttcaataaatatcgtgcctaaggataaagtggcattgtccttaatttcccccaccaaaccactaggtgtcgccttcatctcagggaaaccatgcccgtcctcgccctatacactcccaccccactccagggctccaggagcgctcttagcttgtgatttctggagaaatagcttgaaggggggagagaaaccgtggctcttagcgcgggcagagaatgggcttatgtgcatgtcctttatgacagttggagaaaaatccccaaggtcccatagcagtccctctcagccaccatgagatcatccctcacaagctgttcttggggtcagattggcactccagatatgagggccctagggagagcttcctaagggaagctgggagcaaggtggaaccccaggagagcgtggatgggcttccactgcggggagtgtcccgccggtccgttacaggctttccccaggcgccagcctgcgctgtgcaggagacaaaagaaaatcgaggccctgactgagcagatggtgcggaggaagccgggcgggctgcggtgggcctctgaggacacgaggagggcagggggcatggagacagcggggggccgagagttgagtcccaagcaagaaggagcctcgtggactttctaaggactggtgggaagtgtacagcaggggcccctggctgctggaggggcccgtccagggagcgggcatggtccgcggtggagtaagccgcactgccgtcgggagggcgctatggtttgctaggtgagggggctggtgaggataccacacgtctggggatcctcgactgcttcctggagactggaaccactgagggactcagggagttcagaggggagacccaagaagaacgggctgagcgagggggagaggacaaaccctggggtcgctggcgtgtgtgagatggaaatggaaggaggggcggcagggggaccaggggcgtgggggagaccagggtaggccctgagagtgagggagcgcccgggaaccctgctggccggcgaggccttggtgcggagcccccaagtgctcaccggggtgggtttgggacctggcggtcccgagcgcccgggtggggggtgggggaaggcagccggcgccggagggtggggccgggagggaggaggagaggcagcgggggaggggcgggggcgggcggcctgcccgggggagtcgcactcggccgccggcgcagcgagcggagacgggccgggccgaggcgacctgacccggacgagcggcgcgcgcggggcccaggcggggggcgggaggaagcgccgggcagcgccggccgccagggcccaggagaagcggagcagagaggagcggggacacgggcggggccgccgtagctccggatgggaccagcgcccgggcccgttagtccaagcaggagctccgggagaatccttcacagggagatttacccctgccttcccctgccctccggcccaggcctcgcttcgctccccgcctgcccatgatcccagtccttccgcggcgcgggcaccctcccaccttacccccttggtcctatgtggcgcagcgccctcctgccctcccggccctttcagctgtgaggttcccccaggccgtttctttgtaccacccgccccccacccccaccccatcccagtcccagatccccttttccttctcagctttagatttatcaggcttcttcacctcgcactgtccccatcctggccgcaggccccctcggtccctccctccccctgccaccccgttctcagtcctcagtccttgccctaggctggtagcccactccttgcccgccccccgccttcctcccatctccccctcctctccccggcccccagcaccttctgcatcccagcctacctagcctactcctcctcttcctggccctcttccccaggctccaggctggggggtgctcgcgtctcccct

SEQ ID NO: 41789 - DNA, 2300 bp, Homo sapien
ttgaagttgtgatgccagtttcctgttggagcagaagttggtctcagtgactatgtggcctgaggcagggcctgagactgggaggtccagcagctcaggaaggggaaatgtgtgagactaatgggagccaagcaggcactttggtgagagacagagatgctgactcatgcgccagtgagatgtgtgcatgtctgagatcacatgtgtcatttgcttacctgtgaaatgtgtgtgggcatgtgactgtgtgtttgtccctgtgacacatctattactcagtaagcaggacagtgctgtttgtggtaggtgttccacacattaaatggatgagcacacagcttttcacaggtggaatcactgtctcaaagtatttccctcagttgtcatagggcctgaaatctctctaattcactgggcggagacactgtgttcaagtggccgaaatgacaatgttagtattttactgatgacattaacagtgattaacatctcagagaggagctgttagtgggtgttgtccttgatcataagcagatacccagaaagcatgggacagaggagccgtgtgagctgtggtggcctggcaggaacctggatgctggaagggagctctggaagatgttgggctgggctttggggatggggttgactattatttgccagtttccaccttcccagaaccagtcctatctacctttcaggaggagtgccactccctcttcccagatgtatgcaacacaacacacacacacacacacacacacacacgcacacacacacgcagagagagagaggttagtagccctttcaaagccttcagactcacctgtgtatattttatatcatgtatattttaccaagtttccctgtcctgcatcttctcttcccataatgcctatcttgaatcctgttcactcttccccatatgctgctggtacagactgtattggtgatcacgtaccgagaacccccaaatcctgagtatcaggaattccagaatcgtctgctgataagagcccgggaagactttggtgtggagctgggcccttccctggtaagtagatctctcccttcctgagagtcaggtcaagctttggggaagggcttctctcccaaactcagcatcaagtcttggctgtggagcaagcccaactttggggggtctccgcttctgtccaggatttttccttctgccctatggagtagttaggaagggatggcactttaggaataagagggaagaaagcaaaccagaagagagaataggtagaagggagaccccagagagaggggaaggggccttgcaggacatttggagagtactgctgaagttgccacccccagatgaacctcatcgctggctgcttctatgatgggatcctgctatatgctgaagtcctgaatgagacaatacaggaaggaggcacccgggaggatggacttcgaattgtggaaaagatgcagggacgaagatatcacggtaatgaagaggggtcaatgggggtctgagggctgatgtcaggaatagagtgggctgaagaagaaacagatgtcaggatcaccacagctttagtgggggttagtgaatatggcagagttgcccacacctcaagatcggggaagggtagactctgagggagccgtaggcatgagtgagtgggagaggagcccagggtagacctcaaagaaaggacactcttttctgtcttaggtgtaactgggctggttgtcatggacaagaacaatgaccgagagactgactttgtcctctgggccatgggagacctggattctggggactttcaggtgatggaggaggaggcagggaagagagtgtggccctgcaaaatccagctttcaagggttcagtcggggcagaaccaaaactactagatgagggatttgttttctctgctggcactgcatcctggctgggtggtaggctggggagaaaagcagcgaaacagctggggtctggggaggaggctggtgggagcaggcctgtgggcccagctttttgcttccttacagcctgcagcccactactcgggagctgagaagcagatttggtggacgggacggcctattccctgggtgaagggggctcctccctcggacaatcccccctgtgcctttgacttggacgacccatcctgtgataaaagtgggtgtgtgcagggactgggagcagctttcctccctttgctttccattcatggcctccaccctcactgaccctccactcttaactgtgcttctgcctttacgtctgcatccctccctcctcatttcttcctact

SEQ ID NO: 41790 - DNA, 2300 bp, Homo sapien
ttcaagggacaagagttaaaattcacagagtcacatgtgacacccagatgaggggtcaactagtgtcaaacagggcgattgcattaaaacttaaataaaacaggcgacaaggcttaaagatcagaaaacaagtaacggaaataagtggaaatgtactaacaaggtgagagtggaaagagattcaagccatcgcaagagattatggaaaccatccctttattttatattagaagctgagagaaggaatttatctgaggtaattcagtggtatggtaaggtaggaactgagaccaaaatccccagtctctcattctagatcctttccctaaacagtgctatatttcgtggacacatgagcaggaatcaattgcactgctgaatcctgataataataccgcctgttatctaaccaggtccagcaccttctggccctaccctttgctgctggtgctctgaaattcaggaactttcctcctgggtgggaacgatgaataggttattagaaggacgaaattaacaactatcagagcccagcttctgccagctccctcctttgaatatggtcgatccaccttcaggtccgaggagctgcaggtgtgactgatgggaatgaagtggccaaggcccagcaggcaactcctgggggagcagccccaaccatcttctcccggatcctggacaagagcctcccagctgacattctctatgaggaccagcaggtggggtgctcttaggacctatccccttaggaatgttgtagataccatccaacctgttgaagtaacgtggcctctggcctgtcacttcccccagtgtcttgtgttccgtgatgtggcccctcaggctcctgtgcacttcctggtcattcctaagaagcccattcctcggattagccaggctgaagaagaagaccagcaggtgggaagaacagggccagggtttggctgggaggagcccctggacccagctagaggtcttgctccctatgaatgaagccacctatgtccctccgctctctctatagcttctaggacacctactccttgtggccaagcagacagcaaaggctgagggcctgggagatggataccgacttggtgagtgacttttggcccttggtccctcacctatgaattctcattcctacttctcaatatgatcttcattcttcgacctctgccatgatcctgactccctaaccccaagctcaatttcagtgatcaacgatgggaagctgggtgcacaatctgtgtatcatctgcacattcatgtacttgggggccggcagctccagtggcctccaggttgaacctgccaactgattaaaggacaccagactctggatgcttggatggaaagggaaaaatggaccctgtgatgctaataaaactgttctcccttaattatgctctcctgtctttaatataaaattttataccacaaaggggaaagaaaactgattcagggctatgatgccccttgactggtctgagtgaaagacactgaggaggtccaacctgtggttaaatgttgcctgcagatatgtaagtcttcttgacaagtggtccaccctaggtcaagcttctagaaaagtaacagtaggaatgagcctaaatgagtaggaagaaactgaaagccaatcctggcccttcttcagaggtcaaaccaggttctaagggcgcttaggaggagggtggtcaatatgagggtcttttattagaggaggagtaatcacacccaaacaaaagcggctgccttttcactattctacgtctcaccattttgctcaagctagtttgtttattttcatccttaacatttgttaaagaccccactcacttttgagaatgaactaagcaaactaaggggaagctacttgcctctcagcaaacaccaagtaggctgtaatctaatgccacaaccctgtgcctgtttccaacatatccccataaagcatcatcttagaaaaccgcacgcaaagactgtttggacgtggagggcgaggtcttaagccagcggaaccctaaaaccccgtctgaggcggaatgccgccgggaccggaaagcggacctccctaacagcactaggctgaagacttccgccccgcagaggacttgcctccaccgccacctgcaagtccgcccagctgtacttctgcgcaggctccaggagttgtttgctgtctctatggcaacccagtagctggagtctgaagatggagaccaacgagtctacggagggatcgcggtcgcggtcgcggtgagagccgcagctctggctgcaggcataaggggacgagg

SEQ ID NO: 41791 - DNA, 2300 bp, Homo sapien
cttaagacctcgccctccacgtccaaacagtctttgcgtgcggttttctaagatgatgctttatggggatatgttggaaacaggcacagggttgtggcattagattacagcctacttggtgtttgctgagaggcaagtagcttccccttagtttgcttagttcattctcaaaagtgagtggggtctttaacaaatgttaaggatgaaaataaacaaactagcttgagcaaaatggtgagacgtagaatagtgaaaaggcagccgcttttgtttgggtgtgattactcctcctctaataaaagaccctcatattgaccaccctcctcctaagcgcccttagaacctggtttgacctctgaagaagggccaggattggctttcagtttcttcctactcatttaggctcattcctactgttacttttctagaagcttgacctagggtggaccacttgtcaagaagacttacatatctgcaggcaacatttaaccacaggttggacctcctcagtgtctttcactcagaccagtcaaggggcatcatagccctgaatcagttttctttcccctttgtggtataaaattttatattaaagacaggagagcataattaagggagaacagttttattagcatcacagggtccatttttccctttccatccaagcatccagagtctggtgtcctttaatcagttggcaggttcaacctggaggccactggagctgccggcccccaagtacatgaatgtgcagatgatacacagattgtgcacccagcttcccatcgttgatcactgaaattgagcttggggttagggagtcaggatcatggcagaggtcgaagaatgaagatcatattgagaagtaggaatgagaattcataggtgagggaccaagggccaaaagtcactcaccaagtcggtatccatctcccaggccctcagcctttgctgtctgcttggccacaaggagtaggtgtcctagaagctatagagagagcggagggacataggtggcttcattcatagggagcaagacctctagctgggtccaggggctcctcccagccaaaccctggccctgttcttcccacctgctggtcttcttcttcagcctggctaatccgaggaatgggcttcttaggaatgaccaggaagtgcacaggagcctgaggggccacatcacggaacacaagacactgggggaagtgacaggccagaggccacgttacttcaacaggttggatggtatctacaacattcctaaggggataggtcctaagagcaccccacctgctggtcctcatagagaatgtcagctgggaggctcttgtccaggatccgggagaagatggttggggctgctcccccaggagttgcctgctgggccttggccacttcattcccatcagtcacacctgcagctcctcggacctgaaggtggatcgaccatattcaaaggagggagctggcagaagctgggctctgatagttgttaatttcgtccttctaataacctattcatcgttcccacccaggaggaaagttcctgaatttcagagcaccagcagcaaagggtagggccagaaggtgctggacctggttagataacaggcggtattattatcaggattcagcagtgcaattgattcctgctcatgtgtccacgaaatatagcactgtttagggaaaggatctagaatgagagactggggattttggtctcagttcctaccttaccataccactgaattacctcagataaattccttctctcagcttctaatataaaataaagggatggtttccataatctcttgcgatggcttgaatctctttccactctcaccttgttagtacatttccacttatttccgttacttgttttctgatctttaagccttgtcgcctgttttatttaagttttaatgcaatcgccctgtttgacactagttgacccctcatctgggtgtcacatgtgactctgtgaattttaactcttgtcccttgaatgagtggaggtaagagttcagctaagtgacctctgctcccctagccccagggaacttcgggtaagggattcagagaaggctgatgtcattgcatcacgttgggggagaacgggacggaatgaattctctgacctccgagccgcttctggcaagtgcagaagagaggttaacactagtgctcattaggaggccagaagcctgaggagggcagagcactggctccaagaagagaaagctcatttcctgcagggggcatcgggccagctgggctgcaggcagtggaaagaa

SEQ ID NO: 41792 - DNA, 2300 bp, Homo sapien
catacagcaccaatagggaaagaaagtgatgccaggaggcaaatgacagattgaaaaagggagcagtcaaaggaagagaagtctctaatgaggtacagtagcagacgtaggggcaggggttggagtacaagagacagtgttcagaggctgcagagcataacatctttcagatgagggcaagtgaaggtgataagtgcttgaagtagagaaaactgtgggccaaggatcaaaatcagtgaatgtgggaagtcacaagggagtccataggttcttatgggagtaggagattccagcactaatgggctctgtgaacccaggcaagtcactgtccctctttaggctgagtttctggacctgtaaaacaggaataacctctgtgttgcctactttctatgagaaccaaagaaataactaatttcaaagtgctttgtatccacctatcctccagactggcttccttcctcttcctagatcccagatccacttatctctcgcccttctccagggcaactctagggtctcccagtgtcccagaggcaccacagagaactgcagcctctggggcccagagaagaggccattctacatttcctcacaattaggggggccatctgttcctccaagggaaggaatgcaatctggactgctaggatccctggggaaaatcacagaatcaaatgtctgccctttagaggagaaaggattttctaacaataatatagctatacaaaagagattgttatatctctagaagcaaagttccccaacagtggttatatgccccatgataaccattcacctaaaactaattcaactaatagtcaacaatagagttaggattactatgataaactcattgaaggaaataataagcagccaatacaaactatatttacgtagactgtaaaaatatgaaaaattgattacacatgggttagtatcatatgcaatacatattacatattatgaaaaaaagacaggaaacaccaaatgttattcattcaacaattactgaccacctatatgtatcaggtcatgtgtttaaaaaaaaaaaaaagaaaaaaagaaaaaccaaagaaacagtggtaacttgtcctatgtgatatcagactaaaacttacctagcgtctgagaatattagtattttgtgaccccacgtttcttatgtcaaaaatatatattccagcagtgcaaacctgacttattggtgcctcatacctgtaatcccagcaccttgggaggccgaggcaggaggatcacgaggtcaggagatcgagaccatcctggctaacacggtgaaaccccgtctctaataaaaatacaaaaaattagccgggcgtggtggcgggtgcctgtagtcccagctactcgggaggctgaggcaggagaatggcgtgaactcgggaggcggagcttgcagtgagccgagatcgcgccactgcactccagcctgggcgacagagcgagactccgtctcaaaaaaaaaaaaaaagaaaaaagaaaaaaagaaaaaaaaagaaaacaccaggcaccgagctaactgtatcacacaccttttccgattagaaaagaacaatgaatacatactcctttgcttattataattcttgtgcggcaaatataggacactcttatctcctcctgctcaaaaaaaaaaaatgcaaaaaccacagactttttaatctatggagtgaatgcgttaacaagaacatagaattaaggaagaatttcccttagataagtacattaaaatctccaaaatgctcaagggactgaaactgcccttgtggagaaaatgctgcgcatcagccccgccagttaaaacaaacaaacaaacacaaaaaaacacacctcatccccgttcacctttagccccaccccgggtggttcttggagccaataagcgccggatgccctcagagccccgccctcctcctggccaaagcggtgagagggtctaaaacagccctttctgcagcaggtggcggagccccgcccccttctccccgcgcaccaataggaaccagacctgaagaggacgaaccaagaacgaaaagaaccacccactcgggagccgcaacctagaagccagagttgtgtatcagattcaactaggagaaaatcccacctccaggctccattaatccttccaatggagtggaagtttctctcacagagaaactagtaaggggatccaatgggaaaagaacgttcacacggactagaagacgaaaccaatggaatggaaaattgtcctcgcgttggtagaagcagccaatgagatgaaaagagcccgcctc

SEQ ID NO: 41793 - DNA, 2300 bp, Homo sapien
tttccacagacagcaaaactgaactttgggaattatcctagtcttttccttttcccttagactccatcttcaaataggcaccaataactctatttcctatcttctaaatattccccaaatgcattctctcctctcccttccaattttattcaagttctcatcatcttcagcctttgtgtaataactttgcccctctacttccatccacagcattttaatccattcacccattctttcatggatttatgtaacttatacttttacaatgagcctaatctgatgcttttactgacccgctgtgctaagctctagattgagttgagtctaggagagagaccgattaaccaacaatggcaatacaaataaattgatgttgttctggggtgagtctaggatacggtggggagggggatatacctaatttatcctgcaaggatgtagtcctccttcctgacccaatcaggatctttctaaagtgcaagcccaacaactggcactttgtggcttaaaaacattccatgactcagtctaaaggattaagtccaaatttcttggccctggcattcaaggcctgtcatcattttcaacacagcctgaggattcctgccttaactttccgtgctccctactttacccccatgttccagagacgctagatatatcactccttaaatgcatcagagcctttttgaaggggatgtttgggaagggaattaggggcagaggtaggattacagggaggaagatgaccagagtcagctagagagaaaaggggcctaagagtggagaaccagaagatgggaggtgaggaaggggaaagagaaggggaggaggaaattgggtggaggaggagagtaaggatgaaaagtacagaatgtgggccaggcatggtggctcatgccagtaatcccagaatttgggaggccaaggcgggtggatcacttgaggtcaggagttcgagaccagcctggccaacatggtgaaacccagtctctactaaaaatacaaaaattagctgggcatggtggcaggcgcctgtagtcccagctactggggaggctgaagcaagcaaatcacttgaacctgggaggcggaggttgcagtgagcccagatcgcaccactgcactccagcctgggggacagagcgagactctgtctcaaacaacaacaacaacaacaacaacaacaacaacaacaacaactactactactactactactactactactactactactactactacaacaatgtgaagggactgaggggtgggagaaagacagatgtctttgagggaagagggcaagggccgttggagaaaccacctaccctctgggctttggcttggttgttacaagtccttaggtcaagaccttgacttaggatggcagggggaggtgttgatcctcagggaggaaaggctcttggttgtggatgtgcctcagctgcaggtgctgagtgttgaaatgccttgcctgaaagtctgctatctgggaaggggacttggatatctgcagaacttcgcaaaggagctctggcatgacctggggaagtgggtagggacaaggggtctagggccaatgagggagggtcttgactgaagcctccggaacccgggccaggagagtaggcgccggtcaccagggcaaccggaacgcctagtagtctccgtggcaacggcggtctggtcacctccccggtgggtaaggtctcctgaggggcttgcattgggcctcgagggggcgagcccagagggtttacttctgaaaagtggggtgtgtgttgcgggatctctgtgagcgagtgtttgggtaggatctgcggagatctgtgcgtacgtccgggggagtctgggattgtgaggatagggttcctttgagacatctgtggggcggtcgttgggggctgtgaggatctgaggggacctcgggctctgtgcttggggtgagaaaggcagggtctcgggtagctgaggcgggggcggagtctgtgtgtcctcgaagcccagcaggactaagttggggaccaatagagtagggcgggggcgggctttactgacagggaccaatcgagccggccggggggcggggcgtcacgccgacgtcaagtcgaggccgccgccgcggggcctggttatcgccggttcagcgcagcccggagtcgcccaggcctgaactcctacccaggtccccggcccccgccccgggcccgcgaggacaccggaggccaccccccgggggtggggagcggagccgcgggccagctctgcgagcgccccgcgctggcctgtccggcccc

SEQ ID NO: 41794 - DNA, 2300 bp, Homo sapien
acctctctctcttctgtccaagtcacttccccaccggagggtggcccttggctgacgcctggcaaataaggaacagtttgtggataaagcacccttgtgggcagaccggggagaagggaggttatgctttgagcctttccccacttgggtctatttttctattaagtatacattgcagtggataaaaaaaaacacactagtatgaaataggaattaggaaaccttttttctagccccagcacactgccattcacaagctctctgactttggacaaattgctccctccctgagcctcagtttccccatctgtaaaatagcctccgagtttcagccctgctctaaaagtatcaggaattattcctaggcaaatcaatcttctttggaacaagaatcattacaagaagaaaactcattataatggcaactaatccatattcatctatttgctacatattatctttaaaactcttcttcatgccgtttgaatgcatgcccaatatctcaaaggtttgggctatatattcccacactacactaggggcttctggtgtgggactgtctctcccccatcaaactttgtgagcaggagcaaagcccacaacatttccctggaaaagcaagagtcaaagtggggtcaggacagacaccagaaaaaatcttggagtctctgtgctagaaactgtaagccacctgctgagcctcaaacccaattaattaccactcttttgaccctgccaatccctgttgtgtaagacctctctactctctatttctcccacttgctccccaatgatctagttccccaggtcccacctctcctgaatctctccagcccacccctccctgccggaaccccattcctgcctcaatcttccctgcttctgcactcaccagcccctgggccaaggacagagaacagcaacagcagcaatagggctggcggcagctgaaacccagacttgagtctaggctgggagaggggcagagtatgagagataggggggactagagggagagacttgggtaaacacagagatgagggcaaaggctgagataatgggttgggctgggctggacactggggcttgaacaagggcagggagtgggatggaaggaagggctgtgatggggactgcagcaagggacggggttgagccagggccttaagcaaacactgggaatggggctgggacagggcctgggctgggatttgtgacagggggtggaacgagggccgaggccgggatgggggccaggccaggggcagagactggaagggggtcctggatggggacccaggcaggggctggggccgatgtgggaagcggggcgagggcggggctgggggccaaggcggggattgggataggacgaggggccgggacaagggctgggccatggcccggggcgggggcggggccggacaggccagcgcggggcgctcgcagagctggcccgcggctccgctccccacccccggggggtggcctccggtgtcctcgcgggcccggggcgggggccggggacctgggtaggagttcaggcctgggcgactccgggctgcgctgaaccggcgataaccaggccccgcggcggcggcctcgacttgacgtcggcgtgacgccccgccccccggccggctcgattggtccctgtcagtaaagcccgcccccgccctactctattggtccccaacttagtcctgctgggcttcgaggacacacagactccgcccccgcctcagctacccgagaccctgcctttctcaccccaagcacagagcccgaggtcccctcagatcctcacagcccccaacgaccgccccacagatgtctcaaaggaaccctatcctcacaatcccagactcccccggacgtacgcacagatctccgcagatcctacccaaacactcgctcacagagatcccgcaacacacaccccacttttcagaagtaaaccctctgggctcgccccctcgaggcccaatgcaagcccctcaggagaccttacccaccggggaggtgaccagaccgccgttgccacggagactactaggcgttccggttgccctggtgaccggcgcctactctcctggcccgggttccggaggcttcagtcaagaccctccctcattggccctagaccccttgtccctacccacttccccaggtcatgccagagctcctttgcgaagttctgcagatatccaagtccccttcccagatagcagactttcaggcaaggcatttcaacactcagcacctgcagctgaggcacatccacaaccaagagcctttcc

SEQ ID NO: 41795 - DNA, 2300 bp, Homo sapien
gatcagtgggtcccttgaaggcagagttggggcaggggcatcaaagatgacaggatttggctttagcaaggtcagcgcttcccccaggtgggatgatccatttactgattgattaattcagcaaacattcatctgtgaggtatgcactctatgtgaggccctgtgtctggaggaacaaacatcaaataggacagggttcctgttctcaagctgcttatagtctggaggttgcctgggaagtaatgagtggccctgcactcattacctgtgtagggccgctcattacctgggtgtaatgagtgtgaaagcagaggctggacaagcacgtgggagcggggcagggtgaggactaaaggaaattaaaggttgagattggtggcggggagagtgagggggctggattggaggccttgaaagagctttccactccaccccactttgcctaaaagagccagtgttctaagttcctgagcctgctcagggaatgggctggttggagatcacagtgctgctgggctggcccagaatgctcagggggaggggttagattgggagaaggggcaagccaggcctgattgtcaggagggcctgggtttgaatcccaaaacctcagccagtgctgaggatcccagcagaccttgcagactgaggtgggacagagatgaccagaaatgactgctcaggcaggaaggacctggaatttagagagacctgggttagaggcctgggagtggtggccggggcgggggtttctccccagcccgcccagcaggttctgtttgccttggtttagtcacacccctgctgtctctccctctcctgccacccctgcttttgtcccagggtctccaggatgagtgtcagtacctccttcagccgcagctgattgtccggcgtttgctggacgtcgctgtgctggttcctggccggccctcagagcaaaccctctccccacacaatcgctcagccctgtacaagtaagtcaaagactccccacacctggtcctttccctcttctgtggcctcatacaggctgcagggttctctcttggcttctccacctacctgcctggtccctgggtgggatccctgcctccctccctcccagcacagagcgggagacctgaacaggcctccttcccaccctatgccccctccttcctagtgcttcccttgccctgtgttcctctcgcctctgtttgtgccttcttacccccaacctctcctctgcccagggtctttgtgcccagcttcacttacagggtttcagcacagctggtgtgtgtggggggccgtggggtatctgcctgccccctgtcactgcgtctgcgtcccaaagccccacccctgcacaactcaagctctgtggcctgtggaggtgcctcaggatgccagctggagctggcactgcccccctgggggcactgggtctacgtgcgtgtggaaacatcatcccggggccctggtaggaccatccgcttccagctgtgtgtgcggttgcaaggtcagaacccctgcatttgccccagtctgtgtagacatctgtggttgggaagtgacttgggtggctgtgttcagtggccctctgccatatccctacaacctcccctccccatcccaagctccttcatgctccctgaagccatcacacttggagctccaagttattggaaggcctttagataattttttttttgcatctgacttgagacaactaaaggacctcattactttctttgatttaatctctcagtttcctggggtaggcagggacatccaggacctctgggacactgtccttgccaaagcccttgcaagtcagtgagacagcctctcatacttagtatctgtttcaatagtgtcttcaatgcctttagggagggatagatgacctcagttccctccagtgtggtattgcattagctgtcaccattaggaaacccctataaacctggatgccccacactcccaagggacatcgcattctagttctcatccttccccactctttgcgaaatcctgtctagctcagatgtgtttatgagtaagttcaggactgtaaaggctgcaggcccaagctctggtttcctctgccccacagagtgcccacagcccggcctgctccgagccctggtccctggagctgccatgaacatgccccagtccctgggcaaccagccactgcccccagaaccgccatcccttggaacccctgcggaggggcctgggaccacgtccccacccgagcactgctggccagtgcgcccgactctgcgcaacgagctggacaccttctctgt

SEQ ID NO: 41796 - DNA, 2300 bp, Homo sapien
gtgaagccttcttaaagcaatatcggtggaaaggaggggaccaatttaagagctgttaggagtgaactctttaggacttggtgactgattgggtgtgtggggtggtgaggtatgagagagcctaggatgatggtgatattctgatttggggatggtggtgccattccctgagatggtgacaccactttgggtggggggaagatgagctccactttggacagtttgaggtgcatgtgggattcccggagggaagggggccagcaatatgacagtgctggacgtagccgctgaaccaggcctgtctccaggctcccaaaatgggaatccttggttgtctcctgacttgtctcagtgggggagatcccaagattcaaacagcccttccttgccttgaatacagggctgtggctggcagatattgctgtacccttgcatgtatctgtacatacgactggactgagacccctgagcacttgcagctgcctggggcatgttcagcagcacagggctcaatccccacagggtgatgttctgaaagcttctgagtgacaattcagtcccgcaaaccttccatagggaacatgctgtgggagctacagagatgagccagacccgactgaatcctgccctgaaggagctcacacggtggtgaagtgtcatgaatgcaagttagatgggacaagtgtgaagtggaagatcctgacaaagtgctgtaggatgtaaagagagcgatctcaaagtgcaatgggaaaggatgcatgagagagatggtgtctaacctagctttgaaaactagtcccagctattatcagagaacagcacaatacatacaagggtgcgaagacatgggggtgcggcagtacagataatgtagcgaggggacagccatgtgaagggcatagtggaaaatcaggctgaagaagcaggtgggggcagattctggagggccttgaggattcaactgaagaatttggacttaatggtaatgggagctgtcaaaagtccttgatcagaagagtgatgaatcaatccaggtttgaccaaagtaacagaaccactatgagtgataaaaagattagacctttacagtcatgggagcagttggagaaatctgtgcaaaactgttacttctgcatttggtgttgggcctgaagctgttacagctcagctgggccagcagttaggaaagaaggctgagtgtgaagtgaggggcagtaagggcacactagaatccagaaggacaaactggaacctgtgcctggctcttatgccttcaatctcagtgactggtgacctgcaggagaagctgtcacctttgccatggagcttgcacttggcccagcactcagcacagtggaaggaggtgacctggtggggactggacaggctgtgctaatggggagccagcagatgagcaacatgggggtgccctcactgtgtctggtgctgttccattttttttctttctttcttttttttttttttgagacggagtctcactctgttgcccaggctggagtgcagtggcgccatctcagctcactgcagcctccacctcccaagttcaagcgatcctccctagtagctgggattacaggtgcaccaccacacctggctaattttttgtgtttttagtagaggcagggtttcatcacatttcccgggctggtctcgaactcctggcctcaggtgatcctcccacctcggtctcccaaagtgctgggattacaggtatgagccaccacacctggcccacttttgccttccaaatcacatgcaaacttctctgtggccaaccctaacccacaccctctaacctagtttggttgactcagtataaagctaccacacgtgagctaaccagagctttcttgggacgattaacttggcagcagcccgtgaaggatagatggtcaggataaagaaagccaaacctcccatagctcttgggttgacactgtcagctggtgtggtagtcattaggccattcacaaatctctctgtccctctcgtttgccatccagacacacgatagtgtgcttttcccccttaacaataggtgtggtcctgtgccttcctgttgccattgtgttggccactgaaatgtaggtggaggcaacacagccacttctgagtagaagctttaagagtcagtgtaggctttgttactttcccttttctttttgtcatggtgaccagcagtgttcccaatggtagctgttttgtcatcctgagtcccagaggggtgaagaccatgatgcggagcagaagccccaccagcctctggtggacctgcatca

SEQ ID NO: 41797 - DNA, 2300 bp, Homo sapien
aaaattgtgggtatattagataagttcattatcttgattgtggtcatggtttcatgactgtatacattaaaactaatcaaattatatgatttaaatatagttgtacatcaaccatccttcaataaagctgcaacaaaaaagcatactaaaaagtcacaagacctatttccatgtatagatatacatatgcaaatggccagaaaagtatctggatagatatacacaaaactaataacaatagttacttttggaaaagtgggagagtgggaagggtgggtgaggctgggtatggaagagtgagggaagggtgaggctgggtatgggagagtgggaagggtgggtgaggctgggtatgggagagtggggggagggtgagtctgggtatgggagagtgggaagggtgggtgaggctgggtatggaagagtcaggggagggggaggctgggtatgggagggtgggggaggacaaggatgggtatgggagagtgggaggggtgggtgaggctgggtacggaagagtggggggacggtgaggctgggtatggaagacttgggggtcctctctgcctaggaagggtttgcactcagcagcctgggagcacacctgtcatcagtgctccctcacatctggcaccacctgacatgtagcaggtcctcagttacttctaggttctgggatgagtaagtgagggtggaataaaagacggaaatggtctcctgcaaggaaggcactgagaggaactgtgctccacccaggcccaggatttggcatcgtgtcccatgggattaatgacaccgtgccagataccctggaacactaaggagaggtgactcatgctcttttgctggtgagaggattgtggcagcacctggggcactgatatccatctagaatggtaaaagaacaagcattgtttgaaacctaatagaagcatacacctgctctgagcatggtataggggtcacactgttgggagggctggattctagcttcacctcaccagagacctgttgtgtgacctcagcatccccatctatacaatgggagatccaacaagttggcctctggtcatgttccatgctaataccctaggagttcatgaagtcaaagcagccctcgctctggcccacagaacataggggtttggagctgggccaaaagctccatcagattttagctgggaaacccacaggaaggcagattgtgaaggtccaatccacacagggtagctaatgaaacaggccctgggcaggggacaggggaacatgcccagcgataggcttcaaggtcagcagccctccaacacacagcacggtgtatgctttgttcatggatactagagtaggcctgaagagacaggtcagaccactgcaggccgaggacattccagacagaaggaatagcaaatgcgatggctcagaggcttccttaaagccaggagaatctccacctgctcagagaccacctagcccactagttcctcaaagtgtggtacctacatcagcagcagaagcatcgcccagacgcaccgagtcagaaactgggtttggggcccaacaatctgttttaacaaactttccaggtgattctggtgcatgttaaagtttgagaactgttgatctagcctactgtttcccagactatgctcatagaacacttatctgcagtaggttaatgggttttctgtaaaaggggatccatgatcaaataagtttggggtacagatgttctacattgctttgcaggagtcatagatcacattagcgtagtaaacgctctgagaagtcctgcagtaaagagctttattttttattaatccaatgttgtctcaaattgatttttcagattgcttactaatgttctcattaacattctctcagggaatgctgatctaaatcaatgctcatttttcacatggataaactgaggcctagagaggataaagggattgcccgacgtcacagacagtgagtgtggcagtgctggaaaagatcctgacagtccacctcgtcccagaaagggctctgtgagcttccccgcaccctgtaccctctctccttccatcccagctgtggaccatctcttcagaactctgcagcatggagccgctcaacagaacagaggtgtccgagttctttctgaaaggattttctggctacccagccctggagcatctgctcttccctctgtgctcagccatgtacctggtgaccctcctggggaacacagccatcatggcggtgagcgtgctagatatccacctgcacacgcccgtgtacttcttcctgggcaacctctc

SEQ ID NO: 41798 - DNA, 2300 bp, Homo sapien
gctctggccttccgcgggacagtcctcggggagaggaaggttggagccgctgcgagcctggctccccagggctctgcccctgtacttttttcagcccatgtccagggcagactgagctctgaaactcgaggaagccccatccacaggctgccttgaatccagtttccttggtaattggatcagggtttcttctccaagccttgcgttttcagccatcctgccccagctggtgcctgtgtgtggtgggagggctgggaggcagcgagtggagttctttaaagtggaggctgtggtgctggggtgcagggtgttggatggccttgggagaatgctggggtctcactttcctcttctctgcaatggggtggataacagagatgcccacgtgccgaagcctggaggctcgttggaatatgctctgtgaacagctagtgggatccacagcgaggaaggaagcctggctctgaggccttcagcctgtgcctgtgagctgaggtgggaattgggggaagacaaggactgggggccaggagaggcagtggggaggggctggagagcaggccagagactcagggacctggtgactcactggaatagaatgtcctctttcctttctatttcccagtggattctctgtgagggctgcaggaggagggagtgagagagagagggaggcaaattcacactgatttctcccacctgaggtttctgggttgggaaagttgaccctaggctgccgtgcagtgtcgattttctctgcagtgtccttcaaatccacccccttctccattcccatgccctgcctagcccagccccctccatccccctcctggattcctgccagcctgctccctgcagccctgcccctttcccaggcatctccaggctgatttcacagatgaatcaaagatggggaggaggttccccgaaagcaggaaacggaaaaggaagcctatgcagggcaggagagaacccgctgagcaattgccctttattccagttcaaaaatgcggaaccactcagacaatctgcaggcggcctatggctgcgtgtacacaggaagaataggcgatgagaaatcaaaggaacaaatgttaaagcttgaggcatagtctcctggtgccctctatcaccccagttaaggaggtgatgttggtaactcaacctgaaaccacaggccctgcagatcagcccgtcgtctccttcctcctggtcatcccagttaatacaaacaatccaaggaattggcttcctgtcatggcccacagcctgctccatgtggaggaggagcccagggcccagatggtctcatcatctcagaaaagggacagattgagaatatgacaggctatcgtttgctctgaaaagttgctctcccattctgtgcaaagtgccagtttcctaatgctgatactaaagaaagttcccttgggccttggagaaactgaaaaggacccaggctatgtgaacttgggccagccctctgccctttctggcactttgcacccagatcattaaaaccgcagaatcagatggtcgctctgtggtcccatggtaactggaaagtgcactgagctaggagtggagggagggcggtccctcctcggccattgctcgtgcctgttaacatggctaattcagaatggggggcaggtcatttaacttctatgaccataggatctttttctataaaatggaggctatatcgctatgcagggttgctggggaggttatatgagatcatgtctggtgaggtcccatgcctggagttattgttctcactactctgtttcccagaatatggacaaagtggggctaatagcccagtctcctttctggaagtggtgggggtctcaggaggtgctgggtgtgaaagggctctcacctggcagactaactcagttgcctgggcctagcttattcccctgacctcctggcagggaggagggtggaaaaggcctggggtgcgcatggcgggacgggataactgctgagcgggggttggagggctgcagtgtgggtcctgggccctcgctcacaattggaggaaagaattcaggaagtgctcacagctgctcagacatctcggagccaagttccaaccaggacagaggctgcagcacccagggaggaacgccgtggtccctgggacggccaccaggccaggaggctgcagcaccaggtacagccagggctggcctttggggagcccagggtaaatcttaatagttcaagaatgtgagcaacgggctaagcaggcagcaaagagggtgggtgaggccggcatctaagaaggctct

SEQ ID NO: 41799 - DNA, 2300 bp, Homo sapien
tcaaatgattgccatcaggattagacaacttgaagaacttaccccaactgccaaagcctacatgtgattctacatcccaatgtaactacttatttttttttttcttttaattgagatgggggtctgacaacgttgcctgggctggcctcaaactcctgggctgaagttatcctcccaccttggcctcccaaagtgctggaattacaggcatgagcaactgcgcccagccgcaactgttaataatgatagcatcatgactctttggcccagtgactgtgtcaatagtggtactattactctcagaggggaattgttaaaataaattaaaatgaagaccaggtctgcagaattcctgagcagatagtcaatttagtcctcataagtgaccttaaacttacttgagttaatctgagctatttcttgtaaatgcatatattaaagaaaaacagaacaagctcaaccaatcagaagtagtccacaaacttgtataactagaggctttttagtgggatagaccaaataaggcaactttataactgtaaccaatcaaatattttctttttattactttcccattcactctgtaaaaatctgcttcttcgacagagctgagccccagaaccacttctggtttgcagcttctcaattcatgaatcaccgcgtgctgaagtaaactttaaaattttattgtgcctcagtttaccttgtacacagaagcaacagagtcatcagaggagatgttttagatattttaacttattcatgttttccttttgtaaactcgaaagagaggataaatgtaagagcccaaaaacataaaaaccaactttaatatatggattttgtttagaacttgaaaaattgtaaaaagaaatcatgagacaataagaaaaatgtaaataatgactggatatttaataatattaaggaattttaaaaatgttttaagtaatttagccccaggtgtcttcatgagaatttaaaacggtggtcatgctttttcaaaaaaggaggaaaaagggtttaattcaggaacacacagagaaaaaaagagacaatgaattagctttgctagccagtggcttaaacattctccacgtagctgctgggctgatgggtggggtgggacccacttccaacttgtctcttggacaaagtctatacttctcagccggatattcaaggctttccacatctaggtatacaagcgttctcctatcctcttttcctatcaggaataggtgcttaatagtaacatcaaggccaggcacagtggctcacgcctgcaatccccgtactttgggaggaggaggctgggggattgcttgaggcgaggagttcgagaccagcttgagaaatatggtgaaaccccttctctgcaaaaaaaatataaaaattagccaggcgtggtcacctgcgcccgtggtcccagctattcaggaggctgaggtgggaggatcgcttgagcccgggaggcggaggttgcagtgagccgagatcgcgccactgcaccccagcttgggcgacagagcgactcttgcctaaataaataaataaataatttttaaagtacaacaaagacacattgaggctatagtgccaaagagctctagtgatgaacccttgtcagggggccgtgtctgcgggaggccgaaggatcccgggtgacatgctttctttgggtgcgaggcagcgtctcggcagaaagaatattgcgagtattactgagggtacatgaaggagagaagcccctttggttcggccttggactaagcccttgttctcaggtgaacttgcagtgtgatcttgagtaaggtcagtctcctctctcacctcagtggcccgaaacctcaggaggtggcagaggttttctaatgactctcccagctctgacatcctctgacttcactctgggagaacgtgggctggtggactcctggcagaagccgacacacagttgggccataacaaagagccctggtacggggcacgttcccgcccccgggaggttttggaaacactgtgaggcagggggcggggcttgagcgggccgcagccagtcaccaaagggccgggcgctgggggcggggcctcgcgcgagcggcggcggtagcggcggcagcggctgcggccaagctgggtccgagcatcccgcggctctggagccgcccggcccggacatggcgaccgtccgggcctctctgcgaggtgcgctgctccttctgctggccgtggcgggggtcgcggaggtggcagggggcctggctccgggcagtgcgggtgagtaacctccagagcaa

SEQ ID NO: 41800 - DNA, 2300 bp, Homo sapien
ttaaggcaaaccatgagcaatcatgtgaaggtctcacgttaaaatagaattgtaaattaagtcaggaaaaaccttctctccgatctctgacagggttttttttttttttttttttttgagatggagtctcgctgtgtcgcccaggctggagtgcagtggcgcaatcttggctcactgcaagctctgcctcccaggttcacgccattctcctgcctcagcctccggagtagctgggactacaggcgcatgccaccacgcccagctaatttttttttttttttgtattctgacagggtttttaaaggcagcaatgctctgaatagctcatctgcaagatggctttcctttgtcctttttattgccaactagttgagggccccctagactttgatcccaggtagagacccctattaacaaggctataggtagggaaagtaaagactgtttctcctgatttggcatataaaatctagaatttagatgtttgaagtctggtgtggggatttcttgaatgttaaaggctaataccaagcataagaaagagtgggctgggcacagtggctcacgcctgtaatcccagcactttgagaggctgaggtgggcggatcacctgaggtcgggagttcgagaccagcctgaccaacatggagaaaccccatctctactaaaaatacaaaattagaatggcatggtggcgcatgcctgtcgttcctagctacttgggaggctgaggcaggagaattgcttgatcccaggaggcggagtttgtggtgagccgagatcacgccattgcactccagcctgggcaacaaaagcaaagctccttctcagaaaaaacaaaaagaaagagtgaaggttgtaggttccttccactctcatgtctaagacagtaacttagaaaattactgtaattttgagacttacaaattgttatgaacttctttctctgagtcacatttggagtgggacactgggtcccaagaaatgtggcacagttttgggtcagtaaaatttccttagtctgctagatcaacagtcattgacttaatttatcccaggacaccaggggccacacactataggaaacaggggtcttgctagttgtaaagctcaacttctaaaaacatttagacattaacaaaaaaattttaaaaagtcttccttgtaaatcctttgcttattctttatccccatatccctctatggtttctctaagcagaatgaatagtccttgcttgagcagggcaaaggataataataaaggatgatgataataaagcagtgaaggctggggtagtgttcgtcctacctctacttccttaccagtgtgccattcacttcttatttctgatcccctttttatttccaatgggctggaggtacaaggttggtaaatccttactctcctctcctccacttctcctccacccggcccccacccctctccacatgtaatactaattctggggaaagaagaatcaagttgccactgcagcagtgtgaaatgggggcaagggcagctacctagtaactttttacccacaaccaaaggtattttagatctaggaaaaagcagataccaagatataccagcagactgtgctgttgctattggcaataatagcttcacgagaggaaagcatcccatctcactagccttttcacttatttatgttggtgtaagaataataagagcagcaaagcataggaaagtcaagaaagtaatattctgggatattattgtttgtgggagtctagatgaagaagtaagctaaggtaggctgaggaagaaggtgctgagaaacaaactgagaacatgcatggacattttagatcatagcagtaggggtaaatggggtattctaccaggtagaaaagttcaatttaattaaacccattccaatcactggctctgttctttttgactcatgaaattccagaatattagtgctaagggccctaagacaccatttagtataataccttcaattcatagaggaagaaactgagatccagggaggaaaagcatcttgcccttagattctgtattgattttattgtgtacatttgcagttaagactggagaagctgccttgaagggaaaaatgtgtgcaaagaaatgatggcccctgaggacagactctgggcgatcacagtcacctgtgaaggtacgacggtcatcttctgaactgtgctcactgaggcaaaggcgggtagagcacaccaaattgccagcaaaacaagaacagacattgcagtcaatactaaaggatgttccatgacctgacagaaacagaaag

SEQ ID NO: 41801 - DNA, 2300 bp, Homo sapien
cagctacttgggaggctgaggcaggagaattgcttgaacccaggaggtggaggttgcagtgatccgagatcgcaccactgcaccccagcctatgagacagagcgagactgtctcaaaacacacacacacacacacacacacacacacacaaagacaatacattgggtcaatcactcttctttgtgtctgacctttgtggccatttgtctcttgtgtctgatgcctggacagcgactccctctccaactagcccacggcccttggtcggggttgactttggcactgccctaacaccctccattcagcaccctgttccttcatgtgcctgctgctaaggttatgaatttctaagttaggaaatgcatccactctcagcccctctcacctccagtcctcagacctcaaggtgtcagtgaaacatggtggtcccagatgggcttccctctgcgtgcagtgagcagcccgctgagcctcactgtctccacccacggccttaaagtttttgttatgtgaaatacagccttctagagattctaggggcaacatggaattcttcctactgtgtttatttgattatttcaataggcatttgttgacaaaatgggagagggaattgaatagagggggttagatccccacctagcaccaggagtcccttttgtttgtttatagagatgggagggggggtctcactatattgcctcaggctggtcttgaactcctgggctcaagaatcctcccacctccgcctcctgaagtgctgggattacaggcgtgagccaccgcacccagccccaggagtcccttttgaatcagggttgggcaccaatttgacccatactgaatactttaggtgactgtaacacaatggtaaaaatttgcatatataaacagatgtaaacatagaaacatagtaaaaatatggtatcataatctcttgggactaccacagtatatgtggtctggcattgactgaaatgtcattactcatgacggtactaaaatacagtaggtgtatttgcctgacatggggaaaggaatagagagcacagtgcccagccatcgccctgcgggacattcgtaagccgttggtattacaaattctagccttatcatcagtgggtcagctcacttcagtgcccattcattgaaaagccttaaaattcgcttccttcatttggggtgtactgagccccttccccagaaaggagcgcttgcgggaagtctggcacaggtgactagggctgtgcggtcaagtaagtgcacttctcccacggggcaggggccatgggtgggaccacatctccccagtacctggtgtgtgctgctcccagggtcagggcacctggcagttggaaagaccggccgaccccgagggatgggcagcactggaatggtggctccagggccagcactcccggaggagggaccgcctgaggaaaggcagggaggtgggaaatcccagaacatgtttggggaatgacaagacatctagtttgactggagtatggggaaaaggtggggcgttggggagacaggtctggggccagactgcaggggtgggaattggcttggtctgggaggcaatgaggggcgagtggacgggtcagaggcggcggcgcttccaccccgactggcattagagggcgtgtcctaggagaggagcatccccctccccggaccagccgccctccggagcccagagtcaccggagatgggggcacaccccggggctgcgtgtgtcgtgtcaggccgcggcagggagaggccgtcccctggtggcgccggccggaacgcccctcgtgccgcgaccgcgcgcccctctgtcctcgccgcgcgtcggcgcagagcagccacccggggcccagcaggcgcgggcttccccacgcgccccgggaagggacagctcggtgtggggtccgggaggcttgagccccgcggccgcatccggggagccctcggcagtcgcggagctgcttcccaggggtgagctctccgggaggcccacggggtggccccgggcgcctccgccctcagctgtcgctccttataaggcgggggccgggcggcgccggaggaggggccgcggcatcagcccggtcctgggctctggggcggcgctgggccgggcgagcgcagtgcagcgcagccgcggggagcgaggagcgcgcggagccggccatgggcaagtcaggtgagcccgcgggctcgcccgctgcggaatggttcggaaccccgcgctcccggacctcgccgtctccctcgtccgccgcaagccaggtcctggggagtgcgggagc

SEQ ID NO: 41802 - DNA, 2300 bp, Homo sapien
ttcagagatctgaagtcagctgccacccctgtctattttcttctactgctttcctcagctgtccttgagcctgatccccctcccaggcctcctcagtcacccgctgcctctttccatcattccctttgtcgcctgtgaccctgaggaggggtgggggcttaggacagggctttgcataggatctggactagttgtgggaatttgggcaggtaacttcccttctcaagcctcagtttcctaattcgaaaagaaaaaacatgggtaaggtcatggcagctcccacagaagatggcgagaaataagatcatgcgtaggcccagcacatggccagagcaggagaaagcaggcccgggatgggtgagcctgcgtcttcctcattcctcagggttggcactctgaggccgtgtggactttccagcctcagtttaccctcctacaaaataaggacgtcatccctgcccttcccccatcgtagggtggctgggagggctctccctgcctaactgggagatggacgacttttctttgactttttcttcctcctctttatctgtattcttgggtttttctcggtgggggtagggtgtgcttcttgctaggtgtggcagctactgataactttgcctccctggggcaggccctctcagaggagccacctgggctaggactggctgcctggtgggaggggactcctggggctgcccaaggtgtggttgtggggcccttatgcctcccagccaggagtggggagagaggactcccccaccaccgattaccagaaagacctcctggccccttccagagaaccctggctcaggagcctggcgttggcggacacagtgcctagctgcagcttctgggcattgagctttgcttggacacaggaactttcacttttgtttctttttacttcccatattctgggagtgcagtgacctagtttttagcggccttatatgtccctctctgccgaggagacttgagggcctccagcactatgggatccagtgcaaactgactccagcactcaggctgcctttaaactggcttccccttagcaagccacctactcctctgtctccccctcctcttcagagccccaggatacacgtggtcccttcatcctggctctttctgtgctgttgcctcctccattcatgcttcctgagccaggaacacctcctccagggagtcctcctttcctgacgcatttgtggtcaccactgcacgtgccactcagcctcatgcatctcccgtggtgtcccacgagacccaccgtggcctgtctgggacatgggagctagaagggactttaggatgggcctggacaaccctgccactcagatggggacccccgtcacctttgcggtgtcacctatacgggccctttcccgcacactcacactcgttctgatcagcgtctcctgagagaagcttgtttgggaaactcctgcacgtcttgggtcagttgttcatcttgtctcctctcactcctaccccagcaggaccttatgggatctcaggattggaagggacttgaaggtcctctgactctcaggcctgagtccctccaagagggactcacctgcctgaattccttcagtggtagagagctcactaccttgtgaggtagctccttttggtcgccagaaagctttgactaggaaagatctttcttaggctgagctgaaatctgtcatcctgcctttctacccactggccccagctttcccctctggggccccagaattcatcagaggcctccaccgtgtcttccagaggctgatcctctccaggctgaacatcccccatccttgtaccaattcctcatcagacccctcttccagcctcaacacacctcaaatcaccactgcctcttgcacaaaacagggaccaggctggggaagcagcccgtggcccaagaacccatgggttcctggaggccatgctacccagctgacccttcttaaactggtcaacgagacccccatctgggtcccatgagttgctatggcccctggcatttccctgtgagatattctttaaaagcctctctgactccttatcccaaataccacattaccatgctaaccctgaaatctttttgtttatcatggtaaaaatgcatagcataaaatgtattatcttaaccatttttaagtgtacagttctgtagtgttaagtatatttacattgctatgcaacagagctccacaactttttcatgttgcaaaactgaaactctatacatgttaaacaacacctctgccttttctcctctccactgtagacctgaaatc

SEQ ID NO: 41803 - DNA, 2300 bp, Homo sapien
tctgggcacgctgcaacctccgcctcccgggttcgagcgattctgctgcctcagtctccccagtagctgggattacaggcattacaggcatgcaccaccactcccaactaatttttgtatttttagtagagacagggttttgccatgttggccaggctggtctcgaaaccatgacctcaggtgatccgcccaccttggcatcccaaagtgctaggattacaagcatgaggcaccgcgcccggcctggagttttattattactcaaatcagtctcccggagcattgggggagcagagtttttaaagataacttggtgggtagggggaagccagtgagccaggagtgctgctgattggtcagagatgaaatcatgggagttggagctgtcttcttgggctgagtcagttcttgggtctgggggccacaagatcagatgagccagtttattgatctgagtggtgccagctgatccatcaagtgcaggttctgcaaaatatctcaagcaccggccgggcacgggggctcacgcctgtaatcccagcactttggaaggctgaggcaggtggatcacctgaggtcgggagtttgagaccagcctgaccaacatagagaaaccccatctctactaaaaatacagaattagccgggtgtggtggtgcatgcctgtaatcccagctactcaggaggctgaggcaggagaaacgcttgaacccgggagttggaggttgtggtgagccgagaacgcaccattgcactccggcctgggcaagaagagcgaaactgtctaaaaaaaaaaaaaaagagaaatctcaagcactggtcttaggagcagtttagggagggttagaatcttgtagcctccagctacatgactcctaaaccataatttctaatcttgtggctaatgttagtcctacaaaggcaatctagtccccaggcaagaaggaggtctgctttgggaaagggctgtctttgtttaaaccgtaaactatacatataggtttctcccaaagttagttcagcctttgccaaggaatgagcaaggacagcttggaggttagaagcaagatggagtcagttaagttgatctctttcactgtctcagtcataattttgcaaaggctgtttcaagctgagatcgcaccactgcactccaacctgggtgacagagcgagactctgtctcaaaaaaataaaaataaaaataaaaataaactcataataatctttgaagtgggtactactatcaaatattagttccatctcacagaggaggaaactgaggtttagaaagtctgatcaactcgcccaagtccacctttgatggagaaagctgacccactgaagcccccaacattttccaactggacacttggaaatgttgggggaacattctagtttgccaaggagctgaaatcatccggtctttaaagaccctcccatgcccccgtttgtggttaactccttcatccctgctccagggagtggcctccacctctccattttgaaggagaatgatgtctgtggccaccaaggtcagaagccaaaggacagagcttttctctgatgcccaggagccttggcaggaagagtgcttggagagttgagagtcagagactggggaaagctgggtagtcaggagcttccagaagggtaggaagaatgcgaggttccccaggttctgggccctgctcggcttccaactggctatgtgattttgggcaagtgccttctcttctctgggcctcagtttccctcaaaatgggaggattcttctaggtctaataatctcttccctttccccacctccccttatctctcctacacaaactgctccccactgccccacccagactggctctgatattccagaagcctttaactacggtttgaaagtcccaggtggaagttgccgcccatccctgaggttcctcctgagctctgggcccagggctttaggtcctgctagggtatgtggccttggcaggttggagagatcagaggggaggaaggcccagtgcctctgagacaggcctcagggaggcctgcattgtgatgacctgatccactctatgacatcatcctctcttccaccctctcttctccctggtcaaccgctctgcaaacaaccatcaatctgatcccacaggcctgagaaagtctgctctccagtacctgctgctgatctgtttcagccgacaagaggcaccatgaaattggaattcacggagaaaaactacaatagcttcgtgctgcagaacctgaacagacagaggaaacgcaaagagtactgggacatgg

SEQ ID NO: 41804 - DNA, 2300 bp, Homo sapien
ctactgggacccgctttcccatcaacgctccccactcagctccatacctctgccctgcccagaccttcatcatgtcactcctgacatctctgcccacagcctctgccccatccatcctgcaaccagggacccgattaacctcctaagcagcagttgatcaaaacattcctttatctgaaaccttctatggttccttattgccattaagattccttaacatggaatgctttcagggctccagaatctgtccccagattttccttcaattattcatcttgctgagctcttcagactccaactaatttactcactgtccccaaaacatgccaaacattttcccacctctgaacttttacatgacactaacattagaccctcattattgactcttctaaacgttccccatatttcaaaactgagctccaagccacctctgtgaaatcatccgtaaacacatcagctattcctccaattttgagtgtatacttgtttgttgcttttgcataatatgtaatgcctcctctagcaagggaatcacaggagagtttctcccaaagtcatgcatttccccaaaaagaatgctgtctgttccggagctactactgttgtgagcaactaaaagttgtcttccttgggctctctcatagtagtccctgcccctcttttcctcatgagactatgtcaaggctaatgtgaaaatacttcatgcactgttgccaatgtatgttagggatgagcataaaacaacagacaaggggaaacagaatcaattgcagaccctaacattttaactttcttaaatgtttttcttcaacactttcctatggttcatactttaaatgactttaaaattatgctttaagtaaatatatgctttaaataatttttatttgcttcatttttccttcatagctatccctttttttttgtcatcaaagatatgtgcgttttttataaaaacactttcttgtcccctgctgactacctctggaagcttcttgttgacctctggttttttggtttctttttttggcttttcatttcttagggtggtggtggtggtagtgaaggagaggggtcttctggtggcccctgcataagcactccccctcaacatgagcatgattaactggaaccactgttatttctgtggtgtagacaaaatgagccatgtagctattaacatctccctgatttaaaaagaaacacggaactttctttttcctgctgtccttagggaggaaaggtgtaaatataagagactgtagctagtatcttggaagtccccaggagacaggcgtttcctcttggtcactgactctctgggtcactgacgctccttgaacagcagggccaccgtgtctccctttgaagcaagtgatccttaaggaattttccaggtttagtaacttctgtctagctccgaaaagacgtaatggctgcaaaagtgcttcgttgaagaagataagatatattcatttttaaataaaaatacttatgggcgagaaaaatcggagtggactgaatcaattacagtaaatctatgggctctaagggagcaaataatccaggctggctgaaagaattaaatattttaaatttataaagccagggaccctcaaatccataaaaggattcaatcttcttcttctttttttttaggattcaatcttctaataatcccgggagggggcgcaagagcaggattcttgtttctattttacgaatgaggaaactgaggttcagaaagcctaagtggcatgcctcttcagtaatcggccaatcgtcgctgccctaacttcacctcacctcccagtgcagcactagagtcccctcaggggtggccgtccctggtcagtccagctccagcagacggggtgggtaggacgctccctatcaggcagcacttccgcctcccggggcccgcgcagctcacctccctcacctcccgccctaccccagtcacgagttgttttagggggaccgcccctccacttgctgattgggtagctcctgaaccattgttgtcctctgattggttgttcccttttcggctctgcaacaccgcctagaccgaccggatacacgggtagggcttccgctttacccgtctccctcctggcgcttgtcctcctctcccagtcggcaccacagcggtggctgccgggcgtggtgtcggtgggtcggttggtttttgtctcaccgttggtgtccgtgccgttcagttgcccgccatggctgagctggatccgttcggcgcccctgccggcgcccctggcggtcccgcgctggggaacgga

SEQ ID NO: 41805 - DNA, 2300 bp, Homo sapien
tagtagagatggggttttgccatgttagccaggcaggtcttgaactcctggcctcaggtgatccgcccgcctcgtcctcccaaagtgctgggattacaggcgtgagccactgcgcccggccgaaactcaattcttgaaagcagctttttgcattctctcaactcaagactgtccattgtaagtactgatgaaaagtgattgcctccttacaaaaggaaatttacttgccccaggctggatttaaattttaatttttttaaagatagggtcttgctcagtctttcaggctggagtgcggtggcatgatcataactcactacagcctcaaactcctgggctaaagtgatcttcctgcctcagcctcccaaatagctaggaccgcaggtgtgcacaaccacactcagctaattaaaaaaaatttgtttgtagagacaggagtcttgctatgttgcccaggctggtcttgaactcctgacttcaaggagtccttcttgcctcagcctcccaaagtgctgggattacaggcatgagccaccatgtccagccagatttcttgtttttatttatttatttatttatttattttgagacaaagtctcactcttttgcccaggctggagtgcagtggtgcgatctcagctcactgcaacctctgcctcctgggttcaagcgattcttgtgcctcagcctcccaagcagctgggattacaggcacgcgctaccatgcctggctaatttttctttttctttttttgaaatggagtctcgatcagtctcccaggctggaatgcaatggtgtaatctcggctcactgcaacctccgcctcccaggttcaagcaactctcctgccacagcctcctcagtgctgggattgcaggtgcacgccaccacaccctgctaagttttgtatttttagtagagatggggtttcaccatgttggccaggctggtctccaactcgtgacctcaggtgatccgcccacctcagcctcccaaagtgctgggattacaggcatgagccactgtgcccagccaaagttgaatgtttttgctaaattttagggctcttataactctttgtatatttgaaaagctgatggccagcaatttccaaaattttgcacttttagatttgatatttccaatatctttaaatgttctcattctaccatttgagtcataattaaaagcattttaaaaagtaagatttgtggctgggcgcggtggctcatgcctgtaatcctagcacgttgggaggccgaggtgggtggatcatgtgaggtcaggagtttgagactggcctggacaacatggtgaaaccccgtctctgctaaaaatacaaaaaaatttggtgggtgtggtggcgggcacctgtaatcccagctactcaggaggctgaggcacaagaatctcttgaactggggaggtggaagttgcagtgagccaaggtcatgtcactgcactctagcctgggcaacagagggagactgtattttaaaaaaaaaaaaaagtaagctttgccccaacagtttatagaatatgttaccaattttgtaatatacgttgtgtatgtgtgtatgtatacacatacatacatcatatatatacacatcatatatatatatatttagatagagacttattctgttgcccaggttggagtgcagtggcaccatcttggctcaccgcaagctccgcctcatgtgttcaagtgattctcctgcctcagcctcccaagtagctgggactataggtgtgtgccacaacacctggctaattttttttgtatgtttagtagagatggggtttcaccatgttggccaggctgttcttgaattcctgacctctcgtgatccacccagctcggcctcccaaagtgttgggattacaggcgtgagccatatatttatttatattatcatagtttatccatggaaggacagataggaaaccagtaactgcttccagggaaaagaactagctagctggggaacacagatgaaaagacttattgctacttaacctcttgtgacttttcaattttaaaccatgtgaatatactacctgatcaaaaatttagttaattaaaattattttttaaaacctccccttaaaaaggcattttaccttaattttatttttaagatttaacttctttccttgaaaaagctttgactttttaaggttttttaggtttctaggtaacattgttgtatttttcaccatttatttatatggccagcttgctctcagtttaggtagaataacctttgagtaacctggtaaataagcattttag

SEQ ID NO: 41806 - DNA, 2300 bp, Homo sapien
agtctgtcttcagattcatatatctcactgcacatttaatagcttcatgtggctcacaggcatctcaatcataacatgccctaaattaaaactttacttttttcttcccaaaccaggtcactctcccagcctttctcatcttagcacacaaccaaccacccaattcctaatggcagaaacctggaagtcatttctttctttctttctttttttttttttttttaagagatgaggtctcgatccagcacccaggctggagtgcagtggtttgatcgagctcactgttgcctggaactcctgagcacaagcgatcctcccacctctgccttccaaagtgctgggactgcaggtgtgagccaccacacctggcccggaggtcattcttgagtctttttccctgtcatccccttatatctaacctataattaagtctcatcaattttacttccaaaataaacatcatatccatccacttcagttgagtttcactgctaccaatccattctccacagagcagccagtgtgatttaaaaaagaaatctgggcctggtgtggtggctcatgtctgtaatcctagcactttgggaggccaaagtgggcggatcacctaaggtcgggagtttgagaccagtctggccaacatggtgaaacccccgtctctactaaaaatacaaaaattagccgggcatggtggtgtgtgcctgtaatcccagctactcgggaggctaaggcaggagaattgcttgaacctgggaggtggaggtttcagtgagctgagatcgtaccactgtactccagcctgggcgatagagtgggaccctgtctcaaaaacaaacaaacaaacaaaaaagaaatctgatagcacttccttgcaaaaatcccttaatgtcttttcttttgtggctaatgtgaccttttcgtggctccaagctagccacaggagaactaagagttcataagtattttacaaattagagcttcattattaattgaaatgcatcacaaactgcagtttgatgagatttgaaatttgctgtacagcaagaaatctcaatgaactgttagacttagtttcacctgtggtaaatttttaatggttgtaaaaaaaaaaagatgttaatattttgtatcatcaacttcattcaaagtttcttgtcaatggtgactcaggaatctgttgcccaggttggtctcgaactcctggcctcaagctagccttctcacttggcttcctaaaatgctgggagtgactcagaaatttgaaagggtcattaaaaagtcttaaagcctgattcggtggcatggtcctgtagtcccagctactcagaaggctgaagccagaaaagatggcttgaggccaggagctcgagtgctgcctggacaacatagtgagacccttgtctcaaaaacaacagcaacccaaagtcttatttatcttcaggagctgcgcaagccctttaccaccgccacgtttctccctggatgtccctaggcctcgggactggctgggagttccctgtagtggaggccgccgctgaactgattataaagatgagagaggctctgccatgccttggtcatcaattcacactccaccagtgtcttctagcagtcacggcaagggttaacgtcagggaccgctgtggggtggccgcgctacacgacagtatagttgcggtcctggtttatgaaataactgagggaacaagaggcgcaagaaatccctccttgggtgcaagaccaaaacaactacccagcgggaagactcgggcttcagtgcgtgtgtcgccagtggaggaggacgcttcggggcgggagcacaagctggcaggacagccccgcagcagctccagcgcggcagaggccatggaagatggtccgctggtcagcaccctgcctgcgcctcaaaataccgccgggaaggtgggggacggggacgggagcagccaatcacgcgagctctctcgggtggcgtcagggcgcgatcgcggattcggcactccgggtgggcgtggctgggcgagcgaggagtggggacaaggtcgagcgacgagtcgtctacccgcgcgcccgagcgcggaaaccgaggggcaggctcgcgctctgcctgcttcgtggcgcttggttcgtccctcgcccgaggagcgcggtggcggcgtgggagggagcctctgacggcgtctggtgagagccgcgcggcggcgtgggactccgggagagcatcctgcccacccccagggccgcctcccccggcctcctgccccaggcctcccctccccggccgctttccaccccaccgc

SEQ ID NO: 41807 - DNA, 2300 bp, Homo sapien
tctcaactgcccaaagccttttccagactcttcttctacttgcaaaccctctattcaaaccaaagaaacaattaatataaccttaaatttacaaaaccatgtggtttgttaaacaatcacatacaacctttttttttttttttttttttttgagacagagtctcgctctgtcgcccaggctggagtacagtggcacaatctcggctcactgcaacctccgcctcctgggttcaagcaattctcctgcctcagcctcctgagtagctgggattataggcacccgccaccatgcccagctaatttttgtatttttagtagagacggggtttcaccatgttggtcaggctggtctcaaacccctgacctcgtgatccacctgcctcggcctcccaaagtgctgggattacaggtgtgagccaccgcgcctggccatgcacaaccttgaaacatctcttgtatcacatttttaaccttgtctatcatttttttgagtgttcttatgtcttgtgttttcaatgaagttgcacttctagaatagatatcagaaatttttctcctctaccaccaccccatattagacgttagtttttttttttttttttttttagacggagtctcgctctgtcaccaggctggagtgcagtggtgcgatcttggctcactacaacctctgcctcccgggttcaagcgattctcctgcctcggcctcccgagtagctgggactacaggcgcctgccaccacgcccggctaatttttgtatttttagtagagacggggtatcgccatattaggcaggctggtctcgaactcctgaccttgtgattcgccctccttggcctcccaaagtgctgggattacaggtgcgagcaccacacccggccctgatttttttatatatatacagatgggggtctcattatgttggcaagggtggtcttgaactcctggcttcaaacaatcctccagccttggtctctgaaagtgctggggttacaggcttgagccaccatgcctggcgtaggtgttagctattttgtattaaagggctagaaaaaacggctcagaaaaaatctttgacttctcaataccttcacaatagtgtgtagacacttagcagagagtccaagctccccctcaatatcttccaccttcttgtgccaggccaaatgcttacccccaaacatttctttttgcatctctgtatctacgctcccaacttggaatgctcttttactttactttcagggcttcattcaaatgctgcctcttccatgaagtcttccttgatccctctaattagaagttaccaagtgacttgccttgtcctgtaaagatctgcagtgagatgacgcaggacacaggcatggagcccgaattcgcttattagttttgtgatctttggcaagttattgtaggagaccagcatatgccagcacaaaatatgcctccttagcgtaaggactattttgagctgatgattttgagaagctacagatacaggagaagctctgaaaacagtagaaattacccttttgtaagggaaatttaatccataaaggaagtctccatttgtttttgtttttttgttttgttttttttttgagacagagtctttctctgtcaccaggctggagtgcagtggcgtgatctcagctcatggcaatctccgcctcccgggttcaagcaatctcctgcctcggcctcccaagtagctgggactataggtgcgtgacaccacacccagctaatttatgtgtttttagcagaaatggggttttaccatgttgaccaggctggtctcgaactagtgacctcaggtgatccacccgccttggcctcccaaattgctgggattacaggcatgagccaccacgcttgatcggaagtctccatttgtaagggttgtcttcctttctgtaccaggaaaagcaggatgattctaaatcactaggaactcatcagtagagatggctctggcttaaatctgtgcagcaaacctcagtcttgtttactctgcttttcctggcggctccctcattatcagccttctccacagccttctttctctgtccagcaaatgatagtattgaaccctgaattcaaagccacctctttgaggtttacttctttctctgtttatctcctatggatacataggaggtatacatgttgttaaacttctggagttttgttttgtttcgagacaggatcttgctctgttgcccaggctggagtgtagtgtcacaatctcagctcactgcagcctcaacctcctgggctcaggtgatcctgttacct

SEQ ID NO: 41808 - DNA, 2300 bp, Homo sapien
tggataaacttaaaggtatggttggcactttaccttgaagtgaaacaaacaaacaaaaaaaacaagtttagatgtgatcatctccaaactggctgctttgggagagagccagccagctggttaactgggttacataattcgagtatgggtttggggtggatatgttcatagggacctaatacctctttccagcttctctttgtttgtcctggaattccaaaacctatgatgttattgctggaactttgattcagcagttgctaaacaccttctcttgtgtttctggcactagacttgggccttgggtttagtttacacagtcccaacagagtctgggtgctcagtctgatatgggagacaagtgtacataaataattaccatatagtgttgttcataaagagaatgtccaaggtccagaaggtcctgaaacaacatttactctgatttcccccattttctactggttgcagctgaggcccagagagggaaagagagactggtttaagtaatgccaaaagaactagaacttgaaaacccgagttttctgttgactggtccttaataattttactctaccaccctaaaatatgatcaccatccttgcgggaaacatctaatttctgctttaaaaagtccaccccttccatgatgtcctcttgactgccctctctccttaagtctgataccactttactattttttccttgtatggattgtgcttttgtggaaatttttattttctctcttgtatcgtgattatcaggacaggagccaagccggcttcaatctttgttcttatttcccctccccaagcgacatctgagcaactgtcacacttaaggaagcctcggacaagttgggttcgaacctgttggcttgctgcattgagagacacctttgtgtactgcaataaaaattcttacttttcgggccacgtgaatgcatttatgctgtaagaactacgtgaggtcagttactgtttgattgcggagttttgtaggtaggaggcacggaacagtagcaacaatttactaagagaaaatctataggaattggaacagggccctgcggtccgcagggcagcggggggcgggctggggcggggctgcgcagtggtgctgcgcgcggagctctgttgccggaactggtccgagtcgtgcgccgggccgcgcgcagccccgccccgccccgccccgcccccttccccctcggggtggaaacaaagggggttcggcgcgcggtgcggagcctgggggaaaagggaggagcgctccggtggtctggcgcgctgggctcgctaggtttgtgctggcgaggggacggggtgggacgggcgacccggacccaagaagtgggaggaccgcgcgtgtcgcggcctagcggcgaggggagtcgcctgcgcgcgcagcggaggccagtgcgccggcgcatagggagcccgggtctgtgatcgccgaggcggggtgaggcggggtgcggcggggcgcggcggggcggggaggggcgtggccgggccgggcccctagtgcggtgttgcgggacggggccgaggcccggtcggttggggcgtgggggcggagaggatggagcctccgaggcgttaggcgactctgtcatctctgggcgtgcagccgtcgtttcctggcgcggcccgtgtgatggtgccgggaggaaggaagcgcagtgacagtgcctaagttggagccggggttccgggggtgaggaggcccgcggacggcggatctggcgagctggccgcgggctgggcgagcagtcacaataggaggcggcggcccagcgaggatccgcgggagctgcccggcagggcggagcctcccctcgcaggtactggccgccgcggccgttggctgcagcgcgagggcgggacgggctgcgggccgttgagagcctgcggggccgcgcccgagtcttgggctaaggtttgcctcggccgcccggcgctctttgttcccgcggtggcgaggaggcgcggtctcagctcgcggagccgccggcccgctgcccggcagatggcctcgctctctcgctccctccctttttgccgagacgcaggtgaaatgatgtcacccaggagaacgcggaacccggtcgaaagggtcctctctggcgtccttctgcttccgtgggtttctggataggctgcgttttgttctcaggggatgcaagttcttcctttcagggttgaagcgtgagagaggttggtttttgaaacgggagtgtttcaggttattgaggtccaaaaagaaataaagtttttgtttacgtctgtatggcttgt

SEQ ID NO: 41809 - DNA, 2300 bp, Homo sapien
gttagagaccagcctgggcaacatagtgagacctgcctctacagaaaattaaaaatttagcctggattgcctgagcccaggagtttgagactgcagtgagatgtgatccagccattgcactccagcctgggcgacagagcaccgtgtctcaaaatacaaaaaaaataaaaaaagaagaagaaatttaaaactatccaacctggggttgtgacagcattgttgaagatcgtaaccatttgagaggtttcaggaagcttgcctcacaaaaggttggctgaagctcagagggatttgctgaagcttagaggtgaggaatgctggaggactgtaatagatttttgctgctgagttcagcacttgaggaatctgcctctcttacagttagatagctcccaaatgtaacttccctttcctttcctgatgttcttctcccctttcccctctcttcacatagtcctatccaagcttggaggaaaagctacttcagggtggtctgcgttctgtagggaggatttttttttttttttttaagcttagattctggtggaagatctgtaattggaaggcgaatccacagtagattgcgatttgtgagggatacagaggatagaaaataggatacattggataaacttaaaggtatggttggcactttaccttgaagtgaaacaaacaaacaaaaaaaacaagtttagatgtgatcatctccaaactggctgctttgggagagagccagccagctggttaactgggttacataattcgagtatgggtttggggtggatatgttcatagggacctaatacctctttccagcttctctttgtttgtcctggaattccaaaacctatgatgttattgctggaactttgattcagcagttgctaaacaccttctcttgtgtttctggcactagacttgggccttgggtttagtttacacagtcccaacagagtctgggtgctcagtctgatatgggagacaagtgtacataaataattaccatatagtgttgttcataaagagaatgtccaaggtccagaaggtcctgaaacaacatttactctgatttcccccattttctactggttgcagctgaggcccagagagggaaagagagactggtttaagtaatgccaaaagaactagaacttgaaaacccgagttttctgttgactggtccttaataattttactctaccaccctaaaatatgatcaccatccttgcgggaaacatctaatttctgctttaaaaagtccaccccttccatgatgtcctcttgactgccctctctccttaagtctgataccactttactattttttccttgtatggattgtgcttttgtggaaatttttattttctctcttgtatcgtgattatcaggacaggagccaagccggcttcaatctttgttcttatttcccctccccaagcgacatctgagcaactgtcacacttaaggaagcctcggacaagttgggttcgaacctgttggcttgctgcattgagagacacctttgtgtactgcaataaaaattcttacttttcgggccacgtgaatgcatttatgctgtaagaactacgtgaggtcagttactgtttgattgcggagttttgtaggtaggaggcacggaacagtagcaacaatttactaagagaaaatctataggaattggaacagggccctgcggtccgcagggcagcggggggcgggctggggcggggctgcgcagtggtgctgcgcgcggagctctgttgccggaactggtccgagtcgtgcgccgggccgcgcgcagccccgccccgccccgccccgcccccttccccctcggggtggaaacaaagggggttcggcgcgcggtgcggagcctgggggaaaagggaggagcgctccggtggtctggcgcgctgggctcgctaggtttgtgctggcgaggggacggggtgggacgggcgacccggacccaagaagtgggaggaccgcgcgtgtcgcggcctagcggcgaggggagtcgcctgcgcgcgcagcggaggccagtgcgccggcgcatagggagcccgggtctgtgatcgccgaggcggggtgaggcggggtgcggcggggcgcggcggggcggggaggggcgtggccgggccgggcccctagtgcggtgttgcgggacggggccgaggcccggtcggttggggcgtgggggcggagaggatggagcctccgaggcgttaggcgactctgtcatctctgggcgtgcagccgtcgtttcctggcgcggcccgtgtgatggtgccgggaggaag

SEQ ID NO: 41810 - DNA, 2300 bp, Homo sapien
ttctgcagtgggactttccacctttgtggacagacaccaaataaaattttagcttgactgtagttaagtgactgctctggtataactttagcccctgccacattaggtgtcaaaggtggcccaccactttaaaagcctgcctgctctttgggtgtttacttgcatggcttaagattttctggttaagaaataaattagaggctgtgcatggtagttcacacctgtaatcccagcattctgggaggccaatatgggaggactgcttgagcccaggagttagagaccagcctgggcaacatagtgagacctgcctctacagaaaattaaaaatttagcctggattgcctgagcccaggagtttgagactgcagtgagatgtgatccagccattgcactccagcctgggcgacagagcaccgtgtctcaaaatacaaaaaaaataaaaaaagaagaagaaatttaaaactatccaacctggggttgtgacagcattgttgaagatcgtaaccatttgagaggtttcaggaagcttgcctcacaaaaggttggctgaagctcagagggatttgctgaagcttagaggtgaggaatgctggaggactgtaatagatttttgctgctgagttcagcacttgaggaatctgcctctcttacagttagatagctcccaaatgtaacttccctttcctttcctgatgttcttctcccctttcccctctcttcacatagtcctatccaagcttggaggaaaagctacttcagggtggtctgcgttctgtagggaggatttttttttttttttttaagcttagattctggtggaagatctgtaattggaaggcgaatccacagtagattgcgatttgtgagggatacagaggatagaaaataggatacattggataaacttaaaggtatggttggcactttaccttgaagtgaaacaaacaaacaaaaaaaacaagtttagatgtgatcatctccaaactggctgctttgggagagagccagccagctggttaactgggttacataattcgagtatgggtttggggtggatatgttcatagggacctaatacctctttccagcttctctttgtttgtcctggaattccaaaacctatgatgttattgctggaactttgattcagcagttgctaaacaccttctcttgtgtttctggcactagacttgggccttgggtttagtttacacagtcccaacagagtctgggtgctcagtctgatatgggagacaagtgtacataaataattaccatatagtgttgttcataaagagaatgtccaaggtccagaaggtcctgaaacaacatttactctgatttcccccattttctactggttgcagctgaggcccagagagggaaagagagactggtttaagtaatgccaaaagaactagaacttgaaaacccgagttttctgttgactggtccttaataattttactctaccaccctaaaatatgatcaccatccttgcgggaaacatctaatttctgctttaaaaagtccaccccttccatgatgtcctcttgactgccctctctccttaagtctgataccactttactattttttccttgtatggattgtgcttttgtggaaatttttattttctctcttgtatcgtgattatcaggacaggagccaagccggcttcaatctttgttcttatttcccctccccaagcgacatctgagcaactgtcacacttaaggaagcctcggacaagttgggttcgaacctgttggcttgctgcattgagagacacctttgtgtactgcaataaaaattcttacttttcgggccacgtgaatgcatttatgctgtaagaactacgtgaggtcagttactgtttgattgcggagttttgtaggtaggaggcacggaacagtagcaacaatttactaagagaaaatctataggaattggaacagggccctgcggtccgcagggcagcggggggcgggctggggcggggctgcgcagtggtgctgcgcgcggagctctgttgccggaactggtccgagtcgtgcgccgggccgcgcgcagccccgccccgccccgccccgcccccttccccctcggggtggaaacaaagggggttcggcgcgcggtgcggagcctgggggaaaagggaggagcgctccggtggtctggcgcgctgggctcgctaggtttgtgctggcgaggggacggggtgggacgggcgacccggacccaagaagtgggaggaccgcgcgtgtcgcggcctagcggcgaggggagtcgcctgc

SEQ ID NO: 41811 - DNA, 2300 bp, Homo sapien
agcctgggtgacagagtgagactccatctccaaaaaaaaaaaaaagaacatttatgattaatgggaagaggtcaccatatcaacattaacaggagttgggaagaaattaattccaaccctcatggatgactttgaggggttcaagacttcactcgtggaagtaactgcagatttggtggaaacagcaagagaactagaattggaagtgaagcctgaatatgtgactgaactgctgcaatctcatgatccaacttgaatagatggggagtttcttcttacggatgagcaaagagagagtgctttcttgagatggaagctcctcttggtgaagatgctgtgatcattgctgaaataacaacaaaagatttagaatattccataaactttgttgataaggcagtggcaagatttcagagaactaactttgaaggaagtcctgctgtggatgaaatggtatcacacagcatcacatgctacagagaaatctttcatgaaaggaagtgtccatcgatgcagcattgttgttttattttaggaaattgccacagccatcccaacgtttagcaaccaccaccctgatcaatcagcagcatggaggcaagaccctccaccagcaaaaagattatgatttgctgaagattcagatgaccatgttaaattaagtttagcataaagctgcctccttatgcattttaagttcagactaacaatttatttctttctctctctccctttctctcccttcctttcctttcccttcccttcccttcccctcccttcccctcccttccccttcccttccccttctcttcctttctttcttttctctctctctttctctctttctctttttttgagacggagtcttgctctgttgcccagcctggagtgcagtggcacgatctctactcactgcaacctctgcctcccagcagagagaatcaagagattctcctgcctctacctcctgagtagctgggattataggctcgcgccaccaagcccggctaattttttgtatttttagtagagacagggtttcatcatgttggtcaggctggtctcgaactcctgaccccaaatgatctgcccccgcccccccaccaaagtgctgggattatagatgtgagcctttgcacctggcctaacagtttctccatacatagtgaattgtagacaactacaattgtaaatgtgtaaagagactgtaaccttgtaacaagtagcgagtctcagtcaatcacagcagcggagttttggccaatcacaggtggccaactgtttaaacagtgctcaaaatagtcagaggttgagttgcaaccaatccagctgtttccatacttgactgcaatttctgtaagtcattttcctttttctgtccataaatgttatttgaacatatggcagcccgaatcactctgaacctattttggttccagggattactggattttggactcattctttggtcaattcaactctgtaaagtttaatttgtctaaagattttctgggccggatacagtggctcacgcctgtaatcccagcactttgggaggctgaggcgggaggatcgcttgagcccaggagttcgagaccagcctggccaacatagcgagatcccgtctctacccacaaataatttagccaggcgtggtggcgcgtgcctgtagtctcagctactggggttcttattcctcgtggcaacacattttggagagggggaggtattcctgtctttgctgggtgggagaacggccagtgggcaagggaggacgaaaatgagaactgtgactgccagagggcacgtcaattttaggaagagaacgtaagaaagttgggttctgtggagacttggcatatccacgccacctggaaaatcatcacgtgccctccggggcaagaccaaggcctcaagtcacccctcgcagcccagtggacctcccggccatccctttcacggctccacagcgaccgcgagccgttgccccggtgagaaccccccggcactgtgcgcgcccccgcctgccgtgcgcgtccgcttccctgggatccggcgccgcgcgcgcccccgccgcgtccccgccccttccggcccgggagatttgattcccttggcgggcggaagcggccacaacccggcgatcgaaaagattcttaggaacgccgtaccagccgcgtctctcaggacagcaggcccctgtccttctgtcgggcgccgctcagccgtgccctccgcccctcaggtcagttctcccgcctgcccgccgcagtcgcagttgatggctggggtctgggctg

SEQ ID NO: 41812 - DNA, 2300 bp, Homo sapien
tgacgaccagcgggcgccccctcgggaaccacatttgtttcccgctggtctcgagcgtccagagcgcgaagcggcggagcacggcgaacctacgattcgtgatgcttggcctaatcctctgcccttcatgggtgcgggcaggaacggagtagcggctgatgtcccctccctaatcccaaagccccacaaaagccaaaatacacacgcaaactctcaccagcgcatctcacaaacacaaaaactaaagacaacacatgaaaatataacccgatcccccaccaaaacgtacagttcaaaaaaataaaattcaaatcgaaggaaacaaaacacacacaacacgaaattccctaaggcaacacacacacagacgacacccactcacaccaaatcaaaacacatctaaacaccgcggagaaggaaaagccttacaaacgacacacaaaaagacagcctacaaggacaaagtacaaaattacacaaaatcaaaactcaccccaaagaccaggacttacagagcaaaacccgctaaaatcaatcccacgaaaaaacaacacgcaaaacacccgaaacaaaagaatatcccatggaaaaatgaaaactcacagaaaacaaacaaaaacaaaacaagccctctaaatggaaacaacaacaacaacaaaacaccaacaccccccgcccccagcccggggtgaaatgtcaattccgggagggcttttgatctccaggcgcggacaggccgctcctcccaggcgctgcctcccggcgcgggcgaggcgggagggcgggaagcctgggctggggctgggctgcggagggaaagagtcgagcactcggagatggccaaaaatcaaatctcggggtagggacacgggcccgcaggctgcagggaggaggcggcgctggggaactgcgcagaccacttggtgggggggccgcccgggaatccacagccacatttccgattgtggcgaaatctgctcagtggatatgtgatgtccagttgccgccgggggcccccctttcctcgagctctaggctcttccccctaggttgcgacccagcctcgtgaccaccccctccaaaaaacaaacaacactcttgctgaggacgattcactctccaaaactgccattgtccggcgggccaggagtcctcctacggagcgctcccccgccctggagaacctttcccctgcgaccaccccgctgcagggccccacaggctttcagtggctaggcccagcagctgaactaactcaaggctggggaggggaacagggaggggaggcttgagtctggcccgaagagagagggctggacatgccacacctctgctcggtctctgtggatctgatttcctctctggaatcaagtcctggggctctgggactccacaacgtctcagggctcgagggcaatgcgattccacttatgggccggggtaaggtgtctggaactcccgccaatctccagaaactactgagatgttctgctctgcccgggtgctccaaagcggaagcccggatttcatctccagtatttcacagcttaacctccatgctctgggccagaatggaacttgatgtggggaggggttctgggactagaagactggatgggacctgggggctttagggatctggcgctgccctagggtcaggggcccagcaatagtcaggaccccaacaaattggggtgggggttggatggctgggaaccctggggtcgggcgccgccctaggggtgaatcggagtaaaccggaacgtcgcctcggtgcctggcaacactgccagcctttgcaacccctttcaaaagcacctgcttggccgagcagttaatttcttcaaaaacaaaaacccggcctgcgctcgtctaagcagcggggtttgcacatggagatgtcacaggccccgcgcacagcgcagagggccgcgacccccaagcgcatgtcttaatagaaggtgcggctggaagacccgggctcccgggctccgcttcggtctgccccttcccgtaggtgcgctggctagcgcccggcgcaggctgaagccttccttccctccccccaacccctataaaagtctggggcggcgcggcagcagcactgctgctctcccggcttcccgctctactccggccgggccgggtccgccacgtctggcgcgctgagcaggcccggccgcgcagcgcctaccctttcctcgctccgggccggcagtgtggggcggcgcgctgggggcgcggcgtgtctggggacatcttgtgatgttggcgagaacaggacatgatctcacatggcg

SEQ ID NO: 41813 - DNA, 2300 bp, Homo sapien
ttcattggcccctctaaattctcctcaagataagtgtgactttgatttttttcaccaacatttattgaacatgggttaagagacgggtggtgttagagagtgcagataagtactacatttttaagcgactggtctcacagagccaggagtttgcctgggaaaacagttaaagtctaagggtttggctagaaaagaattagaacattaattaacattatggtaagtgctgggaaggaggacagggtactatgaaagggtaaaattggagaaccactttgcagataaggaaagaagcatagaagcagctcacagattaatgattgtttgtttaggtaatgtgtattgtgtaaaacaaatgtcaccttttaaaaaatattcagcttttattaagtgcctgtattactcctgtctatctattatatataatattttaaatttcaacaacactttatgggttatatatatatatatatatatatatatatatatatatatttttttttttttttttttttttttgagatggagtcttgctctgtcacccaggctggagtacagtggcgctataacatctcactgtaacctaccttctagtcaagtgatgctcccacctcagcctctcaagtagctgggactgcaagctcacactactatgacctgctactttttctttttcttttcatagagatgtggtatccccgtgttgcccaggctggtcttgaacttctgctctccttggctcaagcaatcctcctgcctcttcctcccaaagtgctgggattacaggtgtgagccacagagcctggccaacactttcaagttgatttttttaaattctcatttcacaaaaaaaaaaaaaaaaaaaagaaagaaaaaaaggaacagatgtagaaagactaagtaacacttatagaaggccataagcttaggacatatagtcatgtgctgcttaataacgttccagtcaaaaacagactgcacatactacagtggccccgtaaggttattttatcatatttttattttacctttttcatgtttagatacacaaatacttaccattgtgttacaatcacctatagcattcagtacagtaacatgcagttttctagcctaggagcactatgctctaccatatagcctagatgtgtagttgactataccatctaggtttctgtaaatacactcaatgtttatacaacgatgaagttggctaatgacgcatttctcagaacatatcccagtctttaatgacacatgactgtactcctaattaccatgtcccgtcttcccactgtcacacatgcattcaacaaagatttcctactttcccatgctcagaatgcttcagcctccccgtttagtttatgtcttcaaacctagagtcctttggatggcataaaaggcacttcatgagctgacatctgcctaccgttgacactgaatcctgagcagttgccagaacacaccatgccctcccacacctgtgcctttgcagagaacactccactgcctgtaaagcccttctccctgtccttctaacatatacccactcaccctactctgcggcagttttgggtcttcagggaaactttccacctcagcctctctccacatacacagcatttctctttctaattgaagctgtctctactccccatttctcctttttttcttttcttttcttttcttttttttttttttttcgacacagtatctcactctgtcactcaggctggagtgcagtggtgtaaacacagctcactggcacctcaacctcctgggctcaagagatcttcccacctgagcctcccaggaagctgggactacaggcgtgcatcaccacactgcacctggctaatttaaaactataaacattttgtagagatgggatctcgccgtgttaaccaggctggtcttgaattcctgtctcaagcagtcctcccgcctcagtgtgaaccacagtgcccagcccctacttcttgaaatcatgggtgacagcatgcacaaatatcctgaagtctttcttacagagtattttctaaagagaccaacatttatttgagaagggaagcacctgttcttcccacggcagtggtagtaggacaacaatgcgcagctgaattgggatgaggggccaggacaaagcagaaatctgctgcagagagcaggaaagatattctgtagcaggatctgggcaagcggcactcatccatatcctttgcattgcaaagagaggagctacctccttcctttttattttccagtttattggtggctcctagaacctctgagaacta

SEQ ID NO: 41814 - DNA, 2300 bp, Homo sapien
ctgcactctctaacaccacccgtctcttaacccatgttcaataaatgttggtgaaaaaaatcaaagtcacacttatcttgaggagaatttagaggggccaatgaactggcaaagtgtttcattatgacaggagaaaaatagagcagtctacgctatattaaaagtatgcaacaatttattttattttaatcttttttacattcctggtaactcacagaacaaaacaatttatttgtatttgtatttactaatttaagaaatagagatggggtctcactatgttgcccaggctggtcttgaactcctggactcaagtgatcctcccacctcaccctcccaaagtgctgggattacagccatgagccaccgtgcccagtcccccatttttttttaattaaagttatggggtctcttatccaggctggagtgcagtggtgtaatcacagctcacagtgaccttgaacttccaggctcaagcaatcctcccgccccagcctcctgagtaactagagctacaggcgtgccccatcacacctagctaatatttaaaatttgaattatttaaaaattttaatttttatttaatttttataaaaagattttataaaaaggagatttattctttatcttattttttgagacaggatctcagtctgtcacccaggatggagcacggttgcatgatgcatcaccgtgcctggctaatttttaaaattttttaagagatagcctgttggtatattaccgaggctggtttcgaattcttggccttaagagatccttcccccttaggctcccaaaatgctgagattacgagtgtgagcaaccccaccagcccggccaggcattcaaaatttatcagacccagagagacctgagtatgagatgtcagttagcaccatccccatgtacactagcaattgtttaaaggcactttgttcttttctgccctgtacaagcatcaccctttatcttcgtgttcccagaatccgtgatagaaagaacaagtatagccaatggataggttgttattttaatgtaaattcttggaatacaatttagcaagggcctcttctttttttttcctttaaaaattcacttgtagccgggtgcagtcgcccacacctgtaatcccagtactttgggaggcagagatggaaggatcaattcctttgagacaagagttcaagcttcctggccaacaaaacaaagaactcacttgaaactgctgctaagatcatgtattaaattaagggtaacttgaagtgatgctcccagtttgcattcttgagacttggcccaaataaattctctatttatattaactttgcctccgtttttcctttaggttgacagttatttctaaagttgtacagaagggtttaccttgagtattaaaataaggtgtgagaaaggcaactgaagccagaggctcccatcacagccttgtggccttcggaggcttccaaaggatcagcattaactgcaatatttaggaggagtgcagctcttcaagattcataaagtgttaaatctgttgcctggaattccagaaagagggggaggaagagcacagtgtgaactgtgttcaacttcaacctaaaggtaaaagcgatcagcctaagatcaggagcgcaagggagaagcttgaagccatgcgttctcacggaggcgtttcccgctccagggctgcccaggcccgcgggccaagcagctagccgtgcgggccgtcgtcacgcccgcgatcagatcagctccccgccacgtggcactgggaaggcgtccaccaagctccagggagaaggaggcggagcccggcctcaatctcacccgtgtcctcatgggagttgtagttttccttgcgggcgtagagggcacgaactcccggcttttgcccgataaatagcatctcttttgtacgagtcattcaaataatagacgcaatctaggtaacttcaagagaagatgggaaggggaaggggcaaagcatggaaggcaaatctaaagattatgggcggggcagagaaaggttcgcacttagtacgcatgcgcataccaggcgcgacaggtgggcggacacagaaggcgacgcctagggctgtgttgtcccggaagtgccttctctcctcccgggtctgcgcggacgcggcctccttacctcatttgtcctcgcccctccccgtccctctacgcgttttggtccctgtttggtgctttctgtttgcagctacggcagtgagtatgtatgtgacggaccccgagtcacccgcggcctgggacccctgcctaccctccgtctc

SEQ ID NO: 41815 - DNA, 2300 bp, Homo sapien
gcagttcaaacctcagccaggaacagctgggactccaggtgtgggccaccacgccctgttattattattatttttttgacacggagtttctctcttgctgcccagggtggagtgcaatggcgcaatctcggctcactgcaacctccgcctgccgggttaaagcgattctcctgccttaacctcaggagtggctaggattacaggcatgcgccatcacgcccggctaattttgtatttttactagagacggggtttcgccatgttggtcaggctggtctccaactcctgacctcaggtgatccgcccgcctcggcctcccaaagtgctgggattacaggcgtgagccactgcgcccagtcgcccagttaatttttaaatttttaaatttttttgtagagacagcgtcttgctatattaccccggctggtttcgaattctcggccttaagctatcctcccacttcgggctcccaaacaggtgagagctaccccattagccaggcaggcattcaaactttatcaggcccagagggacttgagtatggtacttcagttagcaccatcccatgtaggtggtggtgggggtgggggtggggggtaggggtgtgtggcaattgtttaaaggcattttgttcttttcttcccagtacctgcatcaccctttatcttcgtgttcctaaaatttgtgatagaaagaacaatgtgtagccaatggatagcttatgttattttagtgtcaattcttggtatgtagtttagcaaaagcctcttcttttttcctttaaaaattcactcgtggccgggcgcggtggctcacgcctctaatcccagcactttggcaggtcgaggccaggagttcgagaccagcctggccaacatggtgaaaccccgactctactaaaaatacaaaaattagctgggcgtggtggcaggcgcctgtaatcccagctacttcggaggctgaggcaggaggatggcttgaatctgggaggcggaggttgcagtgagccgagaccgcgccattgcactccagcctgggcaacaactgcgaaactccgtctcaggaaaaaaaaaaaaaaaaaaaaaaaaaaaaccataaagaaagaaaaaaattcactcgtagctgctacaagaagtgtaatggctcatgcctgtgatcccagtgctttgggagacagaggtgggaggatcgatacctttaagcctggagcttcacaagacaaagaactcagttgaaactgctgcttatcggatcacatattaagggcaacttgaattgatgatcccaggttgccctcatcaaacttggcccaaataaattctccacttatattaactttgcctcagtttttcctttaggtcgacagttatttctaaagttctacagatgggtttaccttgtattaaaataaggtgtgagaagggcaaatgaagccagaggctcccagcacaatcttgcaaccttcagagacttccaaaggatcagcattaactccaatatttagcaggagtgcagctcttcgagattcacaaagtgttaatctgttgcctagaattccagagagttggaggcgcccagtgtgaactgtgttccgcctaaaagaaaaagcgaccagcctaagatcatgagcgcaagggagaagcttgaagccatgcgctctcaagtacgcgtttcccgctgcccaggtctgcgggccaagcagccagccacgctggccctcgtcatgcacgcgatcagctaggctcccgcgccacgtggcactgagaaggcgtccaccgagcgccagggagaaggaggcggagcccggcctcaacctcgcccgtgtcctcatgggggttgtagttttcctcgcgggggtagagggcacgaactccccggcttttgcccggtaaatagcatctccttcgtacgagtcattcaaataatagatgcagcctaggtagcttcaagagaagttgggaaggggaagggggaaagcaaggaaggcaaacctaataattatgggcggggcagagaacggttcgcacccactacgcatgcgcacatcaggcgcggcaggtgggcggggacggaaaggcggtgactagagctgtgttgtccccggaagtgccttccctcccgggtctgcgcggacgcggcctccttacctcatttgtcctcgcccctccccgtccctctacgcgttttggttcccggttggtgcttcctgttcgcagctgcggcagtgagtatgtgtgtgacggacccccgccgcccgcggctcgggacccctgcctaccctccttcttgcccgccgggct

SEQ ID NO: 41816 - DNA, 2300 bp, Homo sapien
aaatttatattgaataagtaattataaatgtgatgagtgttttgacatgtaaagtacttatggaagcccataaaaggggctcttaatttagcctggttgcaagtgattttgagctgagtttaaaagatgaaggctgaggaggatttaatatgctcacagtagaaagtaaagtgtttcactttacacatttattcccaaagctgggagttttgtctcaatattgggtcattattaagtttgtatttatacattataaatatacattgtaaaaatatacatttttgtaactagtacagagtttttagacagtctgctctgttgcccagggtgaagtgcagtggcatgatctcgactcactgcagcctgtgcctcccaggttcaagctattcttgtgcctccacctcctgagtagctgggattataggcgcacaccaccacacccagctgatttctttatttttagcagatatgtagtttcaccatcttggctaggctggtctcgaactcctgactcaagtgatccacccgccttggcctcccaaagtcctgggattacaggcgtgagccactgcactggcccacccttgttttatttttgagttgggttcttgctttgtcacccaggctggagtacaatggtatgagcatagctcactgtaactttgaactcctgagctcaagcggttctcccacctcaacctcctgagtagtagctgggactacaggtttgcactgccatgcctggctaagtttttagttttaatttttatggagatggggtcttactgtgttgcccaggctgttctcaaacttctaacctcaacgtgatcctcctgccttggcctcccaaagtgttgggattacaggcatgagccactgccagctcaggcatttttatttattcttttggccaatgatcagagggccgtgcgattaatttgttaattgagaatatacatttacacccaaacagtaaacaaaattgtttcctgttatagattttagtcataattgaagtaatattcctgtatatgcttgaaaatatgagctatagaaccagaaccaaggaaaagatgaagaatggataggatagtgagagctgctttaagttttgttttaacattttggaaagcaagggttttgtatcctgcggtagatctcaatttgtttttcgtttacaatatacctgtgaaatcttacatatcatgtgctgcataatagcattttggttaaagacagacagtgtgactgtggtcccataggatttgtatacgtttttgctatatcttttgtatgtttagatacccaaataccattgtgttacagttacttacagtatttggcaccgttacatgctgtattggtttgtatcctaggagcaatagaccataccatgtagcctagttgtgtagttgactacaccatctagtttgtgaaaatcatcctatgaagtttgcacgatgaaatcacagaacaaagcatttcttagagtgttgactgtgtttccatcaataactataactcaatttgtcagtagtaattctcgttggggagtggtgggacttacaggagtgggtcctaacaggacttagaaatccttggaaaaaaaggtattttaatatgtctgagaatagtgatggccttcatattagcagttgtcactgacaggtgatattgttacttaaactggcatgatctgaacttttaaagtatattctgtgtacaactttctcttttgcagcttcaaggttactgactttttatgatgtttggtggctatgagactatagaagcatacgaagatgatctttatcgagatgagtcatctagtgaactgagtgttgatagtgaggtggaatttcaactctatagccaaattcattatgcccaagatcttgatgatgtcatcagggaggaagagcatgaagaaaagaactctgggaattcggaatcttcgagtagtaaaccaaatcagaagaagctaatcgtcctttcagatagtgaggtcatccagctgtcagatgggtcagaggtcatcactttgtctgatgaagacagtatttatagatgtaaaggaaagaatgttagagttcaagcacaagaaaatgcccatggtctttcttcttctcttcaatctaatgagctggttgataagaaatgcaagagtgatattgagaagcctaaatctgaagagagatcaggtgtaatccgagaggtcatgattatagaggtcagttcaagtgaagaggaagagagcaccatttcagaaggtgataatgtggaaagctggatgctactgg

SEQ ID NO: 41817 - DNA, 2300 bp, Homo sapien
cagaactttggaagtggatcgctttgagcccaggtgttcgagacaagcccggtcaacataatgaaaccctgtctctacaaaaaatacaaaacattagctgggtgtggtggcacatgcctgtggtcccagctgctcaggaggctgaggcgggaggatcattggagcacaggaggtagaggttgcagtgagccaagattgcaccattgccctccagcctagataacagactgagatcctgtctcaaaaaaaaaaaaaaaaaaaaaaaaaaaagaataggcatatactttctcctataaatggtaacatatgcactttgcatcaccctgttttctcactggacagtacatcttggagatcattccacactggtacgcacagagctgcctcactcttttgattgatgcagagtatttcactgtgggaatgaagcatacgtaatgaacagtcccctatgagtggacctttaggttgtttcccatattttactattccaacaatgccacaatgaagagcctttggcagatggcattttgcacatgtgtgaacgcgtctgtaaggtaaattcctaaaagcaaaatttctgggtcaaaaaagatgtgcagtctaaactttgatagctactgccaaactttcttattgaagttgctgatttacactcctaccagcaacgtatgaaagcacctggttccccaatgtattattttttacattggtatcttgctgtaattttaatatgcagttcttttgtgagtcaagttgagcacttttcatcttttgttttttttttttgtttgttttgtttttttttgttttagatggagtctcactctgtcacccaggctggagtgtagtgatgggatctcggctcactgcaacctccatctcctggactcatgagcaattctcctgcctcagcctcctgagtagctggaattacaggcatgtgccaccatgcccacctaatgtttgtatattcagtacagacagagtttcaccatgttggccaggctggtctcaaacttctgacctcaagtgatccgcctgcctcggcctccgaaagtgctgggattacaggcatgagccaccgcgcccagccatacatttaaaggccattttcttttctataaactgtccattgatatcctttgcttattcagataagctgggcatctttgtcttaggaactatttgtgcaataagtaaatcaaccccttgtctataaaatgagttgcaaatatatggtatttttcccggtttgttgtcttatgattttgttaattttttttttttaagataaacataagcctggtatttccaggcacctggtatttccaggcagtctcccatacaagccctaaccaggcttagtttccaagatcagatgcattcaggatggtacggttaatttttcaatggagaattagttgtactcttatggcttctggctttcgcacacatagcgtatcacttatttattgctgcataaagaattactccaaaattgaacggcttagagcaacagcagtcagtgcattatcatctcttatggttccggggttgactgggctcagccagtgattctcctaaaggctctttcttgcagttttagctgtagtcaggtgggagttggcctggagtcacccgaaggcttcctcactcatacctctggtcattgacggtggctgtgagccgggcccctggctgtgctgttggcctgaacacctacacgtgacctctctgtgtgtcctggacttcctcacagcctggaacctgggtttctaccctgggccaacccaagagacagaaaaagtgggggctttcagtctcttaaggcctgagcctgtggaaacaggaccctgagcgtgtagaaaaagcagggctcccatgaggccttggacgggatactgccccctctcccccggggccctgattccccagtggcacgaggcgcacccccccacacacacacaaggacactgtgtagggtcactgttactgtcactccccgagcacgcacagtcaccgctcagccgcaacccggcgctccctctcgcgaagccacaccccctgcgcacgccgcgcgcgacgtctctcccgcccactccagcctggccccgccccggcccagctacattcccgggccagcttctgtactgccaggtccgggtcggcggctgcactgcggatgagaccggtgcgactcatgaaggtgttcgtcacccgcaggatacccgccgagggtagggtcgcgctcgcccgggcggcagagtaagagcctcgcgcgccgtggaggagggagc

SEQ ID NO: 41818 - DNA, 2300 bp, Homo sapien
ggaggccccagcgtggctaaagaagaccggaggcctcgctgggtggacagtccagtgggtaagagcggggccttggtggcagaggccctgaggtgaacccggctctgcctgtgactgagccaggccacttaacctccctgaactgcagtgtctgaggctgtcaaaggggattattcagagttttaactgaagaacagagatgtcagcctcttattctaagaaaacaataataagcggtgtccccatgatagtccccagtgctgtggctttgagttcctcgaggaaagatactaacaatgcactttctgcacaacaggggccaatctcaaagtcatcagcaccatgtctgtgggcatcgaccacttggctttggatgaaatcaagaagcggtaactgcagcttgggatctggagggggcctagagagaggggtggctatgagagaaagaagagctgttgatttgtttttactgcatatccctcggccattcagggagaatgtgaggtggctgatgatagaatctgtccacatgtgcacaggtcagttacaataaaccccagcagtcagaaacagtgggtaacttctgtgtaggtggcaccctttcacattcattatcttttttgatccccacaacaataccttgaagtagcaaaggcaggtgttattctttctgtttcagatgaggaaattcagaaaggttaagttacttgttcagtccctgaaccctgatcttccatcttcatatccttccaaagtgggagataatctaaataggaatgaggactgcccgtttttgagtgctcatttatagttctgagcttcctggcaggcagatcaaagagggagcaaagtaactccatggaaatgtcccagcagtagacattggtaaatatggttgaggctgatgttaccaccagatgtctgattcgtagtgggatccgagttggctacaccccagatgtcctgacagataccaccgccgaactcgcagtctccctgctacttaccacctgccgccggttgccggaggccatcgaggaagtgaagaagtaagtgaacgcagaccaggtgcggtggctcacggctgtaatcccagcactttgggaggccaaagtgagcggatcatgaggttaggagttcgagaccagtctggccaacatagtgaaaccccgtctctagtaaaaatacaaaaaaaattagctgggtgtggtggtgggtccctgtaatcccagctacttgggaggctgaggcaggagaatcatgtgaacccaggagacagaggttgcagtgagctgagatcacaccattgcactccagcccaggtgacggtgtgagactctgtctcaaaaaaaaaaagaaaaataagtgaacgcctggcaggaacgttggctctgctcagcactggatcctgatcactgtgccagtccagcccacgcatagtccctgaccccaggtgtgccccattgagtgaggactcagctaaaataaagcacaaagcagagctgcaataagggcagaaagggaagtggtgagagaagaggatgagggaggacaaacaagttctgctggtgggtgagggctggcagggagagtgtggatcagggagggcttcacagaataagtagcaggtgggcgtccgcttgagtcctgaaagctgcaggtccaccatcccttagatcccaaaatctaaaaagctcggacagctgaaagttctttcatactaacaggagactatttaaggcttttatttctcccatttaatgtgactttcctaagttttgctgcagatgtaacacttttaaaacaggctgctgcccagacactgcagagggtgatgtgtggaatctaccacgtgcgccatgctgcctttctaaaggccaaacagttttaaaatctagcctgaaggtttcagatcagggatttcggcctgtatatcaagagttagagttggccgggcacggtggctcacacctgtaatcccagcactttgggaggccgaggcgggcagattgtttgagcctcaggagttggagaacagcttgggcaatgtggcaaaagtctgtctctacaaaaaatacaaaaattaggcaggcgtggtgttacacgcctgtagtcccaactactcgggaggctgaggtgggaggattgcttgaacccaggaggcagaggctgcagtgaaccgagatcatgtcactgtactccagtctgggcgacacagcaagaccctgtctccaaaaaaaaaaaaaaaaaaagttgggggaagcattccatgtgcagatggagggactggcccgagtcaa

SEQ ID NO: 41819 - DNA, 2300 bp, Homo sapien
gatcaaagagggagcaaagtaactccatggaaatgtcccagcagtagacattggtaaatatggttgaggctgatgttaccaccagatgtctgattcgtagtgggatccgagttggctacaccccagatgtcctgacagataccaccgccgaactcgcagtctccctgctacttaccacctgccgccggttgccggaggccatcgaggaagtgaagaagtaagtgaacgcagaccaggtgcggtggctcacggctgtaatcccagcactttgggaggccaaagtgagcggatcatgaggttaggagttcgagaccagtctggccaacatagtgaaaccccgtctctagtaaaaatacaaaaaaaattagctgggtgtggtggtgggtccctgtaatcccagctacttgggaggctgaggcaggagaatcatgtgaacccaggagacagaggttgcagtgagctgagatcacaccattgcactccagcccaggtgacggtgtgagactctgtctcaaaaaaaaaaagaaaaataagtgaacgcctggcaggaacgttggctctgctcagcactggatcctgatcactgtgccagtccagcccacgcatagtccctgaccccaggtgtgccccattgagtgaggactcagctaaaataaagcacaaagcagagctgcaataagggcagaaagggaagtggtgagagaagaggatgagggaggacaaacaagttctgctggtgggtgagggctggcagggagagtgtggatcagggagggcttcacagaataagtagcaggtgggcgtccgcttgagtcctgaaagctgcaggtccaccatcccttagatcccaaaatctaaaaagctcggacagctgaaagttctttcatactaacaggagactatttaaggcttttatttctcccatttaatgtgactttcctaagttttgctgcagatgtaacacttttaaaacaggctgctgcccagacactgcagagggtgatgtgtggaatctaccacgtgcgccatgctgcctttctaaaggccaaacagttttaaaatctagcctgaaggtttcagatcagggatttcggcctgtatatcaagagttagagttggccgggcacggtggctcacacctgtaatcccagcactttgggaggccgaggcgggcagattgtttgagcctcaggagttggagaacagcttgggcaatgtggcaaaagtctgtctctacaaaaaatacaaaaattaggcaggcgtggtgttacacgcctgtagtcccaactactcgggaggctgaggtgggaggattgcttgaacccaggaggcagaggctgcagtgaaccgagatcatgtcactgtactccagtctgggcgacacagcaagaccctgtctccaaaaaaaaaaaaaaaaaaagttgggggaagcattccatgtgcagatggagggactggcccgagtcaaggtgggaggcgtgcaaacgcaggctctcacagtgcgtggccagcagcgtgggccccggcacggggcatggagcagagtagacagtgctgagtcctgctcactgtcctgtctggggagtcatcacatctactggaggtggctcagggcaggctccatctcttgcccagggcagcagggtgggccctgtggctgtactctttgttgctgccctaaagtgccaagagaacttgttttggaatcataaatcctgagtttgcagcctgttgctctcaactcttccctggttgtgtgacctcaggcaagtcaccctttctggtttgttttcccatctgcaaaacaggatgagagccagtaaggccccttcccgccctcaagttctatgtctctggtggctttaaaggtggagtcgtttctgctgctcatctgcagtgccgagtggcagtgcctcatcccactctcagtccgtgacctggagggtgggtttataccttggaccacagtcagaggtgccgggttctcagcggcccccatcttggtccaaggctgggcctctcacctgcccctctctctcccctcagtggtggctggacctcgtggaagcccctctggctgtgtggctatggactcacgcagagcactgtcggcatcatcgggctggggcgcataggtgaggctcccaccggcccgcttgcccgccccggctctcacagcgtggtttgcatccctggcaccacgtgtctgaaggctgagaagacccacatgctgtcagggcactttgcttgcagtagagatatctctaatgagggatacagctttgtaaaacacaggcaaa

SEQ ID NO: 41820 - DNA, 2300 bp, Homo sapien
caaaggtgtggtaaacagccttgggtttattattccacatctttgtatttcggtagcatatatttctagaaaggaattaccatctagaagggaacaaatgcatattttaaattttgatagatactacgaagtgatcgtcaaacagggcatcagtgacacccccgtccacaatatagcgggtgtccacttccacacactcctaaattctgaatatacaatttttaaaacttttgccagcctgtaaatctgaggcaatctaggtcatggcatttaccgttgagagacagatacgcaaaagaatctctcctattgcctggcttactgtcatcattccatattttccttattttaccgatcaatctgtcagtaaaatatgtgtgatggctatagtgtcagcgaatcttaaggaaaagaattaaacatcagactccaccgagcccttaaagaaatccacgcaaacaggttgctttttgaaatcaacacttccgaccagtaactgaagggatggaatctgctgtaggggtattcggtgtgttccattcttaaagcggggagttccttttttttccccccagacgaaatctcactctgttgcctaggctggagtgcagcggcacgatctcagctcactgcaacctccgcctcccgggttcaagcgattctcctgcctcagcctcccgagtagttgcctgggattacgggcgcccaccaccacgcccggctaatttttgtacttttagtagagacagggtttcaccatgttggccaggctggtctcgaactcctgatctcgggcgatctgcccgcctcagccttcccaattgctgcgattataggcgtgagccatcgcgcccggctgggagttccatttttctgggagctcctccaagacccttacccccacccccagaagaacccagctgagttcgcgggcctgcctttgtctccagagccacgcagcgctcccagacacgctgcgccggagaaggcagctttcttctgccgtcctcaccctaggaaagggggtttcttccctggccccagtgtccgatgctcagggatcgggttctccctccgagggtgcacctggaaacccgagcgtcgccccggggctcgcttttttcagaccgcgtcccatacaagtccgcgacccttccacgtttgggacaggagtgggagagcttagcgcttcctatttttttgtggggggagtgcaggtgattataaatctgggcatgcagactacaggcttatttgacctgcagccgagtgcggggccaagcgccgggctcctggggcgccaccgtttccagacgcgcagccacccggactggacgaggggcggggtccgacctaactgccatccgatggacagcgttttttattcgcggttttcaccctggactttggcttagttaaacctaaagagctttttggaatcttatctttcccaacgtctatgaagtgggaactcaatctccagccctctacgtgtgtgtgtgtgtgtgtgttcagcgaagggaattcaccccggagaagagccctgggtcactaaagcgccgggcaccacgagggtggaaaaatccttcagaaccagccaatggcggtacggcctgccctgagggcccgcctctccggcgccctcagacatcacgcagtcgttgttgtgattggcggatttaggcggaaagcccgctagcctaaaccacagagggttttgattggttgcagcgaacagccgcatttctatagtccaaacctggagcagtttagtgataaatcccgccctaaaaggcatttgataaccgttttacatgttgtaaggcaaagggtgattggtcagagagctcacggattcagtcggtagtaaacacaaccagacttcagggaccgtggattggtcagtttttccgggggctaagtaaattcctccaggttccgcgcgccggctggctgcactcctaccccggccccgcccttcccattgctgattggttgcagcccaactgggagaggcggaatggggcggagtaggcgctcttgcattacgtcacttccgcttatcctcgggcgccgccgccgtgttctcagagtgctgcggcgaactggctggaggagctaggggactagaggcggggtgggaggggggcgggtggaagggggaggaagtcccgtaacggagacgctggtcaggacgttcccacctcctctgacactgccgagtccgatcggagaggggtcaccgcctccttcagcgaggaggaggggggcggagcccgactcaggtgaggagaccccgt

SEQ ID NO: 41821 - DNA, 2300 bp, Homo sapien
gcttccaagattagtgataattcaggcccattctttgccctgtcattcattaattcattccatatttattgagggtctagtatgttcaggatttggagataaagcagtgatcaaaacaaacataaatttgtttattaacctccaaagtgtttattgtgaaccccaagtaagtttagtgaggaaacaatcaatgggtgagacaatcacacaattaagctcttctttcttcatccttctttcttctttcttcttcttcccttttcctttcctgaacaattcaatccaaaatcatgaggtggggtcaagcaaggtagccttctaagggaggaaaggctatgagagctaaatgcaacacatgattcttgacaggacatttttgctataaaaacatgattgggccagctgcaatggctcacgcctgtaatcccagaactttgggaggccaaggtgggaggatcacttgagcccaggagtctgagaccagccctggcaacacagtgagacctagtctctacaaaaaatttttttaattaagaaaaaacaaaacaaaactgagtgtggtggcacacacttgtattcccaggttgtggtgagaggatcacttgagcctggaaggtcaaggctgcagtgagccctggttgcaacactgcactccagcctgggtgacagagtgagaccctgtctcaaaaaacaaactaacaacaaacgttgggacaatgggtgaacttaaatgggatgtgaggattacatggtggtaatgtaccagtgctaatttcctgattcttttctgtttaatttttttttttttttttgtcgcccaggctagagtgcagtggcaccatcacagctcactgcagcctctgcctcctaggctcaagcaatcctcccacctcagcctcccgagtagctgggacgacacgcgtgcgccaccacacatggctaatattattttttgtagagacagggtcttgttatgttgcccagcctggtctcaaactcctggaatcaagggatagaactgcctctccctcccaaagtgctgggattgcaggcgtgaaccactgcgcccggcaatttgctgattctgatggctgtgttgttatttagggaatgtctgtaggaaatactatagtcttcagggttgaaagggtatcaggttgacaacttactctaaatggttcagggcaaaaacatttcttgcagtgtttctttacgtttgagattgggtaattagaaaagcgtgacaagtgctcaggcaaaggggcatgcaggctttagggttattcctaggatcctgggtgttggaggcgggtgttgagggtgtgtggaaggaaaagagtcttgaaagaaggtgatttggaagacagaggggagtcaaccggagttcttgcccttcaatagtacgcatctttgggcaaagggggcctcggccagcgtccatgcttaaaggccctgctttcgccttctttctgctctgaaaactccccgtgcagaagaagggttgaatccgcagtgaaaaagggacatgtccatcagctcggactccctcttctattccagtccagaatctcctgcccaaaggctccggggttggctgggcttctgttccatcacctcagtgttgattgggccacaggtgtgcacgccacagcccatggcggggagctgtttgtcggactgtggacaaagtttgtacctagagctggatgtccacgtgggtgggtgggaagccctagagaggggcggctattcgccagcggccacatttagttggggctcaagcagttcctgtcagagaattctaaatttgaacttggtccttcaggtcttgggaagatgagtttgtcacggtaggagagagagacgacactctctttagaaggtgctgagccggaagaaggctcatagcaagcttaggctgaagcctttggcgcctcgggctctggacctacaaaacccagagtgcacgcgagcgctgagccaatcaggtgctgcgcctcggccagtcaagcgggtgtgtggcaccttgtgggcggagaccacgcctctctacgcggggggcggggacacgcggctcgcgcgctgtgggcggtgcccggcggggccacgccttttccggcccgcagcgcggcctgggctcccgcgtgtttaaaagtgcgcttgtggctgctgctgtcttaactcctgtgcttggcggacagacaggcgagatggcggcggaggtgttgccgagtgcgaggtggcagtattgtggggcgcccgacgggagccagagagctgtactgggtaaagactgcgga

SEQ ID NO: 41822 - DNA, 2300 bp, Homo sapien
agctactcaggaggcggggggatcgcttgagcccaggagttcaaggctgcagtgaggtgtgattgcaccacggtattctaggtgctcagagctcaggagtgacaggagcaagaccctgtcttaaaaggaaaaaaaaaaaaaaaaaaaagatggtagaagatgtttgatatttcttgaattaaaaaaaaataattactgtgtagttcacctaactccagggctcccaaagcctcctgattatcaaaatcactgtggggtgggggtgggagggtaggatggatgggtgggtcgggaaatggaggaaggcttattcagaacagattcctgggccaggcgcagtggctcacacctgtaaccctaacactttgagaggccaaggcaggaggatcgcttgagtttaggagttcaagaccagactaggcaacatagagagacctcaatctctactgagaaaaaaaaaatttttttcagattagctgggcatggtggtacatgcctgtagttccaactactagggaggctgaagtaggaggatgcttgagctcaggactcagagttcgaggttgcagtgagctatgatggtgccactgcactactgcctgggcaatagagcaagaccctgtctctaaaacaaaataaaattaaaagagattcctgggcctggtaagcacttgcttctggtagtggtagaggacagggagatggataaccagcagccccaacccacttattcagaaaatgagttctgtctcctcccaggtcagaggttcctccatgtggccatgctgtctgtccggtacgacaggcaaagccacctacgttcacaaatacttatttttgttgttctcaaccaagccaggagaagcaacaggctggtgccaccaagagatttgagcttgcaggctcatggctccagacactgctgcagggccccagtcattgtcctgcacacaacctcccccagcactgccccaacccttgttgctgttggtgggcagagggacctaccgcagagccctcctctcctcgcccccgggtctggctgccctgctttcttttcctgacaagccatggagctctaatcctgctgacttggggtttttctcctcatgtacctagtgtctctaagtacacacaaccgcaagcgtcagttttcctttcccaaatttcaaacacatttttgacacatattactcgcttagtaagtttttgtactccaaaattacagaacttacattaagaagaaaatttccggccaggcatggtggctcacgcctgtaatcccagcactttgggaggccgaggcaggtggatcacgaggtcaggagatcgagaccatcctggctaacacggtgaaaccatgtctctactaaaaatacaaaaaattagccgggcgtggtggcgggtgcctgtagtcccagccactcaggaggctgaggcagaagaatggtgtgaacccgggaggcggagcttgtagtgagccgagatggcgccaccgcactccaacctgggcgacagagcgagactccgtctcaaaaaaaaaaaaaagaaaatttccccaaacagtagggaggcagattccaggttagtgtaggaaggagagcaaagcaaaaccctctaatgagtagatctgcctgtccagagggggagtgagcagccttgaggcggcagtgagcaccccgtcagggaggtgtaagcggcagtaggatggcggtggtgcaggaggcattcaagcacacggtgggagctcaggccagaggagccttctcacatggtgtttccctggctacactgaataaggacttcatgcagaagaaccagagttttgttgacgcacctggatttcctcctgctgtttcatcagcttggaagacgcaaactcaagggttgtttctgagtgttggtacctcttcttctccactccgttctcccggagtgcacaattcagggaaggcttttcctgactggtggtgtcagggctgaccctgggaccccctgtgctttccaacccttccacccatagcctcaggactctatgtccagagcagcgaggcactgcatgtcatcaccaatgtgatccacgcgaatggggacagaggcattactgtggcccagagcagccaacccacccgagtggccaacaacagcatctcctgcaaccggcaaagtggggtcaaggttgaggcccagtgcaaagtggagctccggggcaatggtatctatgacaacagaggccacggcattatcaccaagggcgacagcaccatcgtcattgaaaacgatatcattggcaaccgggg

SEQ ID NO: 41823 - DNA, 2300 bp, Homo sapien
attgggagcatttaaatctagctattttgaaatatacaataaattattgttaactacagtcaccctactgtgctattgaacactaaaatttattccttctatccatgtttgtacccattaaccaacctctctctatccccttcccctcccagcctctggtaactgtcattctacttgccaactgcatgagatcaactttttagctcccacgtatgagtgagaacatgtgatatttgtctttctatgcgtggcttatttcactttacataatgacctccagttccatctgtgttgctgcaaatgacaggctgaatagtattctgttgtgtatatatgccacattctttttatccattcatctgttgatgaagacttaggttgcttccatatcttggctattgcgaatagtgctgcaataaacatggggatccaggcatacctttgacatactgatttccattcctggataaatatccagcagtgggactgctggatcatatggcagttctagttttacttttttgagaaacctccatgcatttttctatactggctgtataattcagtgtatgagagttcccttttctccatgtcctcaccagcatttgttatttttttgtctttttgttaatagtcattctaactggcagtgtcaaatttaacaagttcaaatgggagttcttgatctccccccgcttccaaatatattccccttacaatagttcccatttcaataaatagcacctccacgggcccagttaataggttaagctaccaatctctgcttccacccttaactcctgtcttcacatagtagctgacatactgctttaaaaggtatcaaatcctccaccccttcgatggcttcctgttacgtacaattttaaaatccttatcatggcctattaagtgctgcgtgatctggcccctacctacctttctgacctcacttatattgttcttcccgttaaaaagcttcagacaagctagacgttttccatttccacaaagagcgatcttttctcctccaacccaacccacctggtccaagagttttcacagggcttaccctgcccctcttccatttggctaactctttatcttactctgagaggtcttccttgactacccttccttggtccctaatttatttagttttatttttgaaacaagagtctcgccctgtcacccaggctggagtgcagtggcacaatcatggctcactgttaacctcgaactcctgagctcaagtgatctttcctccagcctcggcctgcaaaagcgctgggattacaggcatgaacacctggcccctatttttaaattacagctccttccgtgcattttctacaattttaaacacatattggtttaaatgacacttgattaccgtctaccttctccactacagaattaacttcaggagaagaggaaccatatctgctttgttcacttttgtgcccataatagtaacggcaccagcagcaacaaacatacagcatttactttgtggcaggcattatgctaagcgccatacatacaactaatttaatatgtactcctagtacattgtctggcaggtagccaatggtcagtttgttcagtgaatgaacccagaccctacatgctcatctacagggtgcctagcaccccaggaaactgctccttatactgttagataactggtgctcgcaggaatcttatttacactgtattggccttagcatgcctccctgcagtttccacccactggttctatttctgccccttctggggccacgcaacacgagcctgaatcgtccttccgcaagctcgcctttgcagtacccgaagccccacgcgccccctcctcgtctgccttcctcccgcctcccggtgcccctcctgcagatacagcttttatgcgcggtggtcgggaagcccagccccggccagccagctgctcccggcatccttcgccgccttgcgcgtcacatgacggcggcggctccgcacgatccccaggcagctgtccgcccccgggcggggctggccgcacgccgcaatcctaccggctgctgcggctccagcgggggcggcgggtggcttccagggcaccggcggccgcggcccggactccgcggtgggcgagcgccctgtgaggtaagcggccggtgcgcagaggctgcgggcgaacttgggcggccgggggaggggacccggggcgcttccccaggcgaccgacccaggaggcgccgctcagtcctggccgaggctgagcgtctggtcgggcttcgggcatcaggggtctggcaggacca

SEQ ID NO: 41824 - DNA, 2300 bp, Homo sapien
atactcgtccctcatcacaccactagttggcagcagtgccagatctagagtccatgtctccagtgttcctgttcatgttctttccgcagttcttgctgctttcaacatcactgcaggctttctaaacactcaccaagggttggctggaggctattccttgggagtcagcccctcccattccagagctgcctctgctattccattgcatgaattacagatgcaaaaggttgctaaagctggaataagcagatgagttccctttcttgccccagtgccttacattctgtcaaccagaaagttgaccgtgcatatagttattagttgctctcatagtaaattattgtcctaatttatccaaagtccattgttgctatgcaatatgcagtcaagaaggaacattctggttttgaattatgtgagcaattcagtcatctggcttgcgtgtaagaagtagatatggctagttggcatgcgtaacttggggcagcagcctactaactctgtttggatgcttctgtgacaggaaatctggttgcatcaaactcttgactctagcgatgtccatccatgtgggcactaactgttaaagactaacagatgagcagtagggtgcaggggaaagataattcaacttgacatgataattatctgcattagaaccctgcccgtgcatcaccagcagaatgactagactttagtgcactttagacttcagctgcgatgttccagataaagggcttcacaccaaagctggacttggtttctgagcctctttctattcatctgtaaaatgctgatcagatttgaacttgctttatacatattgtgttacttggctaacagtattttaaagacctctgtgcttcaataatctgtaaaaaggccaggtgcggtggctcatgcctgtaatcacggcacttttgggggccgaggtgggcagatcacctgagatcaggagtttccaagaccagcctggccaacatggtgaaaccgcgtctctacaaaaaatacaaaatttagccaggcgtggtgctgcgcaaccgtaatcccagctactcaggaggctgaggcaggagaatcacttgaacctgggaagcagcggttgcagtgagctgaaattgcgccactgcactccagcctgggcggcagagcgagactctgtctccaaaaaaaaaaaaaaaaaaaaaaaagtttcatctttgtctctttgttttaacttatgtaaagtttcaaacatactcaagaaagactagaataattaactaaaatgaagtactagtcaccagcagtttttaatattttgctgacatcacttatctctctcaatacttttttccccctctgaggtatttttaagcacatttgggggccaggcgcgatagctcacgcctgtaatcccagcactttgggaggccgaggcgggaggatcgcttggatcctggaacccaggagttccagaacagtctcaaccaccacaattagcaataaaaaaataaataaaaattaaagcacatttgggcaagatgttttaaagatctctgtgcttcaattgtctaatctaggaaacgaagattataatatcgaattcacgggggacaattatattgaatattcaataaatgttagttatcactgtttacagtggtacctatgtgcacagccccctccagcgcgtaaaagcactttacagcgcagcgctccaggctcaagatagatgttattgttgttgttattattattattattattattattttgagacggagtctcgctcgctctgtcgcccaggctggagcgcagtggcgcgatctcggctaactgcaacatccccctcctgggttcaagcgattttcctgcctcagcctcccgagtagctgggattgtaagcacgcgccaccgagccgggctgatttttgtatgacagatgttattaaagacagcgtggagaaaccagagcctgcgttgctgagcttgcggccgcccgcttcacaccgcacttcagatcagctgggtcaggacgtggattgtcccgtgcaggcatccatcgtcgagtgtggcaacgagagggcgggaacaggaagtgaggataggccgagttccgggcgcgaggcggccaccgtggagagcagagcgcggcggctggaagctgctaagtcagagccgcgatgttccggattgagggcctcgcgccgaagctggacccggaggagatgaaacggaagatgcgcgaggatgtgatctcctccatacggaactttctcatctacgtggccctcctgcgagtcagtgagtgtctcccg

SEQ ID NO: 41825 - DNA, 2300 bp, Homo sapien
ggagggacatgagggcaatggtaaaggaggctgaggggcaagagggaccagaatgagaatctgaggagagcggggttaggggctgggtccggcacctagagaggctgacactgacgcaggtagctaggaaatggagggggacagggcaaaattccatggggaacatttgtactcaccggacaagagaatagttcttatcttactttctgacaagtgctatgctttttggtgtttaactgccttggagagagtaatttgatgattaatctttatctacaaaataatttttaaaattaaactttattttgagaaaattgtagattcacatgcaattgttaagaaataattcagagagccagaatacttgatttttaaaaagctttcattatttccactatggcttcagaatcttccacccttatggtgcttctgtctcctggggcagaactttgtatactacaaagacgggtgaggaaagcaaaaggctcactcagcccgtggatctgggtggcagagggctggggcactgacagaaaagggagctttgggtgcaattacgtaggaggtctttcagcgatggagccactcaggagtttctggatggactcctggatttggaaatgaaggtcacaaaggaggagcacctgccttcatccagacgatgttggctccaaagtgctgctagtcttcccccaccgcccttggatgaaggatgcacttgttaacatctgcctgtgcaccatccccagaatgatctaacatcccagtctgatggtgcctcaaccctactcagaactcctcccatgaacctgccagtgcactgggaacacggtgcaaactccttgaccaggaattggcccctgctgactcccctgctttatgtctcaactcctgccactccctctgtgggatctctctcatcttggggtctttgttcctgtggtctcaacctgaaaggctctctccacactcctccctttcactggccaattccactggcctttcaggtttccatttagagcatgccctctccaggaggccttcactcagtcagtgcaggcctgagtggtgcccttggccccgtgggattgggttattgttacaggaactggactgtattttaatagtcctagactgtacattccatgaggacagggactgctttattaaaggtgtattgtatctccagtgtctaatgcaggatatggacctcgtaggtgttcagtagagttcagcacggaaaatagtgcacagacacatgcatttgggtatcatgctcagagaggcggtaggaccagaaccaggggagtgggtgagacggctcagggggtcagaaaagggctgagtgcagagtcccagggcgctccggcattttagagcttctggtttgaggaaccctcaaggagaccgagggagtggctggagagggccgaggaaagctaggagaacacagtttcccagcgcggaaggagtttacagagacaggggaggtggtccacagtgcctaccgtgggcccacgctctccctctcccttcagccgaacacctgcggggcgtgggggtcagggggcgagtcccccagggctccccgtagctggggctcttcctggggaaaaggaggcgtgagaagggggtcgttttgggaactcttctgggttccagttctggcccaaccaccgctggtccgggtgaccttggggagtccctttcctctcccagcctcagtctcccccctgggtactcagcggacgctgcgtgccccggcggtgagctgaggcaggcggcggaggcagggcccgggtgggagcgggaccgcccactgcggcgggccgggacctcggagccagcggaggcggcgcgcggggctcctcccccggggcgggggtcgcggcgccggcagctggcggccgcgcagctgcagcctcagcacctgccgccgccagacggcgcgggcgcggcccggcccggccaacccctccggctgcagcctcggcgcgggaggcggagcccgagccgagcccgagcagcgctgcttcccgagccttggccgcgaccgtgcccgccgctgggcggggccgcccttctccgagagcgtcagcccgctaggtccttgtccgcgcgggcggcacctcctctgcaggtaagggaggggtcctggcaccgcaaagttttggggagacggcctgtccccacaccccgggcctgcgcctcggcttcctccgcgccgccctccgcctgcaccaccagtcccgggtgacccgcgcccgcctccggtcctcgtgtccccaagcccggctcgg

SEQ ID NO: 41826 - DNA, 2300 bp, Homo sapien
tcaatctggcatcaccttatcctgtggacgtaacattagtctgcagaaaaagagatcagagttgggtagaatcactttgaatattaaagatagtgatgccttttgccatacatctccaaagagctctgagcatttcagacattacctcatcgttaattttcacagtgttcttgggtgagaagctgatggcaagtattccctggtctccgtgtggggcagaacatagcaaattttaggtaggtagtaggagttctcctgactagatatcaattggtaaaagaaaatgggggcattttttgggtgtcttcttcacagttgttctgcgttactcagaaattaaattgccttcctgcattttgccccactaacacttattgagtgtctactgtgagcaaggcacaatgctgagtactgtggctaggagtgaaatgtaaatgtccttagtcccacacttaaggcctttggtgatctggcttcttccacctgccactcctaccccgatacctccactttatttcacataccttttatgcctcatcgtcttcatgctaagctgaacctttggtcttcagggtagcccagtgccatctcccttctgtgcactttatgcccttcccctggtgtgcccccgttgcctttctccctacccctgcaggtcttatcctgtccttcacgctctgctcacctcctgcacaaagccttccctgatagctcactctactttatccacagctggatgggatctcccaccaccaaactcccaggtgttctactagcctctctgcactggtccttactcttttttactttgtatttcagtgatttatgtgcactccttgatgacttttcaagcttcttgactgaagagatgtgcaagtactcaatgcataaaggaatgaaacgggcataatttcaggctagcagtcaccagtttgtgcctagctttctgaggtacagagtcactgatagaaccctacttggcctcgcctctcctttgatccttcctcactgaggccctttgctgcctcccagtcggttccgtcctcgccttgcatcagtgcccataccatctttcagttcatagctgtgtattaaaaagtattcctctcttatggtgttctggggagacatgggaaaagagagacaattgaagcatgcttttttttttttttttcctgagacagggtcttgctttgtcacccaggctggagtgcagtggcgtgaccttggcttactgcaactgctgctcccccaggctcaagcgatcctgccacctcagcttcccaagcagctgggaccacaggtgcgcaccaccaagcccagctattttcttgtattttcagtaaagacagggtctcaccatgttggccaggctggtctagaactcctgacctcaagcgatctgcccacctcagcctcccaaagtgctggggttacaggcatgagccactgtgccaggcctgaagcagttttaaggttacccctgggctggccacaatggctcactcctgtaatcccagcacttcgggaggctgaggcgggcgggttgcttgaggtcaagagttcaggaccagcctgaccaacatggtgagaccccatctctactaaaaattaaaaaaaaaaaatagccaggcatggtggcacacacttgtaatcccagctgcttgggaggctgagacacaagaattgcttgaacccgggaggcggaggcagaggttgcaatgagacgagatcgtgccactgcactccagcttgggtgacagagggagactctgtctcaaaaaaagaaaaaaaaaaagaaggttacccctgtgcttatttctttttcaacctctgtaatgcaaaccacccacacttcatgggatcctaaaattgcaaagggctttatccagagtattctttgtccatgagccggcatgagggctgagatcatctcctgctctacctgtggcaggctgtgtgaggctgggcaagttatttaatcttcctgtggcgtcatttccccatctgttaaggggggataatgtgcttaggggtgacctacctccctgggatgctgtgaggcttagtgagctaatgccattgctattaactttaactgaacacaactgggcagaactagcaggagaccaagtattatgtggcacagaataaactctacaactataaaatggatgcatcatgagaccttgggtgtcatcttctgtgttgcccttggcacagaggaagccagtttgccaatcaaggacctctagggtttcctctctcgactggctcaagtggttgaggtcttgaggatg

SEQ ID NO: 41827 - DNA, 2300 bp, Homo sapien
tgagaggtgacagagtgatggcagccctcgctcgctcttggcacctcctcggccttggcgcccgctctggccacgcttgaggagcccctcagcctgccgctgcactgtgggacccccttcctgggatggccgaggccggagccggctccctcagcctgccgggaggtggggagggagaggcacagggggaaccggggctgctcgcagggcgcttgcgggccagctagagttccgggtgggcgtgggcttggcgggccctgcactcggagcggcggccggccccgccggccccaggcagtgaggggcttagcacccaggccagcagctgcggagggtgcgctgggtcccccagcagggccggcccaccggcgctgctgttgatttctcgctgggccttagctgcctacctgcggggcagggcttgggacctgcagcccgccatgcctgagccttccccctacccctacccctacccctacccccacccctacccccacccccacccccgccgtgggctcccgagaggcccaagcctcccagacgagcactgacccctgctccacggcacccggtcccatcgaccgcccaaaggctgaggaatgtgggcacacggcgagggactggcaggtagcttcacctgcggccccagtgctggatccactggatgaagccagctgggctcctgagtccagtggggacttggagaacctttatgtttagctaagggattgtaaatacaccaatgagcactctgtatctagctcaaggtttgtaaatgcaccaatcagcactctgtgtccagctcagggtttgtggatgcaccaatcggcactctgtgtctagctaatctggtggggacttggagaatctttatgtatagctaagggattgtgaatgcaccaatcggcactctgtatctagctcaaggtttgtaaatgcaccaatcagcactctgtgtctagctcagggtttgtaaatataccaatcaacactctgtgtctagctaatctagtggggacttggagaacttttgtgtctagctcagggattgttaacgcaccaatcagcaccctgtcaaaacggaccaatcaactctctgtaaaacagaccaatcggctctctgtaaagtggaccaatcagcaggatgtgggtggggccagataggagaataaaaacaggctgcccgagcaagcagcggcaacccgttggggttgcctttctggactgtgggtgctttgttctttgtaataaatcttgttgcttgctaaccctttgggtccctactgtctttgtgagctataacactcgccgtgaagatctgtatttgcagctctttcttgaggcccgtgtgaccacgaacccaccgagagcgaaggaacaactccaggtgtgccctcttaagagatttaacactcattgcgaagatctgcagcttcactcctgaagctagcgagaccatgaacccgccagaaggaagaaactccagacacgcagtctttaagaattgtaacaccgcgatggtccgcggtttcattcttgaagtcagtgagaccaagaatccaccatttccggacacaatatgatatcaggttggaatttgatattttagttctacaaagattctgttgtgtcagtccccgttgggcctaaactccgcaagggatgggatataatatcagtgcatgtccaaccgccccgctccactcccgcttcctgtaatggccataactagtttttaaggtttccttcggcagagagggaggtccattcagtcgggtgcgggccttagaatttttttgcttcacacaccccagtttcgcaatgtccagcccttgacaaccaacagagcacctgtaggagccctgtgaagttggtaaagggttggggttgtaatagctgtccagcagacggggagacaggggttcagagaaggtgggcaaccaccacagcaggacgcagctccctaccgccagggctgggagtagaagccgcagcctccgctccggctcggccccacgagcaccctgcaggtgaaaaactacaatttccagaatgccattcggagcggagttacgaagcggaagcgaggccgggggcgggggggatccgatgcgcgccgctgccgctgcgtgggggtgaggggatcaggtacgctgtccgctggttaagggggctggctgggggctgcggggtctgtcctgggacgtccgcctccctcgcgggtggggcggacgttgagaaagcagcgtttagcagtcatgtggcctgtggtactccaccttcctgatactttcccttcc

SEQ ID NO: 41828 - DNA, 2300 bp, Homo sapien
agtggagccccgcccagccaccgccttcgggtcccggcctccctgtttcatctgccttgacccgcgagagagctacaccgctcgccacgtgcggcctccacagggtagtgggcctcataggactcagccgctagatctgggccgagtttcctccagagacttcactaccgacatggggtgtatcaaagacggtccagagaacatttaccgacctgcctgtttgcctggccggaatgtgaggtccttgagcgcccttgagccatggccttgggcctgccaagattgaggcaggcgtggtcaccgaatacttctggagtggggaagagagcacaatttacgctgtccctgccacaggagctcccactcttgccagggaaactaacctggaggtgggagctccttttatttgttgacctttttttatacccaggggaaaatggcttgccaaatttggagggtgtgttagagatgatctgtcttaatcatcctaaaaaatctaaaaattcggccgggcttggtggctcatgcctgtaatcccagtactttgggaggccaaagtgggcctatcgcttgaggtcaggcgttcaagaccagcctggccagcatggtgaaacgctgtctctactaaaaatacaaaaattagccaggtgcggtggtgcactcctgtaatcctagctactcgggagcctgaggcaggagaattgcttgaacctgggaggcggaggttgcagtgagccgagatggtgccactgtagtccagcctgggcgacagagcgagactccgtctaaaaaaaaaaatctaaaaattacgttggaagcaggtgcctcaaagagatgagcagtagaaagggagggccgctaaaggcaatcggtcagtcacggcctcccagaccctaggaattctaccactgctggagaatctgatcaagcactaattgaaggttcgagttgacagagaaaacggtgatttaaaatagaacccccaaagtcagatagatgattggaatctctttgggtttggaattcaactgcttctcacgtgcgcaactaagtgtgctccagggaaatttgagttactgatattccaggccatgtagggctatcggaagcatgtgaaatatgtatatttgcagggggaaaaagtctagggagaaatacacaccaaaggaatacattcgttcattcatcaggtattacctatttcatgccacaccttgggctctaaagaatcagaactacagtgtagcaagggagaaaaacgggcaagattaaaacatcgtttattttcttcttttatttttctctgtgttttctaaatgtgactagatctctaacaaccaagaaggttttatttattttgaaaaaaactacttttcctgttaaaaggtcagccactcttctgagggcggagtcggaaagaaggtcccatgaacccacctagcgtccaatttcccttttttttttttttttgacagggtctcactctgtcctccagactggagtgcagtggcaccatctaggctcactgtaacctccgcctcctaggttcaagtgattctcctgtctcagccttccgagtagctgggattacacgtgcgtgccaccacgcccggctaatttttgtatttttagtagagacagggtttcaccatggtggccaggctggtcttgaactcctgacctcaaatgatccacccgcctcggcctcccaaacttctgggattacaggcgtgagccaccgcgcccggccccagcgtccaattttcaaagcccctctgctcagcttccagagatcccaagaaactcttaagtggaagtatctcgtatccccacgatgcgaccggtcacaaaacacgcgacccgagacactggaagtggaggcttttcgatggaccaagctgcgcggttttcataccgacccgcggccaggctgtcagataggtggccggccacaatcactgccaccttggacagggacccgtgagctgacggccatcaagcttcataaactggtccgaatccaacggaccgctactgccggaaacggaaagtcctcaagggcgggtgttggaagcggagcggaagcggaaggcgggtaccggaaacggtgtttggtggagcccgcgatggccgaacctgcgtctgtcgcggctgaatctctcgcgggcagcagggcgcgcgctgcacgcacagtactaggtcaggtggtgctcccgggtgaggagctgctcctgccggaacaggaggacgcggaaggccctgggggtgcagtggagcgaccgttgagcctgaatgctaga

SEQ ID NO: 41829 - DNA, 2300 bp, Homo sapien
gcatgagtctgtatgggcaaagacttttggtctggcagcctcatggaccagtggctaatctatagcctggttactcaaatagttgtcctaccccggctagtaggcaaggaaagctaagtaacagctacaaaattcgacagcctaggacttctaggatgggttcagtagaatatacgtgctggcatacacatgaagagtgtgaatgccaggcaagtaggctgctacagtagattggacccatccagggggtctccagagaagtagaaccaataggagatatagatataagagaacatttaatatgggaattggttcatatcattgtagaggagtcccatgatctgcagtctgcaagctggagaaccaggaaatctggtggtgtaattcagtctgagtctgaaggtgtgagaatcagaggagctaatggtataactcccggtccaagactgaaggcctgaaaactgacgatgagtccccaagtccaaagcccgcagaaccgagttttgatgtctaagggcaggagatggatgtaccaacttaagagaaagttaaatcacccttctgcctttttgttccttttcagtctttaatgaataggatgatgcctgtccacaatggtgagggcagatcttctattgattcaaatgctaatctgtcctggaaacaccctcacaggcacacacagaaataatggttttccaggctatctgggcatctgttagcccagtcaagttgacccagaaaagtaactatcacctatttgccatctttcatttaagcccagatacacagactggctatctcagccattccttgggtagcacatccaaacctgtttcctctcagtctctcctttgccttgtgacaaataggttttggaagaagctgcctgtggtcaccctgaacttgttgtgcctttaagagttgggcatgctggccaggcgcggtggctcatgcctgtaatcccagcacttcgggaggccgaggcgggtggatcacgaggttcaagaccagccaggccaagatggtgaaaccctatctctactaaaaaatacaaaaaattagccgggcgtggtggtgggcgcctgtaatcccagctgctcgggaggctggggcagagaattgcttgaacccgggagacggaggttgcagtgagccgagatcgcgccactgcactccagcctgggcgacagcgcgagactccatctcggaaaaaaaaaaaaaaaaaaagagtggcatgtcacctattgtgtgtggcctgcacgtaatgcactaattcttaatccctcgctgatcccagtgtaaagtggagacaccagtacatactcagcctcacaggactgactggtcaggccactcatccccaggcacgcggccaccggtcactgacaactacagaccgactctgccacccagatcaggtgcccagatgctcagtcgctcacacaggtaactactcgctccctacctccgttcccgggactgcggcgccccaaacccggcggtgtctcagctttcccggtccccggcggacggtggccgaggggcggcgcgggtttccagccggtggggttaggccgctgcacgccggaagtggcagctgaacaggggcactgaggtgtcggccggcggggcagtggcccggagcggggggcgggggcgttgatcatgtttccctttgggccccatagccctggaggggacggatcggccggagccggggctgaggagccgacgccccacgaggggcaggcagcagccaccgggccgccctcgccactacatcccggggctgatgcgacccatccccctccacccgcccgaagccctcgccgccccggcgccccatcgctgtccccggccccgcgctccggagagctagggctgcctggagctccggagtcctcaactgcctccgccccgggagagccgtcacctccctcccctccgtgccggcggcccgggccagactgcagggccaagagccggggccgacacggcctcggcgcgggcctgggcggccctggcgctaggctgttcgggtggctgaaagagcgcagcctgggccgcgggctgttcgtggacccggcgcgggacaattttcgcaccatgactagcctctacggttccatccaccccgcggactcggtgtacctcagcacccgcacccacggcgccgtcttcaacctcgagtactcgcccgacgggtaagcgcggcccctcggagggcgggcgcccgcctccgcccggctctgctgccagcggacggccgtcctgggctcgctccccgcgcccgggcc

SEQ ID NO: 41830 - DNA, 2300 bp, Homo sapien
tgaaggaaggaggctgcgaggttccatgaataagtttcagcaaaatagtttctcctctcaccagttttccaccttattcaggtgtgcatccactgctacatgctccaaccaattgctgttgagaccccagagaccccagcaccacgtgtgattaggaagcgcttccatcattgaaatggaatagagtctacttgctcacagtaactcctgtttctattcctttgctccttccttagcaacttcaggtctttcttcagtaaaattttttgctttgtaaacctattttttttcacctcctgtaacatgatatgctgcccttctacgacctttgacataccaatcatctccatctgaaatacttctatccctttcccaaccctatcttgactaatttatttcgtactcatttttattttcatttaggtgccacttcctcagggaatccgtgaacacagtgtccataacagattccttcaagactttatctcaattaacaaatatattttatgcattatttagtaaggctatctactatctagttgaaccattaagtcccaggctcaatgaaaacagtgccattagctggttttgctcagcatggttactcctgcatttggaacatagcaagtgctcaacaaatatacgccgaatgagagaatgaatgaatgaacaactgagtaaacaactagcaaccgagaggcttggtggggtaagaattacattaactatgtcacctcatggtggaactgtgcacattttttcttttgatggcggacttgtgtactgacaagacaaagttttaaatagatacgattttggaaagttccctttaaagcaaagccatacaataaatatttaatcagccaagaaaaaggctgtagtctagcctggggacttcacaaatgacccaaatcatgagagccacgtctctacagtgtcttagtactgtatcttccttgagcaaaggaacgcacttgccccatcatggcaagttcaggtacagagtgcaaggaatctacagctttcctaccccgacacaggtttaggtaggaaaacgcgagcctaggatgatggggagaaagcgggcatttattcaaaatgtatttactgagcacctactgtgtaccagaaagccctagttgtgggctggctctgacaggtccgctgtgtagcttcgggcatttctccttcacagagcccaagtcctgaaggcgagcaagtggggccccgcctgcctgcctcaaaaagctgggctggggattccaagggcgagaatgcgcttcagaaagtgccaggaggcacgaaggccagcggccccaaacggcctcgctaacctcggcccgggcgcggggagcgagcccaggacggccgtccgctggcagcagagccgggcggaggcgggcgcccgccctccgaggggccgcgcttacccgtcgggcgagtactcgaggttgaagacggcgccgtgggtgcgggtgctgaggtacaccgagtccgcggggtggatggaaccgtagaggctagtcatggtgcgaaaattgtcccgcgccgggtccacgaacagcccgcggcccaggctgcgctctttcagccacccgaacagcctagcgccagggccgcccaggcccgcgccgaggccgtgtcggccccggctcttggccctgcagtctggcccgggccgccggcacggaggggagggaggtgacggctctcccggggcggaggcagttgaggactccggagctccaggcagccctagctctccggagcgcggggccggggacagcgatggggcgccggggcggcgagggcttcgggcgggtggagggggatgggtcgcatcagccccgggatgtagtggcgagggcggcccggtggctgctgcctgcccctcgtggggcgtcggctcctcagccccggctccggccgatccgtcccctccagggctatggggcccaaagggaaacatgatcaacgcccccgccccccgctccgggccactgccccgccggccgacacctcagtgcccctgttcagctgccacttccggcgtgcagcggcctaaccccaccggctggaaacccgcgccgcccctcggccaccgtccgccggggaccgggaaagctgagacaccgccgggtttggggcgccgcagtcccgggaacggaggtagggagcgagtagttacctgtgtgagcgactgagcatctgggcacctgatctgggtggcagagtcggtctgtagttgtcagtgaccggtggccgcgtgcctggggatgagtggcctgaccagtcagtcc

SEQ ID NO: 41831 - DNA, 2300 bp, Homo sapien
tctgtcgcccaggctggagtgcagtggcacaatctcgggtcactacagcctccgcctcccaggttcaagcaattctctgcctcagcctcccgagtagctgggattacagatgccggccaccacgcccagctaatgattattaaaggaactctaaatccacatacagatccctcaggaatgagaagtaagcctgtataatgggtgtaagtatttaaattacagacttttcccactactttcccaaaatatgaagtaatagaaaatattgtccgtaactaccaatgttttttatttttttattttacaagataataagcaaactacaaaactaagaaatgaactagaagacattaccaagtatgtacaaaatgaccgtctagattcaaaccagaaaatgcatgcccctgtctctgaacagtacagtgaggtgatctaatggaactgagtatgaattccagctccaccacttactatatctaagaacttgggcaaatctctttatttgagttatagttttttattccttaaatagctacaatatctgtctcacagagggatactgtgaggattaagtaatgtataaaaagtgcttcacagaaggtttggcacatagaaagcattaaaaaatggaagttagtattattaataaataaagcacacttgagctcatgcaccaaagactcttcagatcttcactcaaaactttctttttttttgagacagagtctcgctctatcgcccaggctggagtgcagtggcgcgatctcggctcactgcaacctctgcctcctgggttcaagcgagtctcctgcctcccgagtagctgggactgcaggcgtgtgccaccacgcccagctaatttttgtatttttaatagagacggggtttcaccatgttagccaggttggtctggaactcctgacctcaggcaatctgcccacctcagcctcccaaagtgctgggattacaggcatgagccactgcgcccagccaaaactcttaagttatgtatacttctaaacgagcttcaaaatcgatttctctaatcaacagatcagaagaagcagattcaaatttgtaggcatgagttgctatggcaggcatactggcagcagcaaatgaaggctaacattgataaataatacattctaatagcggattagccaaaggttgttttgagtaaaggcaaacaacttggcacaagtcttatctttctaagaaatttttaaattataacatattagcaacatagagaaaactatgaaaaatataacaaacatctgtgataccactcagctttatcaattttaacattttatctttcacatatttttgaacattacaaacacagttgaagtgccttgtatatccctccccagtcccttcccttctcttcctccccagagggaaccactatccaaaagttgttgttattcccatgtaaatttttaataccatgaattcatatgtatgtaaccataaacactttatagtattgttttgcgttcagttttttctctgtaaatgtttaataagaacccaccatatgctaggcacaattctagatgctgggatagagcacagaacaaatacatgccctcaccaagcttatgtttgtaatgttttcaaattttatgtaaatggtatcacactatataaagctcattctacatttttttcttttctacctcaactttaaatttctgagatgtgtatcagatgctgatgcttttagttcatttatcttaactgatgtatagtatttcattgtatgagtacaccagaatttatttatctattaatatttcctcttgatagacattcgtttccaacttctctctattacaaacaatgctataatgaatcttcttcatatacctccgtgtccacatatgcattaatttctttcttcttcttctttattctttaagagacagggtcttgctctgtcacccagactggaatgcagtggtgcaatcatggctccctgcagcctcaaactcctgggctcaagcattcctcctaagctttctaagtagctgggactataggcacgtgcaactacacctggctaatttttaaattgtttgtagagacggagtctcactgtgttgcccaggctagtcttgaactcctgccctccagtgattgtcccacctcagcctcccaaaatgctgggattacaggtatgagccaccatgcccagcctgcatcaattattaaaaaaaaattaatcttcagctttaccatatattgctcaactgctcttcaaaataatgttataaatttatacttcatca

SEQ ID NO: 41832 - DNA, 2300 bp, Homo sapien
attggtaggtctaccaggctggttaaacaaggaaggcttcctggagggcataacagctgaatacagttatatgccacataacaacatttcagtgagtgacaccatatacaacagtggttccagaagattataatggagctgaaaaattcctattgcctaatacttactatgttatacttattattgttattttagaatgtactcctacttaaaaaaaaattaaactgtaaaacagcctcagggaggttcttcaggaggtattccaggagaagccattgttatcaggagatgacagctctgttcctgttattgcccctggaggccttccagtggggcaagatgtggagatggaagacagtgatattgatgatttttaccctgtgtagaactaggctaatgtgtgtctttgtttttaacaaaaaagtttaaaaagtaaacattttaatagaaaaaagttaataaaataaggctataaagaaagaaaatatttttgtacagttgtacaatgtgtttgtgtttaagctgttattacaaaagagtcaaaagtttaaaaaattaaaaattcatgaagtaaaaaaagttatagtaatcgaaggttaatttattactgatgaaaaatttttaaattaatttagtgtagcctaagtgtacagtctttataatgtctacagtaatggacagtaatgccctaggccttcacactgactcacccctcactcactgactcacccagagcaactcccacgcctgcaagctccattcatggtaagtgccctatacaggcgtaacattttaaatcttttatacagtacttttactgtattttttctatctttcaatatacaaatacttacgattgtgttacagttgcctacagtatttagtatggtaacatgctgtgcacatttgtagcctatgagtgataggctatataccatatataccatataacctcagtgtgtaccatctaggtttgtgtaagttcattctatgatgttcacacaacaacaaaatcacctaaggacacatttctcagaatgtattccatcattaagtgacacatgatggtattaaaaagaaagcaagaattagccagatccaggggcaggaggaaggttgtttcacctagcagaaacaacctgtgtaaacgcctggtatttgaaaaccgtgatcaattttaggaaggtcgttatggtgtttgtggatattgaggttgatttctgacaattatatgtaaatttatcttagaagaagcaccagaattcatttcttctgtaagagattaggataacagcatgtattacagaaagcatcctaatgttaaattaagcaaaaattcaagtgtgaatagtagtttattttttaagtatttgtattaaatatattctcactaaggattgagaagttagtgtaaaataataaaaagtctgaattatagagtattttaagcctattttgtaattttcttgattggtcctaataaaatgttgctaagagattatttgggaaatacctttcagttaaaagatttaaaataatggcaattttatagcaatttttgtatgtaactgtgttctaaatagaaaaagatgttccttgtagcagagcaaatatttctcatgattttgattatgtgtaatgtgtccctctcggcaatcaagtcttcaaaacttcctctatcgcctattaaattctctctcatcatttttgtttcctatagagattctgaagttctttttttcccttctgtcactgttttccaaacacttacccctatttccaatttcaaataaaaatcagtaatttaaagcaaatggatccaattgcaatatgactgtcattaaatcatagtatcctggctctgtgattatgcaaagtatactttttatagtatatcagtcattgggtttacatagtgagtgtgtagtcctttttttctttctttcttgactaggtaatatagtgactgtttctcaaatcaattttcctttaaaaagagattaaatgaaccagggttttgtttttctgcttttatagatttcttgataaccggctgtttgctacctgctctgatgacactacaatagcactatgggatctgagaaaattgaacaccaaagtatgcactttacatggtcacactagctgggtgaagaacatcgaatatgatactaatacaagactcttagtaacatcaggatttgatggaaatgtcattatttgggacactaacaggtttgtgaataggagaccatgttaggattatgaacaaaaacattttttttaaagatggtgaacaa

SEQ ID NO: 41833 - DNA, 2300 bp, Homo sapien
ggccaacatggtgaaaccccgtctctactaaaaatgtgaaaaattagctggatgtggtggcaggtgcctgtaatcccagctacttgggagatgtatattgtacaacatgatgaccactgttaatgacaatttactgttgttattatatataattgaaatttgttaaaagtagattttaagtgttatcatcataaatgttaagtatgtgaggttatatatatatatatatatatatatatatatatataaattagcttgatttagctattccacaatatatacatatttgaaacatcatgtacaccattaaaaaattttattttttttaaaggctgaggcaggagaatcgcttaaacccaggaggcggagttcacagtaagccaagatcgcgccattgcactctagcctgggcaacaagagtgaaactccgtctcaaaaaaaaaaaaaaaagattttcagaacaataaaaagcgagagcatttacctcaacaaagtctaactttaaaaaattctggccgggcatggtggttcatgcctgtaatcccaggcatgggtgtggtggtgcgtgcctgtaatcccagctacttgggaggctgaggcaggagaatcgcttgaacccgagaggcagaggttgcagcgagctgagacagtaccattgcactccagcctgggcgacaagagcaaaactccatctcaaaaaaaaaaaaaaaaaaattctgagggatatacttcagaaagaaaggatcaaaaaaggaattttggagatgaacgaaggaatgatgagcaaaaagattgttaagcatgtatgtaaatctcaatatacattgactgtaaattctattttttttaacagctggaagttttacaactttttcttctggtactcattttcattatattttctcatagaattatatcctgttatatgctcaggctggtgtgcagtggcgcaatcatggctcactgcaccgtccacatcccaggctcaaaccatcctcgcacctcagtctccagctaactttttattttttgtagagacagggtcttgctatgttgccctggttggtcttgaaatcctgggctccatctgtcctcacgcctcagcctcccaaagtgttgggattacaggtgtgagccaccacccctagcctactgatcattcttattggcatcaaaaatatgcacgtaaactgacattaattttaaaaattgttttctgtgaccacagggctattagtgttacatttcttctggatttaatgatcattacaatattattagtccacaattgattaaaacaacatgtattattttaaataataattattaacataaaaagtaaaatttattggaaagacatctcatttttgaagtttcaatttttttttttttgaatagagacagggtctgtctgtctgtcacccaggctggagtgcagtcgtgtgatcatagctcactgcagcctcaaactcccaggctcgcgtgatcctcccacctcagcctcctgagtagttggaactatgagtgcacaccaccacactcagctaatttattttaattttttaaatttttgtagagatggggtcaccatcttgcccaggatggtcttgaactcctaggctcaagcaatcctcctgccttggtctctcaaagtgctggggttacaggcatgagccaccatgcctggcctcaaatattttttaattgacacattgtaactgcacatatttacagggtacaatttgatgtcttgacacatatatgttgtataatgagcaaatcagtattagcatgcacttatcattcctttgtggtaaggacatgtaacagtcgctcttctagctattttataatatactgtatcttactattaaccgtcatcaccctactgtgcaatattaataccctagaacttattcctcctaattgtaattttgagcccattgaccaagctcttctcatcctccctacattttattttgaagggcaaaaaatatgattattactgaaccgttatatttatgataactctagattttgttggcttggtttctcctgtaggtatacagaagatgggtgtccacataagaaattctttcacacacgttttctcatgcgaatgaggttaacaccagattgttccaaaatgttgatttcaacgtcctctggatatctcttaattttgcatgaccttgacttaactaagtctttagaagtaggcagctatcccattttaagagcaagaagaactacttcaagttcaggtaagcttttcttttttggtcaaaaagatttttctc

SEQ ID NO: 41834 - DNA, 2300 bp, Homo sapien
caaaatgtccttgtgttataatttcacttatttcattgccaaaagatgaagggacttgaatcttgttatagttgttccatcctgttaacaagttttcattttgtgtgtggatcaaattctggttagcttggtttctttgaattactggtgccatctcagcaaaggcctgtggttatttttccccttgagtgggagttggtcatattcaagcatcctgttctcttaaaactctccttttaaaaaataaacacttccataacattttgttttggaagtctattaatgcaatcccacttttttccccctagtttctaaatgttaaagagaggggaaaaaaggctcaggatagttttcacctcacagtgttagctgtcttttattttactcttggaaatagagactccattagggttttgacattttgggaacccagttttaccattgtgtcagtaaaacaataagatagtttgagagcatatgatctaaataaagacatttgaagggttagtttgaattctaaaagtaggtaatagccaaatagcattctcatcccttaacagacaaaaacttatttgtcaaaagaattagaaaaggtgaaaatattttttccagatgaaacttgtgccacttccaattgactaatgaaatacaagagacagactgaaaaagtggattatgcatcttaaaaccctttctgtaaatattatgtagctaaagattgatttccagcatctgacatgacagtaggtttcttgttaaccagtttttcttctttctggataattgcatatgaatatttatacatactgaccaaaataaaggcctcaacttggtagtttactgaaagttcttggacaaatagtccataaaagctgttgacctctaaatgcactatggctggttaaatacagtgaccatccttcttccagctgtaaaggatgaagcgtattaagcattagccaggcagtaataaagctaaatagccatacagcagctctgacaatgttgtgctggatattgcagtttgctttcaaggtgcagatgtaaggatttaaaaaaataataatttggcaccaaataaatatgagtagcatccattggcctattaaatcgagtcaggatttgaagggaattgagtttgagaaatgaataaataaaggcaccttggtgcctgaccccctcaatcatgcgtgtgactttgagcactcacaggtgtgtgcagctactcagcccagggcaggtgggttagcctggggttataccttggccctgggaatagacaccattgggcctttggttttgttgggcttccttttgtctttacactccacacaggtggtagaaatctgagttctaaagcacttttgtgaaatacaagctaagtgagaattctaaagaaaatgctttggtttctgctgtctcaaataagtggcatttaaaaacaattattaataaatatttttaatggttttaactcagtatttttttttatttctttgtcactctttacagcttttgaagaccaaactgcaaatacattaccagggatggttttgtgttgtcctatagacttcttaaatttgacaaaaaatttagcagaacttgtaaccaacagctttgtctgaacttgaagtcaaaatgtgttgttaataagagattctaactattgcttttaccttcagtgtgaactagtgtggtaacaactttgaaaaggcaggccgggtgcggtggctcacgcctgtaatcccagcactttgggaggccaaggcgggtggatcacttgaggtcagaagtttgagaccagcctggccaacatggcgaaaccccatctctactaaaaatacaaaaaactagccgggtatggtggcacatgcctgtgatcccggctacccaggaggctgaggcaggagaatcgcttgaacctgggaggcggaggttgcagtgagccgagattgcgccactgcactccagcctgggcaacagagtgaaactctgtctcaaaaaaaaaaattgaaaaggcaaatgtgattgaatatctgaaaagctttaaaagtggcctttctgttacgtctgtggcacaaatggctcatgagcgcaggacacttatggtcttgtgtcctatacttcatgtgtgatgccaccagaaatgttatggattccgtattgaacacactgagagtggtatgagccctcaggactgcaccacagagtaaacacaaccttgatatggtggcgaatatgtgtgtctttcttgtttcatttgtggttggggacaaaatcgatgtatttgtctaaatagt

SEQ ID NO: 41835 - DNA, 2300 bp, Homo sapien
ccttcttgctttccccatctgacactgtggtgggggttgaagccacaggctgctcctcagggatattgtctccagcctttgatagcttcttggcccgctggtatagctcatttaagttaaattctcggatcacattctcctcagagaaggtccatgagacagcccgtcctttcttgtcagtctgtggctgccgcattaccttcttgccaccttggaacaggatcagggtagggagttgattggtgaggggtgatgtgctcactttgtaccgcgtactaacatcagtatagcgtccagcatccaccgtcccaaaatttagccctgtacagttgtacttaagggagaggtcagcatagataggggcaaatgattggcagtcattagaccaattggcaaagaactccacaatccaagtgaccctgttgtcccgttctagttcctcatcaatggttttatcattgaagtacttgatatactcagggcccatatatggggaggggggggtttgcacgtcatcaggaacactatgcagagtgtgatgtaaagtaggcccatgcgaatatccaagcggaagaaaagaattgcgttggccactttactaaacatgaaaatgttgcctatatgttgctccacagtgatggatctgcggttcttcatcatcacaatggcactgagaaacatcaggatctccgcttctctctccggtttcgggcaactcctttggggttccgagtcttctctgaggcccacgttgggcgccgtattattgttgccaaaaagagtgaaactcacagtgaaaccccatctctactaaaaatacaaaaaattagccaggcgtggtggcgggcgcctgtagtcctagctactcgggaggctgaggcaggagaatctctttcttaattggccaaatataagttggtgtcgtaactccaggccacagtgagttatgggcaaagcttttttccttaagcatcaacaaaataggataaaaggttccaataggaaaatacaaggttttttttttttttttttttttttttatcattacctaagagctttaggctaattgcctggtaaatagctgtccatctgatggcctttgacagggaacctaatccccaagataggattctttttcttaaaccaatcttgaaatcgcctgcattgaaacataagtggctgtgaccggccagaggagaaggtcctcaggggccaggggctcctcaggcttcctttgttactccattgcttgcttctctgccctcaggagcagctgcagaggacagtcttcattaagctcaagcatatgacaaaggggcagaacagaaaagaaaaacagcttattaggtataggcttttcatgataaattgcttgtattagttttgaaactaagcacctattggataggcattatactatttctatttagatatggtagatcaaggagctatgaaagttcctgttttgctttctaggtttgaaagttttctgtttgattctgactgtgatcttcaacccttccaaaatgtccttgtgttataatttcacttatttcattgccaaaagatgaagggacttgaatcttgttatagttgttccatcctgttaacaagttttcattttgtgtgtggatcaaattctggttagcttggtttctttgaattactggtgccatctcagcaaaggcctgtggttatttttccccttgagtgggagttggtcatattcaagcatcctgttctcttaaaactctccttttaaaaaataaacacttccataacattttgttttggaagtctattaatgcaatcccacttttttccccctagtttctaaatgttaaagagaggggaaaaaaggctcaggatagttttcacctcacagtgttagctgtcttttattttactcttggaaatagagactccattagggttttgacattttgggaacccagttttaccattgtgtcagtaaaacaataagatagtttgagagcatatgatctaaataaagacatttgaagggttagtttgaattctaaaagtaggtaatagccaaatagcattctcatcccttaacagacaaaaacttatttgtcaaaagaattagaaaaggtgaaaatattttttccagatgaaacttgtgccacttccaattgactaatgaaatacaagagacagactgaaaaagtggattatgcatcttaaaaccctttctgtaaatattatgtagctaaagattgatttccagcatctgacatgacagtaggtttcttgttaaccagtttttcttctttctg

SEQ ID NO: 41836 - DNA, 2300 bp, Homo sapien
tcaagcatttctagactaagttttaggacttcaaatattgattaatcttagcttgtaagtgtactaataagagtttttaactcatacctatcagctgaatcagtaaaaagtaaggatgtagtagaactaataattatcaaactcaataccctaacagacttcagtgtctagaacatatcttgaagttaatcatattaagccccaaaactctgtacattaagaaagggagaggagagagggaacagatgatattctggaaccttttttttccctttaatcttatttttactgtgaataacaacactagactcactgaagattttgggacacttactagcaagcatagttaagacaaaatgccaactctcttaaatagtaataagagttttgctcaaagaaaagtacacagccttaaacagtcaagttatgaaataaaggataaaaatagttgtctcacttaagaattacaagaaaataagccaggcacagtggctcacacctgtaatcccagcactttgggaggccaaggcaggctggatcacttgagctcaggagtttgagaccagcctggctaacatagtgaaaccccgtctccactaaaaatacagaaattagccgggtattgtggcatgcctgtaatcccagctacttgggaggctgaggcaggagaatcgcttgaacccaggaggtggaggttgcggtgagccaagattgcgccactgcactccagcctgggcaacagagtgagactctgtctcaaaaaaaaaattttttttttaaactaggtgagcatggtggctgatgcctgtagtcccctttgggaggccaaggctggcagatgatgtgagcccaaggagtttgagaccagcctgggcaacgtagagaaaccctgtctctacaaaacatacaaaaattagctgggcttggtggtgcgggcctgtggtcccaggtactcagatggctgaggtggaaggattgcttgagcccaggaggtcaaggctgcagtaagtgcagtgaactgcgaggtagccactgcattcagcccaggtgacagagcaaaactctgtctcaaaaaaacaaaacaaaactgagaaatagtaagattggtaattcacaagctgctgctttgctaggagtggtaaggttataaattagataaactgataaccctgctcaagaaaaaagggaacataagtacacaggttagaagtaattttttaaaacagcaagtgttggatgggtgcagtggcttgtaaatcccagcactttgggaggccaaggcaggagttcaagaccagcctgggcaacatagcaaggccccctctctgctaaaaaaatgttttttaaaagttagccaagcatggtggcatgcgcctgtggtcctagctactcaggagactgaggccccaggggtccaggctgcagtgagccatgatcgtaccaccgtactccagtctgggtgacagaacaagaccctgtcatttttttttttttttctggatagagtcttgctgtgtcgcccaggctggagtgcagtgctgtgatcttggtttactgcaacctctgcctcccgggttcaagcaattctcctgcctcagcctcccaggtagctgggactacaggtgcgtgccacgatgcctggctaaattttggatttttcgtagagatggggtttcaccgtgttagccaggatggtctcgatttcctgacctcattcatgattcgcctgccttggcctcccaaagtgatgggattacaggcgtgagccaccacacctggccaagatcctgtctttaaaaataaaaataggctgggagcagtggctcatgcctgtcatcccaacactttgggaggccagggtgggaggaacacttgagcccaggagtttgagaccaccgttgacaacatagtgagaccctgtctctacaaaaaaaaaaaaaaaaaaaaaaaaaaaaaaggctatataaattaaaccagaatttttttttttttaaggaaatccagttatcaaaattgactcaagaagagagaacctaacagaacaataacaatggaagaaattgggaacattatcacaaagctatcatcctgccaaactccaggctcagatgtcacaggtgaatgcaattaaacttcaaggaacacatcattttgataagatttaaattgttctacagtatgatgggggtgggggggcggggaatcacatattctttttacaaagccagtggaacattgacactggcacttgatgtgaagatagtattaaaactgaaaacttatctgagtgccaaggctta

SEQ ID NO: 41837 - DNA, 2300 bp, Homo sapien
acaacataggacaggatgtcagaagcgccccaaactttggggcatgggaaggcaggggcaaggacagtcaattttgcctgagatgatcagggaagccttctaggagggagaggaggcaaaaggaccttgaagggctatttggtgaagggctaacatgtatcagtggtgaaagggggaaacaggcttaaggaacacaggatttgcaaaacactgagactgcatatggctaaagcacagaatatagttggggttgaggtggacagactggcaaaagggccaggacaggacagccccgtgcaccgagttaaggagtttggatttactgggggaaccaagagggaaccaagggggaaccattggagatttttaagctgcgggatgacatgatcacagctgggttggaggatatctggcagctgacctagtggttggaggtatggaatgcaggaatgggtggatgaggacagaaatgaagggctaactttaagatggatctggtatccaaaaatagagggttttcatccccaacattcatatgcccaagaagagccaatgaagggcctgggggtttctgacaaggaactaagagctggaggggcagaggactgtgctgtggcctgcagcagcataaaagaagcagactgggctcagctccagacctcagttttcccgttagcctgggattttctgagtctggtgtgccccaattgtgtgtttaatttcagtcttttccttcttgttcaggttttaccgcaggagaataacctctccattctaatctgaaattaattatttatgcttatgaacacgctggatgcctgcctggtttatttatttttcaaataatgcatctgaataggcattcacacaagacagggcaaacataattttgaggcaaaggccctttccaactgttgcccgattaactgttctaagccattgtgtagccttgtccttatcctgcggagtccaaaatttatccctcgcgtactaattagatggcaggtgtctgtgtctgacagtcaagattcgcattatccagccccaccacctgacccttacaatcttatctcctgctgctatgactttctccactgggccaaattccactcatccatcctccaaggcccagttcaaacgtctgctctgtgaagccatctctggttctccctcgaggggggaggtcccctcatgcttctgaatttccagtcttttgttgttgtatccttcatcagacgctaagctccccaggacctggcacgcagtaggttcctcaatggagcgtttgctggaatgggggagggtggtctccagcttcccgagaggcacctaagcacgccagccaaagtggggctgggcagagaccagacccgcttttggagtcagtgtctacaaagtgctctcgggggaagggggcacgcggggaacgtcgcccacccggagccgatccccccaagaacgcttcactcgggtggggttactgcttgggctcgccccaagcacagtgcgcacacttcacacatccgcaagcctcctgaaacgcctctcccctcaggccgacctttctgtttccttcaacgcctcccatctgttgtgtgcgttccagtttccaactcagagtcagaaccatcatttccaaagactcctgcaacagcccgaggacgcatacaaggcatgggttacttttcagacggagatttggggctcagggtccagcgactcacccaaggtcactctcaagaagtatgagggctatgactttgacccaagccttctaactccccgggcagcgctcctcccaagccccccgcaagctgtctgagcttcaaaggaaaaagtttaaaagtgatccatacgtcccaaagcacgcacaaagcgttcttctgtaaactgcggcatgggtcgctgataaaaggtccctctgaaggtttgaagatactcaacaaggctccacagagggtactttggagttttccgcgaaggcgctcgccccgcagaaccgacaaggcccctaaaaccgacaatgcccagacgccccctgcaggcagcgcgctagagaacgcgttggctgtttctggcacgctgaggccaccgtacggcatcaagggtgaagcatggtggctagcggagcccgcatcctgacaggtgtgctggcgtggccctctacctgccccgccgcggcggcctgcggccaggagaagtaggctggcgacatctggcgggccgcgggccgagggaggggaggcggggcggggcggtgtctccctcacgtgaccccaacagcgcccagcgcgtcgcgc

SEQ ID NO: 41838 - DNA, 2300 bp, Homo sapien
ttaacacacattgagcatgaaacagacagggcaagctggtgaccaggagcaggagactgagcacaagaaaccccttcctcatcagagtccacaggaagcggtgggtcgccagatgccttcatccctgcacagagagccagcaaggcgggccagaaatggaggcccagacagggacagaggcatgctcaaggccacacagcaagtccctctccacatgccttggggtgcttgagggcgaccagctccaagggtcgccttggccagtgcagctctgggaagactagggtagggctgggggattcttctcagagttgatgagccatttctttcctcattggctcccccaagtgggagcatcccaggcctgtagtgactggtgtcatctctggcttgggggacagtttcctaagctgtgatctgaccaggatggcaggaagccaccagtgtggctctagtgccctcgtgtggttttctttagtattgcagccagtcccagggagcagaaatgccacctccaagtcaccctgtcagttacagaaggagaacttctgcaggcccagagaaggaagaggaaggcatgtaaacagataaacggcaggcagtgcggagtgatgaatgatgggtgctccagcagaagagacagtagaagtggcatctgagccaggcctcaacacgcagggagtacgggcatcctaggcaaaggaaacaacttcagcaagagctgggaggctccctctgactcccgatccaagcttttcccactgcagtgtactctaaagtcaagcccattcatgcccactgggaagggaggtcaggccgaatcagaagggctcagtacggaacaattttatgcaatattatttcaaagttactgacttccaattataaaattaatgtgtactttgtggcctggcgcagtggttcacacatgtaatcccagcactttgggaggccaaggcaggcggatcacttgaggtcaggagttcaagaccagcctggccaacatggcgaaaccccgtctctactaaaaatacaaaaattagccagccatggtggctggcgcctataatcccagctactcaggaggctgaggcaggagaatcacttgaccccaggaagcaaagttgcagtgagccgagatcctgccactgcactccagcctgggcaacagagcaagactccatctcaaaaaaaaaaaaaaaaaaaccacacaaagtttgtgcttgtggctgggcacggtggctcacacctgtaatcccaactctttgggaggctaaggcaggcagatcacttgaggccaggaattcaagaccagcctggccaaaatggtgaaaccccatctctactaaaagtacaaaaattagccgggtgtggtaatgggcacctgtagtcccagttacttgggaggctgaggcaggagaatcgcttgaacccaggaggcggaggagccaagatcgggccactgcactccagcctgggtgacagagcaagactctgtctcaaaaaaaaaaatttttttttacttgtattagtaatggaaatttgtatttcaggaaaacataaagaagaaaataaaaattaccctaaactcaaagaacagtacattcacgttctgaagtatcacctcagtctttttctctatgcacatatataattattttaaattaaaattgggctcaagccatgtttacatagttctatagcctccatcttctgcttaacacagtgtcgtgtcccttttcctctgttattaaatctcctacaatatgatctttttttaaatagctgtatcgtattttctacctaaatttttttttttttaaaaaacagagtttcactcttgtcgcccaggctggagtgcagtggcatgatctcagctcactgcaacctctgcctcctaggttcaagcgattctcctgccgcagcctcccaagtagctgggattacaggcgcctaccaccatgcccagctactttttgtatttttagtagacatggggtttcaccatgttggccaggctggtctggaactcctgacctcaaatgatccgcctgccttggcctcccaaagtgctgggattacaggcgtgagccactgcacctggcctctaccttaatttaacttattcaaatttttgtataaccagctctgcagggaattgttcagaaatctttatccatatttctggtttttttgtaaggagaaattaatagacggggcattatgaggtcaaaggttaggtacatcttcaagacttcctgtcctccagagatgcgtcagttcctcttccactgctgtgt

SEQ ID NO: 41839 - DNA, 2300 bp, Homo sapien
catgttgggggcctgctctggagtgattcctcgacccccccaacccccgcccccgcctccgcaggaacttagttgccactcctccctcccttctccttttcaagaatgtggctgtctgtctccccagctggcccccttcctccccgactctccaggactccagggctttggttcacctcttcccctctcccccacctccccgatacatcccagtgtcccagaatccacacctccaactgtcaggctccctcagagcattgacaccaacacccccatgccccagcatacacatgcacgtgcacacacacacacccggggaacgcctgtgctcggggagggcaaagccctggcacagggtcctggtgacagaaaacattcctgagcttggtcaggaccaaggggccacaggcaatgccagtgctctgccaccgggaatttcctgaagggagggaggaaaggtcacctctagaatgtgttctgcgtggtggtgggtggcggtggtggcgggtatttctctttcagttcaatttaacacacattgagcatgaaacagacagggcaagctggtgaccaggagcaggagactgagcacaagaaaccccttcctcatcagagtccacaggaagcggtgggtcgccagatgccttcatccctgcacagagagccagcaaggcgggccagaaatggaggcccagacagggacagaggcatgctcaaggccacacagcaagtccctctccacatgccttggggtgcttgagggcgaccagctccaagggtcgccttggccagtgcagctctgggaagactagggtagggctgggggattcttctcagagttgatgagccatttctttcctcattggctcccccaagtgggagcatcccaggcctgtagtgactggtgtcatctctggcttgggggacagtttcctaagctgtgatctgaccaggatggcaggaagccaccagtgtggctctagtgccctcgtgtggttttctttagtattgcagccagtcccagggagcagaaatgccacctccaagtcaccctgtcagttacagaaggagaacttctgcaggcccagagaaggaagaggaaggcatgtaaacagataaacggcaggcagtgcggagtgatgaatgatgggtgctccagcagaagagacagtagaagtggcatctgagccaggcctcaacacgcagggagtacgggcatcctaggcaaaggaaacaacttcagcaagagctgggaggctccctctgactcccgatccaagcttttcccactgcagtgtactctaaagtcaagcccattcatgcccactgggaagggaggtcaggccgaatcagaagggctcagtacggaacaattttatgcaatattatttcaaagttactgacttccaattataaaattaatgtgtactttgtggcctggcgcagtggttcacacatgtaatcccagcactttgggaggccaaggcaggcggatcacttgaggtcaggagttcaagaccagcctggccaacatggcgaaaccccgtctctactaaaaatacaaaaattagccagccatggtggctggcgcctataatcccagctactcaggaggctgaggcaggagaatcacttgaccccaggaagcaaagttgcagtgagccgagatcctgccactgcactccagcctgggcaacagagcaagactccatctcaaaaaaaaaaaaaaaaaaaccacacaaagtttgtgcttgtggctgggcacggtggctcacacctgtaatcccaactctttgggaggctaaggcaggcagatcacttgaggccaggaattcaagaccagcctggccaaaatggtgaaaccccatctctactaaaagtacaaaaattagccgggtgtggtaatgggcacctgtagtcccagttacttgggaggctgaggcaggagaatcgcttgaacccaggaggcggaggagccaagatcgggccactgcactccagcctgggtgacagagcaagactctgtctcaaaaaaaaaaatttttttttacttgtattagtaatggaaatttgtatttcaggaaaacataaagaagaaaataaaaattaccctaaactcaaagaacagtacattcacgttctgaagtatcacctcagtctttttctctatgcacatatataattattttaaattaaaattgggctcaagccatgtttacatagttctatagcctccatcttctgcttaacacagtgtcgtgtcccttttcctctgttattaaatctcctacaatatgatc

SEQ ID NO: 41840 - DNA, 2300 bp, Homo sapien
cacacacacacacacacacacacacacacacatcccttagattatttcctgtgaaatgctaagtaaatagatctcaggcaatgaagatgctctgtagctggtgatagtatctgcgactgtgagacgtcacatagtgggtttggaaaattcaactggccacagaggatgacagttttgtctgaccaaggagggaaagggcaaatagcttgattctggaataacaaatttgaagtcaatttcactttaccactgtgtatggctgagcagacagaggtcagcttcaggataagaccgagttcaagtcctgcttctatcacttctgtgctgtggcctcaggcatgagtctgggtgggttacagagaggaagcagtaacagctctcaggccttccctgtccaaatgtctcagattgaaatctgagtttgacctctacttccagcgtggccagaactatgatgtgatcaaaagagcccctggccttgctgtctgccctcacagttcccactgttactacaggatatgggaaaaacagactcccccaaagcacatctataacagacagacagcaaatgcagattattgatttgggctattgttttagtaaatcaacattcttagagaatttctcagctctcaggtgcccacatcttagagttaagtcacattttgagggttgcccaggcaaattcaaagcagcaccaggccctagtggcagctacttcatctttaggcagcatttccctctcaacagggagcatgccacctcccctgggtgcagatcccaggaaaagttacactgaccaaatcaggccactccctgggactgtttcctcaattttggttaataatcaaaggatgatctgaaatcgcaaagaagagactcttggaaaagacataattatggtgccacccgacttaggaactggcatccaagtccacctgtgtgactttcctctgggcctcagtttctccatctgtaaaatgaggtcctgtatttattttttgagacggaatctccctctgtcgcccaggctggagtgaagtggtgtgatctcggctcactgcaacctctgcctcccaggttcaagcaattctctgcctcagccttccgagtagctgctgggattacaggtacccgccaccacacccggctaatttttgtatttttagtagagacggggtttcaccatcttggccaggctggtattaaactcctgacctcgtgatccacccgcctcggcctcccaaagtgctgggattacaggcgtgagacaccgcacccggccgaggtcctgtattaaatggatccttgccagctcctacaacataaggcattaaatgttcccacaacttgctccccgccggctggcagcgaacagggctaaagcctcgacttcctcagaggtgaaaaggtaagcaaacattccgacctcccctagccttgctctcggattggtgctgggcccggctcccaccgcctatcccgaccacatccgtcatctggactgctaatacactcattagcataaagattcctccgaagacctggcgcacggggctgaaccggagtctgtccctttaaggaagagggacagccactctgtccctaagggcactaggcactgcatttcctccacacgggccacgctgtaaactagacaggttccgtgttaatccactctccctcctcaaccccgacagggggatccctggagtgaacaacgcgcggggtcccgggggactgcggaaaggtttggcctctgcgcgtagcaggctccgccaggcaacctctcgcccgaggcggcggcgagctgcaagctaggtggagccggctgcgcggcgggaccccagcgccctggggcaagaccctggtgctggcgccagggcagccgcgggaggtggcgtgtgcaggagcggagaggtgcgcccaccccggccccgggcgcgaggggggcggggcttgggccgcggcccggggccaggctcgcggggatgggcggtgctgggtctgcgggagcgggcggggggcggggcgcgcgagcgggctccgggggggcggggcggcggcgcggggcgggctctggcggcctgagtgtcacacacgcggcggctcgggaggcggcggcagtggcagcgacaggcgccgccgggacgggcacgggcgcgcgggctccggcgggcgccggctgccttcctccgtcgctcgctgtctctcccggccgcattctcctccgctgcggggccgagctctccccagcgctcgcaggaaggaagaagggagccgaggacgccgagaagttc

SEQ ID NO: 41841 - DNA, 2300 bp, Homo sapien
atatatttatgaaaggactagaaagctgttactgtatctccaatttgtcaaactcggtaaaaacccaactgaaaagcaaagttgatagaatgactttgataaatgtcattttcaatttttttggttttccaaggaacattgctatatcagttcagaaaaaagtcgaaattacaattgtaagattaaaaaagggggcatgtgggagagcgctgggtttcgaaggcttgttctcagtaatgtccagcctcaggaagccatgcctggagatcattttttaaaatattttttgagatggagtcactctatcacccaggctggagtacagtggtgcaatgttggctcactgcaacttctgcctcctgagttcaagtgatcctcctacttcagcctcctgagtagctgggattactacaggtgcctgccactatgcccagttaatttttgtatttttagtagagacagggtttcaccatgttggccaggctggtctcgaagtcctgacctcaggtaatctgcctgcctcggcctcaaagtgctgggattacaggtgtgagccaccgtgcctggctgcttggggatctttggggctggtgttgcctaaaggattgggctttgaggctgcaggagtcccagaaggttttgttttgaaaactggggcctggctgggacccctgagggtggcctgacctgcctcctgggttggggaatcctgcacaaaaggcattcagcacagctcctggcacaggagaactgctcagtaactattgaatataattgcgatgttctggggtgtggagggagagggcttctgggccttctcttggcagtgtggttgggagtcggaggaagagtcacatttggaaagtgaggtatggtggggagtgtattggtccctttatctgctttctttctttttcttttcttttcttttcttttcttttttttttttttctttttaagacaagagtcttgctgtgtcgcccaggctggagtgcaatggtgtgatcttggctcactgcaacctctgcctcctgggttcaagcagttcttctgcctcagccttccgagtagctgggattatagacatgcgccagcatgctcagctaatttttgtatttttagtagagatggggtttctccatatttgccaggctggtcttgaactcctgacttccagtgatccacccacctcagcctcccgaagtgctgggatttcaggtgtgggacactgcacctggcccctttatctactttctaattcctccataatatgggcttccagggccctggttgggaaaggagtgtgtgtgtgtgtgtgtgtgtgtgtatgtgtgtgtgtgtgtgtgtcagggcatctaaaacagggaaggtttagggaggaggaagagtcaactcacatttattaagccgttactgtactgtatgtttaccagacaccatacaaagcatgtgatatggtttggatgtgtgtcccctccagagctcatgttgaaatgtgaaacccagtgttggagctggggcctagtggaggtgttcgggtcatgggggtggatccctcatgaatggcttggtgctgtcctcttgggaatgagtaaattctcactctgttcgttcttgcgagatctggttgtttgaaagaacatggtgccctccctctctcgcttccgctctcgccatgtgactggcctgctcctccttcaccttcctccatgattgtaagcttcctaaggcctccccagaagctgagcagatcctggtgccgtgcttgtacagcctgcagaaccatgagacaaacctcttttctttataaattacccagcctcaggtattcctttatagcaatgcaaaggaataacatagcatataagaactaaaccaaagaagtaacacagcatgtaagaaaaaaactaattcacaaaagaggttaggaggtaactggactaagcatttggaccaggcttttcttcttgaccctgaagcctgagcaggaacatctcctccatttcctgtggacctatagaaagatttcctccaccatgtttcttaagagttcaagcctagcctggcctcaggtaaggtctcaagaagcagaattttccgggccgggcgcggtggctcacgcctgtaatcccagcactttgggaggccgaggcgggcggatcacgaggtcaggagatcgagaccatcccggctaaaacggtgaaaccccgtctctactaaaactacaaaaaatagccgggcgtagtggcgggcgcctgtagtcctagctacttgggaggctgaggcaggagaatggcgtg

SEQ ID NO: 41842 - DNA, 2300 bp, Homo sapien
cccctctttctcgaaatgctttccttgcctccttgacacctggctctttctatttttctcctctccttaggctgtttctccttgtctccgccaattcttctttcagctcctgaagagtttccaagggagaggacttggcagctgtctgcatatgatgtccttgtgcaaacctgcgattgagatcccagggaaggggctgtcagcagttgaaggggtgactagccctgtgaatgtacgcttaagttttggtgccttctggatgtccccaggcaggaatctctgccttctcacctcctttaccctagataaggcagcctttcagctgagctgaattgattcaagctctcaaagtcatctgattaaggggacagtacctgatggcatcaagcaaaggtgtcaggggtcttgtgatggagacagacacgagttcgcccggcacccacacaaaaagaggagagctggatttgggaagaggcagttatagtcactgtgaaaggcagtgtgggagatgcacctcattgctacgggaactcagaggaggaagacatcaatccagctttgaggtgaggcttcaagtagacttgacaacctagctggggagatgagctgtatgaatccacacatggaaactaaccaaaggcatatgttctcagaggcatcagagttacaaataagttctttgagtatcggaagaagaaggcatttttatcctacttgggaatgaaggtggcaccacaatttcctggatggagtgaatttgatccatgccttggcaggatggaagcagagacgaggtggaaatagaatgactagggaagagagtgagtggaatcccagggcagaaatgcatgcagtatgtccagtgagcagtagatgatccagggtggttggagccttttggtgatggggagccatagaaagttcttgaggagtagggtgatgggcttggaggtgtgcagtgattggcgagttgcttctcatagcagtgttgggactgccattagctgaaagtattaggtttgggaaaggtgaaatccaatctgcatggactcatcagcaatgatttctgggctagtgaagggggaggaagtctaaccctttggaaagcacttgcttgaggcactgatgcacagctcctgcatagcggatcctcagtctttctaaagatgccgttttaacctagtttcctggaactcgtacaactgaatacagtatttgatgtttacaaaattgaattggaaaatctcaaacaaggcagaaaaagctattatttcaagctttctgttggctctgttttagcttgtgtgtctagtggctggagaggctgggaaaagaccgtggtggaggagctaggtggctggaggcagggaagacaaaggattcagttctggacgtgttgaggctgagattcatggtggcttgcaagtggagatatccagcagactgtcgtgcttataaatttgaagcttcggatagtggtttaggagtatattagccagcattcttctagttatgagtcataatcctaactttaactgtctcaagtcagaaaagcaatttattggctcttgttagtggaaagtccaggggttggttggttctgatgttaggcatggctggacctaggggttcagtgatgtttaatgatgtcagttatagcctgtctgtccatctctctgtctctccgcatctcagttctgctgggctgtatttggcttcattctgcatgtaggttctctccaccagataaggcttagtgtctccaggggaaagaggctaatttctgccagcagcagagttctgggggaactctgattggcctggatcaagaatgaataagagtgccccagtcctaaagttagaggacagggccattgtgattggcagttcccctgtgaccatgtggaattgagaatgagcaattccccaaagcagaagtgaggtgtcattcctaggaatgtatgctggatcaagaaacagtacagcatccacaggctgtgtcagggtgtcttcactacacaagtgaggattctgcagcacaaatagatgagatcatctagggagactgtatatagataagagagagaagggctagagcttaatctgccagagttcagggaggagactggccaggaagaggcttccaggagctgggagagtctggaagggtccagggtgatccaagcctcaggaggagataatgaggaagtaatcctcttcagagagctccagtgatatggtaatggaaaagtaattttacaaccgagtgactggagagcttggaaaaagctggggacaag

SEQ ID NO: 41843 - DNA, 2300 bp, Homo sapien
tatctgtccttccctgtactcctccagtgatgggaggcccactgcctttcaagggagcccctcccagccttagccagttctgctttttctgggagttattcctctgtattcttcactggtctggctctgccttctaggaccccacagatcctatctggttttgcccttcagagatttggacggcacagccttgtctttcaagttctaaagggtgaacatcccagttccttcagctgctcctcaaggggcacagcctccaaccttgccgcatgggggtcacttcctgtctgcagctggcctctcagacctgccacagtttccaatgcactctaacacgaggactgatactcattttgccataaactcactccctctatcaatgaggcctcttaaggattggtcagttaatcattaagtcaatcagtcctggagtgctatgccaagtgcccaaggggagctaggctgtccacgtgctgtgggggaggcaggagggccttggcaaggggctcatgccgttgctggagaaacccgaggaaagcatgggcatcaaggtgataagatgccaatcatagtgccttcatggatggctaacttttgcagcaagggctgtgaacatgctaaggatgatatggtagcaaaagattccatagagatgtagcttaaggaaagaactaagtgaattaggtccaagcagtcgcatgtgagcaccctagatcagtggagaggcagggatttaatacaaggaactgggtgcttacagacctgctgcaagtgccggaggcagaagcaagccttagccagaccaggaccaactctcaggacaatatggacgtggcccaccagcctcgtgcctgtctgaggctacttcagacaccctcctgcagcctccattcaaagagcaggaagccaggtcaaggagcggctacagccacagcggccggtccacagccagaaagctggagaagggacaaggaatgctgccgcagaacatctcccatttctgctatcctgctagtgccaccctacaggggcaggacaataccctccaatgcgtgcccgccttccacatccggcagagtactactaattggcagcacctagtccacatccagaactctaactgcaaatgaggctgggaaacatggcggttagctttgggacctccctagccagaaggaaggtgcagcgagggtggagcgagtgagatgcatgttcagtggtccatcttggcaacctttatagcaacaaaatggagacaattaaatgtccaacagtttacccctacaacagaattctatgccaccttggagaggatgatgtcatctgtaattagtgataggagaaaacttcaaaatacagcgctaagtttttaaattttttttaaagcagcacaacagaggttactatatgattttatttttattaaaataattttgaaagatgcagaggaaacaatactagcaggacgaacaccgtaataatggctaccgtaggtgaagagattacaggtgatatttttcttcttttttcatcctttcctgtgttttccaagctttctacactgtgcatacattctttttgtccttaggacaaaaatgtactttgaaaaatgcccaaatataaaatcttcttgaaggaactgaagaaaggagcagtgaaagtggaggacagaaattagtgaatcctggacaaaaaaagtgagggagaggcgaggcagagaaggggttaaggggagtctcaaggatggcagtcgattaagcagcgtcttgcagcggggagaaatgcaaagtgtagttggggttcggtctccgaaaactttgctgtgtgacctggggaagcccctgcccctctctgggtatctctgtttccgctcccaaaccagtgccttaggagcctagatctgagcaacgtggacactgggcttgcggagacccgagggagggagcgctgaagcggtgcgggctgccgggggtagaggggcggggaccgggaaagaccgggcggggcgagggaggagcggccttggccggcgacaggacgtaggcagcgccccaggcgcaggcggagcctcattggccgctgagccccgggctgcgcggaggcgggacctgcggccagccctgggcggccatgtggacagagctgggagggccggaaccagaacccaagcgtgatcctgaaccggagcccgagcctgctgcaggtaactaacgctggtctcccctcggctccctcgggaagccgcagctcctggctccgcgtgggggctttcctctctgggccgcggcgtccgcatctgg

SEQ ID NO: 41844 - DNA, 2300 bp, Homo sapien
agtttgaggctgcagtgagctatgatcatgacattgcactccaacctgggcagcagaatgaggtaccatctctttttttttttttttttaaaaaaagggtttccttcacatcattaaaaacaatcttaaatttttgcatgtttacacattcacatatttacaaatatgccattacattagatgtgcactttttaaccgctattttactaaacaatgtattataaacatgttttcatttctattaacccatattttctttctaattgttaatgcctgcataatcctctattgttagatgtaccataatttatttaacgattgcctctcggtgggcatttaggtcgttaactttttttatttttattttatttatttatttattttttgctatagtaaccaactccaggatgaaatcttcacacatagtgatcatttttttaggagagattcctggaagagcacagaggggtcaagcggtgagagcactttaaaaggccactcctggtaaagacagcagcctccaggttgaaagtcactgttgataggttctgagagctgcgctgagtgcattaccaacattgttatatttattccttaccaccaccccttcatggtgcctaaccgcccctgctctgtgtggctgattgtaaggtaaggcctggcgtggaccaggcagatggccctcctctgaccaccacataaagtggcctcagaagaggctcctttctggggataagaagactgcaaactgggaaggaactgggcttgaaaagcaaaatgaaccccacccaagaacggtgtagctggtcttcccaggctgcaagaggctttctccatctccaggagttcagcaaagaaaaaacaatagagcacaagacacatgaggggtggccagtaaaggcaggaaaagtctcctataaaacctgctcagcgagtccctccctccatccagtgcatttacccagcaacacatcaaatcccagcagccaagactctcttaggtttctcgtctgggtgccctgccagaactcaggcaggatggtgtgcacagagcctggcccagagaaggcgcaacggcggcatgaataactgactacaagaaactgcatctttccaacatgcattccccagtaagccacaggtacactgacccttgtgcaccaagacttcatcaaagcattattcgtattaaccaaaggatggaaaataagtggttaaataactgcaactaaaccctgtggaaaggccactctgtatgaactccaaaatatatcaccatatctcatcacaacaaagtcactgtggacggagatgtaccatgactttatgcagcattaagaaacacactcacagagccaatgaactatgctcccattgattgtataagaaacccagtttcacagatgacaagaggtggggaaactgtgaaacactgtaagtgcaaaaaccaagtgcagactaatgtgtatggcacgctactctgtgtgtgtgagagagaaacagagtgtgtgtgttttaaaggaaggggcttttttaggcacatgtacttttataggcatagagaaaatttctgaaaagatatacaaaaacccgatagcaagagtggcctctggaagccgagttggaggatggggatacaaggtggtagggtaaccctcttttcatccttagatgtatatgtaaaatctacattttaaaccatatattctctttataaaataaaactttgaaaactactgaatgcaaaataaaattaaataaaatagcgcatccttctgggaggatttacgggcatactatctggagccagccttggatccggagaccgtacggttatccaatcctgactctgccatagcgacctcgggcaagttgtcgccccgactgggtctcggttccctcaagagtccaatcggaggtcggagagctgctctcggggcgaccctccagctcggagacccgggccgcgggcaccgcgcgggtcccgggctggagcagcggtctgcgggcgccccgcggtgcaggcccggccaatcagcggccgcggggcgggagcggtgactgctcggcgggcgcggagcggagcgcgaagcagaggcgccgccgctgtcccggagcaagccatgccgcgcttgtctctgctcttgccgctgctgcttctgctgctgctgccgctgctgccgccgctgtccccgagccttgggatccgcgacgtgggcggccggcgccccaagtgtggtccgtgccggccagagggctgcccggcgcctgcgccctgcccggcgcccgggatctcggcg

SEQ ID NO: 41845 - DNA, 2300 bp, Homo sapien
atttgtggttttttcctgggaaatttcttccctttgaattgagaaagcttacccaatgcctgtaccatcattgtaccctgaaagaaaagaacatccttttaaattcagggactcataggtgcaagggactgtagacttgtctcagatgagatgttgaactttttacatttgagttaatgctggaatgagttaagacttttggaaacttttgacaaggcatgaatgtattttgctctgtgagaaggacatgagattctggggtaccagggtcagaataatatggtttggctgtgtttctttaccaaaactcctgtggaatgtactccttaatgttggaggtggggcctggtgggaggtgatgtaatcatggcaggaggggtttggggttggaaggaaaaggggtgggtagggtgggaagtaggttggcagtagggtggtgggagggtggtgggtagtaggaagggggagtagtctgcttcagaggcagaggctcatgggaaacctctgctagggcagtgcacctgcagctttgcaggcttcagcccccatgtctgctctcatgggctaggctggtgtggagtgcctgtagcttttccatactgaggatgtgaactgttggtgggcttatgaatctggggtctggaggatggtgacctcctgtgtcggggctccaagcccatgtttcccttctgcactgccatggtagaagtttcccaagaggctctgcctctgcaggaggcttctgcctgcaaacagtgggtggtggtgtgggtggtgtttccttcaccagtggttaatcttcttgatgctgatctcctgatagtgagttctcatgagatctggttgtataacaggatgtggcacctcctttctctctctgtcttgctcctactcctgccatatgaaatatctcattgtcgcttgtccttctggtatggttatgagggccctgatcagtgtgggcctcatcagtggacctagtcagctgggacttggtcagtgaggcctatttattggggggtgtggtcagcaggggtctgcttagagagggtctcattagggggatctagtagtggggtcttggtgagtggggacctagtggcagccacttgtttggtgtctggtcagtgtaaaactaggctgcaggactttgtcaatggagacctggtcagctggggcttagtggtggccttgtcagcatgggccgggtcactggtgaccagctcaaggggtgctattcattggaggcctggtcacatgggacccagtcagcagggcctgctggccatgtcctcatcagtgaggcccttgtcagtggggccctggtcagcgcagcctggtcagtggaacctaatcagtggcggcctgttcagagagagcgcattcagtggtggctcttgtagcagtggtctgtggggtgacctggtcagcagggatctgagcagtgggtgcctattcagtggggcctactcactagggtcacagtcaggggcatcttgtcacctatggcctggttaataggggcctggtcagtggcagcctgttccctggaggcctggtcagtggggcctcatctatggtgccaggcaatggggtcatgatcagtggaacctggtcagtgaggccctggtcagtaagaacctggtcagtgaggccctggtcagtaaggtcctggtcagtggggtcctggacactgttggcctagcagcaagggcctggttagtggggcctggtcatggggttctaatcagtgagagtgtggtcagggaggacctgatgtgtgggatatggccagcagggacctggacctggtcagcaggggctgctgagcactgctgggagatgtcaggtgcaatgcacgttattgagggccctgtggacagttgggatggcccagtagtgcccaaagacccagtcaaaactggacaaagcaggtgtttcgatggacctgggagatcttgctcagagattccaacaggacaaagggaaaggaagggccacagtggccagatagatggtcacagtctatgggctgcacaggatggaggaagccagggaacaggcagggtgggcagcagggtgcagggagaggcaggtgcatgctgggaggtcagaccctgtgagggctgtgggggcatcaggcgcagtgggctccaggtgcaccctcaatgcactgggcaggtctcaggccaggctccctggaccccggctgggtgatgtggtcactccctgggggactgctgtcaggcaccgggcacccaccatgggcagcactgtcccatctcaggactggactttct

SEQ ID NO: 41846 - DNA, 2300 bp, Homo sapien
ttaggggcctcgttggggccacctggtcagtaggaacctggccagttagccgatgtgtgacctcaggcagggggtttgtctgtggagcctctttgcctccatctgtagggaaggtgagtcagggcaccctggagggtggctggaaagagaacgtgagaagatgtgttgaattcagcactgcttggcagacctccaactttacacagtacctgggttccacctagaaagggtgccagccctctctgctctgctcggcacccctcctctgtctgcatccccaggaccaccctcagtggagagggaagaaattggggagcacctgtgggaggctctaatcctggccctgggccctggtggtgacagtgatgaggacctgggtgcacctgtgagtggagcagctaggcctggccagagaagcaagacaaacaaacacacccatatgtacacacacacacgcatacacaaacacaatgcatgcacacatgtcagttcaggggatagaggacaccgactctgggccctcttgacccaagcaggctcctgttgtggtgggttgtgtcaccccacaatgtcactcttgctgagtccccatcgcctctgtgttgtggagcagttagagacacgcagcagtctctgtgagtggctctgcatgaaggattgttttctaggtgaaaggcacatctcaacacagctgactgatcggactcaggtgagtgggacctgctctcttctcttcctcctggcttggggacagtcgctatcgggtgggtggttttggcctctgggcagctactgagggtaatccctgagcactcaccaggtgcctgttctgtgctgacagtcatctcattcatccttgcagcaattccattctgcatctcctctggacacccccaggaccaccaggacaaccccatcatggccctgtcaccaggcccagtctcgctccgtgataaccaagatgcaggtccagagacaaccgccctacttggttcctgcatctgaccccccttggtgggtagtgaccagcccaacatggaagaagccagggcagcatgcagccagctgccctgcagccccagatggcacctgggccttgggaagtcattctcaaaggggaagctggaaactttgatgtccctggagggaagggtgaacgtggcatccgaacaaccctggcagccagcagcatcttgtcatccaacctgtgggacagaggccccctgctggggagcgagatccatacctaaagggtcctggcccagttgggcctcatcctgggccctgggaggggaggggcactatggtccccccagcagcagtcagcattaccacccaggggactcagccttctgtggccctggccagagttagaatttggcccaagacaggacaagctcactcagagcagggtgtcagtacccaggacctgtgcatgccaggcaaggccaagctggctcaaagagcaaccagccacctctgcaagggtgtgcctggagcaagtggaccggccaccaacctcacccactcaaggaatcaggggtggccaggttcccacagcctgaggggctgccacttgacggctgatggagcagaggcctgaggaaaagcagatggcactggggccctacctccagggcagaataactgatttaccctgactggcagcgagtgaggttggtggctggtccacctgctcctggcacacccttgcagaggtggctggttgctctttgagccagcttggccttgcctggcatgcacaggcctcaatgcaaccactgtgctgcagatggagccacatagaggaaatgagcagcaggctcaggagcaggctgtgcgctgcctttggggctccagtccatgcatgagggctcctacagcactgtgggcttcttgggtgccaagaggcagaccgcaggccatcttgagaaggactccatgttcaagtgcagaaagggcccaatctcgtggatgaaccacatggccagcttctgggtgcaggcacagtgccacgtcttccatcacttcgtgatgtgccacaccagcactgaagagacagcctggagacagggcaagaggaaggctgcgaaggatgaggtggtgaattccagcttcttcctgaccctgagcccacccccaaggtggccctcaacctttaagagtgggagagcaaaattgacggcttcgagcgcttcaccaagaagatggaccacagggcactcagctcaacttctcagccaatgagttgacatgcaagcagattatggtgacgggctttaagaaagagcatcagaagg

SEQ ID NO: 41847 - DNA, 2300 bp, Homo sapien
ctgatgtcttacctatacaaatctttgtgcagactaatgtcctgaagcattttccctatgtttacttataatagtttgataatttggggccttacatttcagtcttcaatcgattctgagtttattttgctatatggtgctatatagataggaagctagtatcattcttcatatgggtagtttcccagcgctattcatttgaagagggtgtcctttccccaatgtatgttcttggcaccttattccaaaataagttggctgtaaatatgtggatttgtttctgggtgctgtattctatggcctttaccccaagaatcattacttcttaaaatgcaattcaaattagcatgaaacatttgcagtttagggaaaggcttatggcatcagaatccttatttacaggattcattattttgtgtttttttgagatattgtctttgtctatcgtccaggaagaagtgcagtgatgtggtcataattcacggcagccctgaactctgggtacaagccatccttttgcctcagtctcccaactagctgggtctacaggcctgagccaccatgcctggctaattttttaaatttgtttttttgtagagatgggggtctcactatgttgctctggctgatctcaaattcctggcctccagtgatctttctgccacagcctcctaaagtgctgggattacaagcatgagccaccatgcctagcgtagagtattatattattttcaaagtcttattctgagagccatttattgactttggcctaaataactcaatatgatatctctgaaagtttttttgacaaattttggggaatgatgatgagggaagagggttagacactttttactaagagataacttagtgccatttaaggaggaacaaaaatgaattatcagaaaaataaaagtaaaagcaagtgcaaaagttctgtggcaaagatgatgacagtaaagcacatttttgtgactcatggtagctttaactttgttcttaaaattctgagtaatttaagggttcacatttgaagaatctactacattatagataacattttatttcaagtcaatgcatttcaaaatttgctattggttttgtattggattattctcagcctacttcattatcaagctctattattttcttaatgcagtttaatgatcttgtggccgagaaggaagctgtgtcttcagaatgtgtcaatttggccaaagacaatgaagttcttcatcaggagttattatctatgagaaatgtacaagagaaatgtgaaaaacttgagaaggataaaaagatgttggaagaagaagtattaaatcttaagacacatatggaaaaagatatggtagaacttggtaaactacaagaatataaatcggagctggatgaaagggcagtgcaggaaatagaaaaattagaagaaatccatttacaggttagtttttaaaatcaggtaagtttatctgtaatgggctttcatttatttcactgcaaactatattttggatatgtatatattgtgtttcctctgcctctcttacagcaatttccttcgtagagttctagaaaaaaagtgacttttttccttttaaatatttaaatttccattattattataacaaaatcaatctttcaaagtaatgattctcactatagagtaaaagggggaatttgatgattaagaccaggtggcataagagaaaactgtgatttagaaattatatgatacttttgaattggtcttaagctacgttgttcattgttcactttttaaaattataaatggattctattactttttataggacaagattacattaatactaacataagtatgatttcaaatttttttaaatcagacaattctgaattcagttattagttttgttgatattgctgataaatattttaagcttcagcctcttttcaacatactcaaaattgctcttcgaatcactgattcaaaatgaaaggcaacaaacctatggtaattaacttataattgttttaaaagtgtattcttttcatttgttttagaaacaagcagaatatgaaaaacaattagagcagttaaacaaggataatacggcttcactaaaaaagaaggaactcacacttaaagatgtggaatgtaaattctccaaaatgaaaactgcttatgaagaggttacaactgaattagaagaatttaaggaagcctttgcaggagcagtgaaagctaacaattccatgtcaaaaaaattaatgaagtaagtcaaaacatacactcatagaaaatgaattcagctcattaa

SEQ ID NO: 41848 - DNA, 2300 bp, Homo sapien
gcagtgtaagtgccactgctcttcattctcacaaacactgtggatagaacacagtctcactcctcttttaacttatcttatgagaaacactaaggattttttcctatgtacataagtaacttgtgaatctgcaaaaagtgctttgctcacttctagagttcttttcttgtggatttgattggaaagaattccctgtaaaataaagatgtgctttttatctgtatatatataactgatatatatatataacacattatattagtaatatatacaatttcttatacatataatcagtaatatgtattatatataataaagaataaattccctgtaggatgaagatacacttttcatctgaatatatatttttatatattagtaaaaatatatataggaaatatttttcgagtgtgttatcttttgttaatttttttctgatacacaggggattttaatttttagtttgctaaatcaactttcagaatgcctgcttgcgaggtcattcttacgaaggcctttgttaacataaaatgtacctgtataaataagtctttgcgttttcttctggtactttttctcattttgcatgtgtaaaaatttcagtctgaattccatcaggaacccatttttgcgacataaagtttcattagttttcttcacacagcaggcattttattaataactcatcttttcctactcatctgaaacgttaccattatccatccctatgtatatatcttacatatatttcagtgtttttggatttcctgttctgttccatttatttatctgtgttttcagctgttagtaaataattaattgtgggaattaatagcacattttgatatctagaggagcaagtcttttcactccattataaacatttttaaatgtcatcacaatggtaagatagatagcaagtgtcatgcaaaaatgataaaaccttgatatcttcattcagtttatgtaaaactgataaacatggaaacagttcatattttgagaaaactgagtcttcccattcaaggaacccacctcgcgcttcccagtgtccctctaagaagctccagtaaagaacctgtctacctaggtggattcggatgtaaaaccgacacagggttttatctgagaactcttcgcctactgaaaaaggctcatggtatttttgacaggggaatgagttctcattaggcacctccctatcatgtatatggccccatgttttaaacgtggatatgcctaactttgtgagttaaatcactcaaattttccaccaagcgcgacggacggggaattgccagcgacggaaagcagctgaggctccatttggctccgctgctccgagggtgcccggcgccctccaaggtccccgccccaggggctgccgggctgcagggaagccgggcctgcggccccctcccaccgcgggctgagtccccgagctacctgtcttttctgtcgcgggcgtccaagtcccggaacctgcgcgtcaggcagcgctccacctccgcggcgtcgcccttgatggcagccctgtggatcttccgcagttcccagtcccgaatgtcgtaacccggacccgcatactcttggtccatggagctcaggagcgcctggcccaggcgtctcccgaagctgaagagcttcctcatggtggcgacttctcagacgcccaccacccgctcctgagccgcggcggctcctcgtggcctttccacccccactccgccccaaatccgcgatctcccccgcaacccgcgatcccccccgcaacccgcgatccacccccaaatccaagatccacccccaaacccgcaatgtagctcagaatccgcgatccagcccggtccaccacagccttcagcagcgacactcgcagactccgacctctcagaccgagtgagcccagctaagccgttaggcgcgcgcctgaacctcagcgctccgaactctcagaccgagtgagtccccgcgatgccagttaggcgcgcgcctacaactcagcgccagccgggactccggaagccgctcccaagccctcgtggccggcagggggcacctgcagcacgggcgcacgcgtcgctggcttgcgggttctcctgggctcccgcgggacgtcccggaatcccaggagtgcatcccttcccgcctgagggcctgcctggccctgactcccgacccgctcctcctccgaagagagatcggggccgctgacaggggccctccgcagccaccggggatgggactggggggtcggttcctgtcccggtgcagccgccgccgggtagaccgcctggctt

SEQ ID NO: 41849 - DNA, 2300 bp, Homo sapien
ctgaatatatatttttatatattagtaaaaatatatataggaaatatttttcgagtgtgttatcttttgttaatttttttctgatacacaggggattttaatttttagtttgctaaatcaactttcagaatgcctgcttgcgaggtcattcttacgaaggcctttgttaacataaaatgtacctgtataaataagtctttgcgttttcttctggtactttttctcattttgcatgtgtaaaaatttcagtctgaattccatcaggaacccatttttgcgacataaagtttcattagttttcttcacacagcaggcattttattaataactcatcttttcctactcatctgaaacgttaccattatccatccctatgtatatatcttacatatatttcagtgtttttggatttcctgttctgttccatttatttatctgtgttttcagctgttagtaaataattaattgtgggaattaatagcacattttgatatctagaggagcaagtcttttcactccattataaacatttttaaatgtcatcacaatggtaagatagatagcaagtgtcatgcaaaaatgataaaaccttgatatcttcattcagtttatgtaaaactgataaacatggaaacagttcatattttgagaaaactgagtcttcccattcaaggaacccacctcgcgcttcccagtgtccctctaagaagctccagtaaagaacctgtctacctaggtggattcggatgtaaaaccgacacagggttttatctgagaactcttcgcctactgaaaaaggctcatggtatttttgacaggggaatgagttctcattaggcacctccctatcatgtatatggccccatgttttaaacgtggatatgcctaactttgtgagttaaatcactcaaattttccaccaagcgcgacggacggggaattgccagcgacggaaagcagctgaggctccatttggctccgctgctccgagggtgcccggcgccctccaaggtccccgccccaggggctgccgggctgcagggaagccgggcctgcggccccctcccaccgcgggctgagtccccgagctacctgtcttttctgtcgcgggcgtccaagtcccggaacctgcgcgtcaggcagcgctccacctccgcggcgtcgcccttgatggcagccctgtggatcttccgcagttcccagtcccgaatgtcgtaacccggacccgcatactcttggtccatggagctcaggagcgcctggcccaggcgtctcccgaagctgaagagcttcctcatggtggcgacttctcagacgcccaccacccgctcctgagccgcggcggctcctcgtggcctttccacccccactccgccccaaatccgcgatctcccccgcaacccgcgatcccccccgcaacccgcgatccacccccaaatccaagatccacccccaaacccgcaatgtagctcagaatccgcgatccagcccggtccaccacagccttcagcagcgacactcgcagactccgacctctcagaccgagtgagcccagctaagccgttaggcgcgcgcctgaacctcagcgctccgaactctcagaccgagtgagtccccgcgatgccagttaggcgcgcgcctacaactcagcgccagccgggactccggaagccgctcccaagccctcgtggccggcagggggcacctgcagcacgggcgcacgcgtcgctggcttgcgggttctcctgggctcccgcgggacgtcccggaatcccaggagtgcatcccttcccgcctgagggcctgcctggccctgactcccgacccgctcctcctccgaagagagatcggggccgctgacaggggccctccgcagccaccggggatgggactggggggtcggttcctgtcccggtgcagccgccgccgggtagaccgcctggcttggccgcagccagggcgacatgtagccccggttctgccaggctgggagcgccagccatcttgggagttgccaggcagctgtcgccagcaggtagagggcgcctgcagcttgggcgcccaggtggtggagcacggcctaggcggcctctggatcgcgagtgcacctggcctgagagcccgccaggccctgcccctgctcggctcctcgtctgctgaagctcgggacctctagccagtggccctctgcagccacggggaatggggctgagagccggttcccgctgcagggcagaccacctagctcagccgcagccacagggacatctggccccggttctgagatgtggggagtgctg

SEQ ID NO: 41850 - DNA, 2300 bp, Homo sapien
taaatggacgaaagatctaaagaggctcccatcagagatggcatatagaaggggaaaagcttatgaaaagatgtttgccctcccaacgcttttccctccctgcgtccctctccctcacacaccctccgctgcagcggagtgggagcgggtcaggggcgctaggcggtgacggtgacggtgacgtgctgtctctcgggcgaggcgtgggatttaagcgcattataagccgtgggtcccggggaatccgagaggctgagcttggagcccagactgacccgcctctctcatggtcccggcccactgccctgcagagcccgccttactcttcctctccacaggtctgctgtggctccaccaagcctggtaggcccacaaggagctgcatccagcaggagccgccgcccgggaacaagctacccgcgggctctggggacaaccgcccgtctgatgagctcggctgagcgtgcacgcaatgtcgaaatcaaggacgcctggatgcttttcatggcagagtgacaaaagtttaccaacaagaagaggagcagggctgctgaaaggtgcggtgccgcggcgccagaatgcgggatcctgagccctgcatgcgagtcttcgcggggccgatcgctgcgagcctcgcttaggtccagccgcctccagggagggcaatatccacgagacgcggggagtgagggcggtgctggccgcacccctggtcctggggccgcgggagccgtgctagcaggccgccttccactgccgcctgcgccgggtcgggttgctgcagcggtgcccgctgcaggagctccgcgcctgctgcttctccgacgtcagggcgccgccaggatgacaggtgcaggaggctgcggctgtgggcagatgtggtttccagccccaggtcccggcggcccctggcttcccagcccgctgtcctgtgggcaagaagatgaagaaagtcaccccatcagcaggtcagctgccccgcctggcagcccagccagacaaggcaaccgaagttcatcctgtctgagttgactttgtgcaggcagcgggccggcgcccaggatgctggggagccctgcgcgccggaggccgacaagccgtggggcccagaggcgccacagggcgagaaggcacccgcctcccagcgctttcaccccccggcccgcccgacccgctaggtgtagcagtggctgcggccaagccaggcattctgcccggcggcggctgcacaggggcgaaaactgagaacccctgctcaaccccatccggagtgactgccaagtgcccatgccagcgaccccgatccccctccggtggaggaatgggcgggaggcacggcctgggggccctcaggctgggcgcgctggcgatcccgaggccgaccaggccatgcacctccagcccgcctgggcacccaagctgcatccgccttctgtgtgcaggcagcagcctccaggcaacccccgagcccgccagcactccccacatctcagaaccggggccagatgtccctgtggctgcggctgagctaggtggtctgccctgcagcgggaaccggctctcagccccattccccgtggctgcagagggccactggctagaggtcccgagcttcagcagacgaggagccgagcaggggcagggcctggcgggctctcaggccaggtgcactcgcgatccagaggccgcctaggccgtgctccaccacctgggcgcccaagctgcaggcgccctctacctgctggcgacagctgcctggcaactcccaagatggctggcgctcccagcctggcagaaccggggctacatgtcgccctggctgcggccaagccaggcggtctacccggcggcggctgcaccgggacaggaaccgaccccccagtcccatccccggtggctgcggagggcccctgtcagcggccccgatctctcttcggaggaggagcgggtcgggagtcagggccaggcaggccctcaggcgggaagggatgcactcctgggattccgggacgtcccgcgggagcccaggagaacccgcaagccagcgacgcgtgcgcccgtgctgcaggtgccccctgccggccacgagggcttgggagcggcttccggagtcccggctggcgctgagttgtaggcgcgcgcctaactggcatcgcggggactcactcggtctgagagttcggagcgctgaggttcaggcgcgcgcctaacggcttagctgggctcactcggtctgagaggtcggagtctgcgagtgtcgctgctgaaggctgtggtggaccgggctggatcgcggattc

SEQ ID NO: 41851 - DNA, 2300 bp, Homo sapien
ttataggtctattcagattttctattctcgagtcaattttgatagattgtgtgtttctaggaatttgctaatttcatctaggttatctaacttgttggcataaaatagtttgtaatttttttttttttttgagacggagtcttgctctgtcacccaggctggagtgcagtggcgcagtctcggctcactgcagcctctgcctcccaagttcaagcgattctcctgcctcagcctcccaagtaactgggattacaggcacctgccaccacaactggctaatttttgtactttcagtagaagcggggtttcaccatgttggccaggctggtctcaaactcctgacctcaggtgatctgcctgccttggcctcccaaagtgctgggattacaggcgtgagccaccacacctggcctgagcaatgatttgactacattcataatttgggtatatcatgttttcattttcatttggctcaaaatattttctaatatcccttataactttttatttgacctataggctgcttaaaattgtgttaatttctacatatttgtaaattttccagtttttcttctgttattgatttttagtttcattctgtatttgtcagagaagataatttacataactttatctttttacatttattgaaacttgttttatggcctaccctgacacatgatccacgtgctttgtgtattttgcaattgtttagtggagtattttcttttttttttctttttgagacgtagtattgctctgtcgcccaggctggagtgcagtgccgcagatctcggcttcctgcaagctccgcctcccgggttcacgccattctcctgcctcagactccaaagtagctgggactacaggtgcccgccaccacacctggctaatttttttcttgtattctttagtagagacggggtttcaccgtgttagccaggatggtcttgatgtcctgacctcgtgatcagcccgcctcggcctcccaaagtgctgggattacaggcgtgagccaccgcgcctggcctcgtggagtattttctatatgtctgttaggtcttgttgatttacagtgtttttcaagtcctctatttctttattgatcttctgtctagatgttctatctgttattgaaagtgactgtttgagtccatttagtgttgctgtaacagactacctgtgactaggtaatttataaagagaagaggtttatttggcccatgattctggtgacttgaaggttcaagattgagcagctgcatctagtgagggcctccctcatgctgcttccactcatggcagaaagtggatggggtgtgggcgtgtgcaaagagatcacgtggtgaaaaagaaagcaagagagagagagatacacccactgacccaaacacctcccagtgggctcctccgtttagcagtgttacatggaggatcaagtttccacatgagctttggcaaggccagaccacattcaagtgatatggggcatataatttgccaaatgcagtggggtattgaagtctccaacaattattgtagtactatctacttcttccttcaagtctatcgatgtttgtttcatgtattttggagttctgatttttggtgtctatacagttataagtattttatattcttgataaatttatgagttatcaatatataatgaccttaattcatttcttgtaacaatttttgactttgtttatttttgctttgtgtatctactataagtttttattttgtagttaccattaggcttacataaaacctcttataatggactgtttatatttggtaacaacttaactttgatcacatagaaaaaagtctccacttttactccatccccttgcccccaatttatgctttgatgtcataatttatatttttaattgtatatcccttagcaaattattatagctattatttttaatacatatttatttaatcttcatactaaagacacagatgatttacttaccatcactgcagtattagaatattctgaatttgactgtgtacttacttttagcagtgagttttatactttctcatgtttccatgacaccaatgagcattcttttctttctttcagcctgaagagcttcctttaggatttcttgtgagacaagtcagcttttatttgtctggaaaagtctttatctcacttttatttgtgaagaactgctttggcaggtacagtattcttagttggcagatttttttctttgaggctttgaatatatcatcttgctctctcctgccatgtaaggtttttgctaagaaatatactg

SEQ ID NO: 41852 - DNA, 2300 bp, Homo sapien
gcaagtgtctatgctgatttaaataataaccatatagcagcaattatagccacataaaatgcatttcaagacacacatttatgtttaaggacttcaagtcccctaaccaaacaacttaagtagaataaacctaaataagttttaagtcaaaagcaggggaatcaaaacaattacaagcctcctgtcttagaagaaaatgctgatgcttattggcttaaccatataaaatagtgtatatacatttactagacatgaacaatttggaacaaattttgagtgtacctataagtgtgtaaaatgtatattttatgtattgggaataatattcataaatatattcctccaatgttgtaaaaaatgcatgcaccctcactacgctagtgattttacagtttaatgaagccattttgttttaattgcaaatgtctaccaccgtagaagtttcttggcctttctccattaagcctaacactttgaacacccaagttcacttttttttttttttgtcttgagacggagtctggctctgtcgccaagctggagtgcagggtgcaatgttggcttgctgcaacctctgcctcccgggttcaagcaattctcctgcctcagcctcccgagtagctgggactacaggcaggcaccaccacgcccggttaattttttgtattttaatagagacagggtttcaccgtgttggccaggatgggctccatctcctgacctcttggcctcctccgcctcccaaagtgctgagattacaggcatgagccactgcacccggccaagttcacatttttaaagactccatctgatgcctgacaaattggtataataatagattgacatttgttgttttactctaggtccaatttagaaaatgatttccattttctctctttctgtctcactgaaggcaactgatctgtcaatcaaaactttagatttataattttttctgtaataaaagacgtgctatttacagagttcttgtgcaaaagtagtttaagtgaacccaattaataattcaagaatgactttgtaagattcttcatctattacatttgaattcattttacattttacatctattacatttgaattcattttaatgaaaaagcctttcaaagttgtctttctaaagggaagattaatacactatttcttagagataccatctaaaaaagtatctttctttcttttttcttttttggaaactcgcggtggtggtaatgtgagtgagtttgtcaatctttgcccctactgtgaatttgagaagcagaggaagagaaaaagagaaagacccccccccccgccccctgcctccgcccctccctctagcacacagtaggcgcgcaaggagtgcagtgttagctgctgctggactgagctcctcatcctacacttgcaggggttgctcttttggacagaaagctggaataaaacgtaaattttagacttccaccaaggccaggactagggtgaagggactaacgcactagtctcaggagcaactgttaagtaacgctaatcctgaatgaatgaaatagttttaaaattgaatgtaatcgcaaagaaaaaaaaacccatgatagacaaaatattaaaactttaaataaaggcttgcactcgcacaacccaggctcaccggcctctccctgctcctggcccggtttcccagcttggttctctacaagtcagaattcctagcaaaatcaaagtgtgcgcgcgtctgcccaagtacacgccgcagagttatttctgccccatcttccctatttgaactcaaacaggacagcattttcctgggtgcagcccctgcgttgggtgaacagcgcagtgataaagcctggcgttctccacctgcaggcggaggctgacggcgcggtctttggcgcgagtccgtgcaccgcggccgccccgccccggtgggagagagggacggaggaagctgccggtataacgggaggagagcgccaggcggagctggggcgtccctcccgctcgcttcttgactcgcgttgctgccggccgcctcccgcgcctagtgtccgggacgcgcctgaacctgccgcctccgtgcctggggtggcgccgcgcggccccgagcgctccagaaagctgcggcgcgagtccgcggggccgacctcggagacgcagctggggccgggcgcggcttggcgggagggtctgcagcgccgagggaggctgctggtgcgtgaggaagagagctagagactggacaggggaggcagagcagcgtcagagccgcgcaggggacgggagtgagagcaggagcgacg

SEQ ID NO: 41853 - DNA, 2300 bp, Homo sapien
atctcagcaccttgggaggtcgaggcgggcagatcacgagatcaggggatcgagaccatcctggctaacacggtgaaaccccctctctactaaaaatacaaaaaaattagccggacatggtgggggcgcctgtggtcccagctactcgggagcctgaggcaggagaatgacgtgaccccaggaggcggagctggcagtgagccgagatcgcgccactgcactccagcctgggagacagagcgagactgcgagactctgtttcaaaaaaaaagaagaaaaagaaagaaagaaagaaaagtgggtgacatcactctggttctaatcattttcgtgcttcagctgcccccactggatcagtgtttctggtgaaacgcaatcagttttcggagggcctcaccctccttcactgtaatgatgtttgcagttctttctttctcctctatgccgaaaatccagaattaccaccccctgttccccatggttcacaatctcaaacacgtttctccagtgaccacttcaattcacacagccatccctcagttcaaatattgcctttgaacatcatgagcaagaccacggctctttgtatttctgccacagtttcacaccagttacagattatatacattcttcacgtcaataagtttattttgtagagtgtggtttctggagtcagatgaactctccacctactaggtctgttacttgggcaagtcatttcttgcctagatttaccaatttgttagagttatattactttactccaaaagattttattctgtgaattacattgcttttcttattttttaaaaattgtaaatctagggatttaggcttggttgtttttttaaatatcagtacttatctaaacaaatatttgaaaatttttcttttttctttacgtatattagaaatctggccaggcacggtggctcatgcctgtaatcccagcactttgggaggccaaggtgggcggatcacctgaggtcagcagtttgagaccagcctggccaacatggcaaaaccccgtctctactaaaaatacaaaaaaattagccgggcgtgatggcaggcacctgtgatcccagcaacttgggaggctgaggcaggagaatcacttgaactgaggaggcagaggttgcagtgagctgagattgtgccactgcactcccgcctgggcaacagagtgagaccccatctcaaaaataaaaaacaaagaaagaaatctgttaacagccttgctatgaagacatttttgtctgtttcttttactttgtgtacttatttaatattaaaacctgtattattgctcagcaaagaggagaatagtttccttgaaggaaaaaaaacatccttaagaacttactagtttaaagctgagcatcttagatttgaaggttgccttacctttttaaagattttttttatgagttgatagaaagtcctaaaatcttaggaacagaaacaattgagaattacaagtcaaatcattgaaatggagccatctgacagtttatgtgttctgctgtgccagtagtgagtgggaacagtttctatgtgggaatataatcagggtcctgactacccctaaaggagctctttcttgtttggtgtgaagccaatacaccaaaccgagagtgagtatcaaacagtgtgggcttttttcaatggccatggaattgcagaagtgggagcatagcctgcaaatcaacttctcagagcctgagaactgaggattcttaatgaaggggctgggtatacagaggaaagggagaaatattcatagcttttcttgggaagggaggtaggtttttttggaatcaaagagccacctcttttctgcctgtttttggtctcttctggccattgtcatggtgattgtcaactgtcaaggtgccagtgggagtgtcatttagcatggaaattggatcataatgaagctagaggtttttcagaggtcaagctgccattgcggattttgccagcttcagccagtttagtcctaagaaggaacttctgaccccagacatcctgttttctaaaactaagcagttaaagctgaatgggaatttagctctgtcacataggcatttgttgggcaacaaaagcagggtagggctccagctaagccacgtaggcactacgatgggcaacagaaaggttggtttctgggcaattcagagaaaccaaggacagctacccccagaactcagagtagccaactgggctgctcacaggagatgccttaactgaaaggtgatcagactccacaggagacccagagaagatgtggagggagc

SEQ ID NO: 41854 - DNA, 2300 bp, Homo sapien
tctcagcaccttgggaggtcgaggcgggcagatcacgagatcaggggatcgagaccatcctggctaacacggtgaaaccccctctctactaaaaatacaaaaaaattagccggacatggtgggggcgcctgtggtcccagctactcgggagcctgaggcaggagaatgaagtgaccccaggaggcggagctggcagtgagccgagatcgcgccactgcactccagcctgggagacagagcgagactgcgagactctgtttcaaaaaaaaaagaagaaaaagaaagaaagaaagaaaagtgggtgacatcactctggttctaatcattttcgtgcttcagctgcccccactggatcagtgtttctggtgaaacgcaatcagttttcggagggcctcaccctccttcactgtaatgatgtttgcagttctttctttctcctctatgccgaaaatccagaattaccaccccctgttccccatggttcacaatctcaaccacgtttctccagtgaccacttcaattcacacagccatccctcagttcaaatattgcctttgaacatcatgagcaagaccacggctctttgtatttctgccacagtttcacaccagttacagattatatacattcttcacgtcaataagtttattttgtagagtgtggtttctggagtcagatgaactctccacctactaggtctgttacttgggcaagtcatttcttgcctagatttaccaatttgttagagttatattactttactccaaaagattttattctgtgaattacattgcttttcttattttttaaaaattgtaaatctagggatttaggcttggttgtttttttaaatatcagtacttatctaaacaaatatttgaaaatttttcttttttctttacgtatattagaaatctggccaggcacggtggctcatgcctgtaatcccagcactttgggaggccaaggtgggcggatcacctgaggtcagcagtttgagaccagcctggccaacatggcaaaaccccgtctctactaaaaatacaaaaaaattagccgggcgtgatggcaggcacctgtgatcccagcaacttgggaggctgaggcaggagaatcacttgaactgaggaggcagaggttgcagtgagctgagattgtgccactgcactcccgcctgggcaacagagtgagaccccatctcaaaaataaaaaaaaaagaaagaaatctgttaacagccttgctatgaagacatttttgtctgtttcttttactttgtgtacttatttaatattaaaacctgtattattgctcagcaaagaggagaatagtttccttgaaggaaaaaaaacatccttaagaacttactagtttaaagctgagcatcttagatttgaaggttgccttacctttttaaagattttttttatgagttgatagaaagtcctaaaatcttaggaacagaaacaattgagaattacaagtcaaatcattgaaatggagccatctgacagtttatgtgttctgctgtgccagtagtgagtgggaacagtttctatgtgggaatataatcagggtcctgactacccctaaaggagctctttcttgtttggtgtgaagccaatacaccaaaccgagagtgagtatcaaacagtgtgggcttttttcaatggccatggaattgcagaagtgggagcatagcctgcaaatcaacttctcagagcctgagaactgaggattcttaatgaaggggctgggtatacagaggaaagggagaaatattcatagcttttcttgggaagggaggtaggtttttttggaatcaaagagccacctcttttctgcctgtttttggtctcttctggccattgtcatggtgattgtcaactgtcaaggtgccagtgggagtgtcatttagcatggaaattggatcataatgaagctagaggtttttcagaggtcaagctgccattgcggattttgccagcttcagccagtttagtcctaagaaggaacttctgaccccagacatcctgttttctaaaactaagcagttaaagctgaatgggaatttagctctgtcacataggcatttgttgggcaacaaaagcagggtagggctccagctaagccacgtaggcactacgatgggcaacagaaaggttggtttctgggcaattcagagaaaccaaggacagctacccccagaactcagagtagccaactgggctgctcacaggagatgccttaactgaaaggtgatcagactccacaggagacccagagaagatgtggagggagc

SEQ ID NO: 41855 - DNA, 2300 bp, Homo sapien
cagactaatgataggagattacattgacctgaaatgcagcataaaaactatagtttttatagtattgcagtgtagtaactgtttggcatttttgaagtaaatttcactgatacattatctatgtttatatatttcggtgtactttttgggacatttttgcatttatgttatgggagatattggtctgaaagtttcttttcttgaatagtatttgcctaatcttgctatgaggatgaggcaggccttataaaatgatttgggaaatattccatcttttattttctagaagacattgtgtaggattggtattatttcttccttggatgtttggtaaaatttactagttaaaactatttggtccagaagttgttctttggaattgcacacacacacacacacacacacacatacacatatatagaggaagatttcattacattcttaagccttatttacatatgcaaacatagttaaaatttgagtaaattagacattcagttaacatatcctccatcataatgaagtaagttaatatgttgtcgtaaatatccttttcaccgacagctcctttagaaaaaaatgtcttttagattattctgccattatgttttaacatttgacatagaatatattccctgtggttacaatacacattcacctgcctcttctttccacttagattgtccaaataaagttagtttgcttttatagttaaaaaaaaaaaaagagagagagactagaatgctgttacaaaacggtgtcagagctagctacttcacttttcaccatgtaaggatataacaagaagtgagtggtctgtaaaccagaagaggtcttcacaagaacacagtcatgttggcaccctaatctcagacttccagtctcctgcactgggaaaaataaatgtttattctttaagccatttagtctatggtaatttgttgtagtagcccgaactaagacagagttattgttaatgttgttttattatctcttgaatgtctgttagtagttagtcctctcttgaatttttggtattggtaatttgtgtcttctctttttttctctctgatggtttttatcattaaaaaaactttttaaaaaattaagcttttggtttgacttttttgtcatccttctactttctttcaacttaatgtcctgtctttatctagtttcctaagggggaaacaagcatctgactggagatctttcttttcaaatataatttttttaaagacagagtctcactctgtcacccaggctggagtaccgtggctcactgcacctccacatcccgagttcaagcaattctcctgccccagcctcctgagtagctgggattacaggtgtgcaccaccacactcggctaacttttgtatttttagtagagaaggggtttcaccatgttggtcaggctggtctcaaactcctgaccttgtgatccacacacctcagcctctcaaagtgatgggattacaggcgtgagccaccgcatctggccaaaaaaatttaagccccaaatttatctatgtgtactgccttagctgcatccacaaatttctgtattctaagttgttttgtttacattcacttcaaaatatctcatttgagaattctttcacccatgggttaattaggaatgtataacttacagttcttttgtatttctccagataaatttgtgtttactgatttctggtataatttctctgtggcccaagatcatcctctgtataatttatttcttctatatttctgaaggtttgtcttacagtctagaatatagtctgttttgatgattgttccatgtgcatttcagaagaatgtgaattcagctgttgaatgcattgtgtcttcaggtttgaagccatggttattgcaagtgctactttatcttatctcttctgcttgagtattgggtctactgtgtattcctgcctctcctcttacttctgtgcttctttttttcttgtttccttcccatagctgctatgagttcctgtcagtgccctaaaacaacttattatattcttgcccttgcagattaagacatttgttccataaattagataataatttggttctaggcagaattttggtagtggctgctgtgaccgtctcccagcatatcctaagaatggaactttctcaggattcttcatggctcatggaagaaaacatataagagcatgcagatcctgtgtatctacggcagggaacattagctccctgctcagcctccatggaaccacaggattgtatcattttggtttggcctgagcatgagaaaacatcaa

SEQ ID NO: 41856 - DNA, 2300 bp, Homo sapien
tagattcacactgcccaatttctaaacttactgtaaagcagtatataactggcctaagactaaacagatagctcattgggataaaattgaaagtccagatagataccttgccatttatggtcaatggattttacaagagtgccaggacaacccaatgggaagaagtagtctctgagactactgagtatacatgcacatgcaaatgaatgaaattagacctctatctcacacatacataaaaatgtaccaaatagacctcaatgtaagaactaaaactataaaactgttaaaacatgggagaacaaaagagaagataacccacagaatggaagaaattattgcaaatcatgtctcttataagggcctagtattcaaattatttaaagagttttacaactgaataagatgccgtgcgtggtggctcacacctgtaatcccagcattttgggaggccgaggtgggcagatcacgaggtcaggagttcgagaccatcctggctaacacagtgaaaccccatctctactaaaaatacaaaaaattagacgggcgtggtggcgggcacctgtagtcccagctactcaggaggctgaggcaggagaatggcgtgaacccaggaggcagagcttgcagtgagcggagatcacgccactgcactccagcctgggcaacagagcgagactctgtctcaaaaaaacaaaaataaaaacaaaaaaccaacaactgaataagaaaaagaaatttaacctaattaaataataggtaaagcttataagtagatatttattcagcaaatatgtgtgaatgtccaataaaatcatgaaaaaatagttggcaacattagccagtaggcaatcaaagtcacaatgaaatacctcttcacacagacaagtatagctgtaatttaaaagaatgataataataaatgttggtgaggatgtggagatattaaaaccctcatgatttctgtttggaatgtaaaatggtatagctattttggaaaaaatatggcagctcctccaaattttaaagttggtgttatcataagattgaacaattttactcctaggtatattcctaagaaaaataaaaacgtatccatagaaaaacttacacgtgaattttcatggaagcattatttataatagtcaaaaagtggaaacaacccaaatgtctatcaactgttaaatagatccgcaaaatgtggcacatccattactatttacatccaatgaaatattattcaataaaatgcataaaatactcatacatgctacaagatggatgaaccttgaaaataccatgctaagtgaaagaggccagattgaaaagaccacacgttatatgattccactgatatgaaatctctcgaataggaacctctgcagagacagaaagtaaattagtagttgcctaggctggggtgttggggagaaacagagaatgactgctagaggatatggaggtttttgtaggagggaataagaaggtgcacgggggagggcagtaaaaatactctaaaattgatcatggcaatgtttgcacatgcctgcaaatatactaaaagacatagaattttacactgtaattgggtctattacatggcatatggattatatctgaataaagatgtttaaaaattaatgatttgggaaaaaattggaaaccaaagatgagataagtcacctataaattatacatttatactgaagaattagttatatgtaaatataagatgaggatgatttagagaattaaaatctctattaagtgttagtcaattctgggttatgagtatattggagtttgctactttttcttcaagttgtagtttttaaaaaactttaaaaagtgaaaaataaaaaataaaacaggaaaggatttcactattactttattctcccaggatatttaaggtttggtctcattctctaaatgtacttaaaacaagaccgttggacttacattttgttaacataacaaaaatgtatttatcatttcagagatttccgcatattttgcaactggctcctcaatgacataccattttcaagaacattacactttaagtgaaaactccagctctctcgtttcttcattatacagagatgtaacattgaccagagaaatgatcacactgagcttccgaaccacacgatctccgagcttattgctgtatgtgagctctttctatgaggaatacctttcagttatcctcgccaacaatggtgaatatcttttgtgtaaagaaaaagagaaccctgagttagaaaaataggactgtaatgacatgggtcttttca

SEQ ID NO: 41857 - DNA, 2300 bp, Homo sapien
cgaattcatgccttcatttgttcagtaagtgtgtagtgtgtgatgattgtgacggatgcttctctattaggcaaagtaatttttagagcctcactactcttagtctgcaaagttcattgacagcattatcaccacagcaagtgtctatgctgatttaaataataaccatatagcagcaattatagccacataaaatgcatttcaagacacacatttatgtctaaggacttcaagtcccctaaccaaacaacttaagtagaataaacctaaataagttttaagtcaaaagcaggggaatcaaaacaattacaagcctcctgtcttagaagaaaatgctgatgcttattggcttaaccatataaaatagtgtatatacgtttactagacatgaacaacttggaacaaattttgagtgtacctataagtgtgtaaaatgtatattttatgtattgggaataatattcataaacatattcctccaatgttgtaaaaaatgcattcaccctcactacgctagtgattttacagtttaatgaagccatttttttaattgcaaatgtctaccaccgtagaagtttcttgtcctttctccattaagcctaacactttgaacacccaagttcactttttttttttttttgtcttgagacggagtctggctctgtcgccaagctagagtgcagggcgcaatgttggcttgctgcaacctctgcctcccgggttcaagcgattctcctgcctcagcctcccgagtagctgggactacaggcaggcaccaccacgcccggctaattttttgtattttaatagagacggggtttcaccatgttggccaggatgggctccatctcctgacctcttggcctcctcggcctcccaaagtgctgagattacaggcatgagccgctgcacccggccaagttcacatttttaaagactccatctgatgcctgacaaattggtataataatagattgacatttgttgttttactctaggtccaatttagaaaatgatttccattttctctctgtctcactgaaggcaactgatctgtcaatcaaaactttagatttataattttttctgtaataaaagacgtgctatttacagagttcttgtgcaaaagtagtttaagtgaacccaatttataattcaagaatgactttgtaagtttcttcatctattacacttgaattcattttacattttacatctattacatttgaattcattttaatgaaaaagcctttcaaagttgtctttccaaagggaagattaatacactatttcttagagataccatctaaaaaagttagtatctttctttcttttttcttttttggaaactcgcggtggtggtaatgtgagtgagtttgtcaatctttgcccctactgtgaatttgagaagcagaggaagagaaaaagagaaagacccccccgccccctgcctcccgcctcccgcctctgcccctctctctagcacacagcaggcgcgcaaggagtgcagtgttagctgctgctggactgagctcctcatcctacacttgcaggggttgctcttttggacagaaagctggaataaaacataaattttagacttccaccaaggccaggactagggtgaagggactaacgcactagtctcaggagcaactgttaagtaacgctaatcctgaatgaatgaaatagttttaaaattgaatgtaatcgcaaagaaaaaaaacccatgatagacaaaatattaaaactttaaataaaggcttgcactcgcacaacccaggctcaccggcctctccctgctcctggcccggtttcccagcttggttctctacaagtcagaattcctagcaaaatcaaagtgtgcgcgcgtctgcccgagtacacgccgcagagttatttctgccccatcttccctatttgaactcaaacaggacaggattttcctgggtgcagcccctgcgttgggtgaacagcagagtgataaagcctggcgttctccacctgcaggcggaggctgacggcgcggtctttggcacgagtccgtgcaccgcggccgccccgccccggtgggagagagggacggaggaagctgccggtataacgggaggagagcgccaggcggagctggggcgtccctcccgctcgcttcttgactcgcgttgctgccggccgcctcccgcgcctagtgtccgggacgcgcctgaacctgccgcctccgtgcctggggcggcgccgcgcggccccgagcgctccagaaagctgcggcgcgagtccgcggggccgacctcggagacgca

SEQ ID NO: 41858 - DNA, 2300 bp, Homo sapien
cctgaaaccaaacccacagtatctctgaggtatgcctatgtagcagtcccataagttatcgtgcactttaagcattaccaagtccagaactgtaaatgctacacatttacagaaataccacttgaaggtttaactacttataactgtttcataattagaattacaaattttgaatattaattattttaattggggggaggggccaagatggttgagtagaaacagctctactctgcagcccccactgagacaaacataaacagcgagtgaattctgcatttctaactgaggtatccagattccctcattgggactgactaggcagttggtgtgacccatggagagcaaggaaaagcagagttgggcgacagttcacccaagagctacacagggcaaagagacctccctcctccagccaagggaggcagtgagggattgtgctacccacccggagaactgtgctttacccacagatttttgcaaaccccagaacaggtaatccctttgtgagtccacaccaccagggccttgggtcccaagcacaaagctgtgcagacccatagcaggggctccagctggcagccacttgggcaggtactgagctgtaggagtttctgcgtactctggtggctcgcagtaatccagtgaagcaggagatccatcaactcccatgagaagagggctgaagccagggagccaagcagacccactcccacagaaccccacaagctaagacccactggcatggaatccccactggctagcacagcacttggagtctgcctaagaagaccaagttcctggggggaagggtgaccaccattactgcgggtctagccggtggttttcccccaccagtgctagggagactgggtggtttgcgctgggcagaattccccacagtgcagtacagaggctgtggcagatataccattattgcatatccaaaggaatataaatcattctattacaaagatacatgcacgtgtatgtttattgcagcactgttcccaatagcaaagacatggaatcaacccaatgcccaccaatgatagactggataaataaaatgtggtacatatacaccatggaatactatgcagccataaaaaggaatgagatcaagtcctttgcggggacatggatgaagctggaagccattatcctcagcaaactaacacaggaacagaaaaccaaataccacatgttctcacttacaagtgggagccgaacaatgagaacatatggacactgggagggaaacaacacaccctggcacctgtcgagggagggccggtggtagggagagcatcaggaaaaatagctaatgcatgctgggtttaatacctaagtgatgggttgataggtgcagcaaatcaccatggtacatatttgcctatgtaagaaaactgcatgtcctgcacatgtatcccgaaagttaaaataaaataaatacataagtacataaataaaattttaaaagacaaaaaaaaaaatcttaattgtatgtgggtagttccctttgattgaaagtgagatagaaataattttttaaaacttactattcaaaatttgcaaaactaaataagagtaaaagaaatttacattttgtccctggattgatacaagacaaaaacatagtgtggaaaagctggagttgaggatgaacgagattctgagaataaaaatccctggtacatagccaaaatttcagaacttcagattttcaagggctataaaataggtaacctcaagccaccgtctccaacagataaaaggaaccaggtaatatctatattccagggagaaagaatagaaaattggctatcactgacaaaacttagtgggaaggagggatctagaaggtgggatggtggagggatccccagcttggggggtagggaggggctgtgcttcagtctccccctcccctgcccctctccctccctctccccctcctgctgcacctccccctccctctgcgcctccccctcccactgcccctccccaacaaaggagccctttgtgacatcaaggccccacctctgtgacgcaggcctgggccccagtccctagtccccacggggatgcccagagctcagttgcttgaaagcaacgcgcctattcacatggagaatcttccctttcctttaaaattacttagtgcctcatcgctaaacgcccccagttccacaccatgggtgttggatatcttcctcactttggtgtttgccctggggttcttcttcctattactcccctacttatcttacttccgttgtgatgacccaccctcacca

SEQ ID NO: 41859 - DNA, 2300 bp, Homo sapien
tctcagcaccttgggaggtcgaggcgggcagatcacaagatcaggggatcgagaccatcctggctaacacggtgaaaccccctctctactaaaaatacaaaaaaatttgccggacatggtgggggagcctgtggtcccagctactcgggagcctgaggcaggagaatgacgtgaccccaggaggcggagcttgcagtgagccgagatcgcgccactgcactccagcctgggagacagagcgagactgtaagactctgtctcaaaaaaaaagaagaaaaagaaagaaagaaagaaagaaaagtgggtgacatcactctggttctaatcattttcgtgcttcagctgcccccactggatcagtgtttctggtgaaaagcaatcagttttcggagggcctcaccctccttcactgtaatgatgtttgcagttctttctttctcctctatgccgaaaatccggaattaccaccccctgttccccatggttcacaatctcaaccacgtttctccagtgaccacttcaattcacacagccatccctcagttcaactattgcctttgaacatcatgagcaagaccacggctctttgtatttctgccacagtttcacaccagttacagattatatacattcttcacgtcaataagtttattttgtagagtgtggtttctggagtcagatgaactctccacctactaggtctgttacttgggcaagtcatttcttgcctagatttaccaatttgttagagttatattactttactccaaaagattttattctgtgaattacattgcttttcttattttttaaaaattgtaaatctagggatttaggcttggttgtttttttaaatatcagtacttatctaaacaagtatttgaaaatttttcttttttctttacgtatattagaaatctggccaggcacggtggctcatgcctgtaatcccagcactttgggaggccaaggtgggcggatcacctgaggtcagcagtttgagaccagcctggccaacatggcaaaaccccgtctctactaaaaatacaaaaaaattagccgggcgtgatggcaggcacctgtgatcccagcaacttgggaggctgaggcaggagaatcacttgaactgaggaggcagaggttgcagtgagctgagattgtgccactgcactcccgcctgggcaagagtgagaccccatctcaaaaataaaaaaaaaagaaagaaatctgttaacagccttgctatgaagacatttttgtctgtttcttttactttgtgtacttatttaatattaaaacctgtattattgctcagcaaagaggagaattgtttccttggaggaaaaaaaacatccttaagaacttactagtttaaagctgagcatcttagatttgaaggttgccttacctttttaaagattttttttatgagttgatagaaagtcctaaaatcttaggaacagaaacaattgagaattacaagtcaaatcattgaaatggagccatctgacagtttatgtgttctgctgtgccagtagtgagtgggaacagtttctatgtgggaatataatcagggtcctgactacccctaaaggagctctttcttgtttggtgtgaagccaatacaccaaaccaagagtgagtatcaaacagtgtgggcttttttcaatggccatggaattgcagaagtgggagcatagcctgcaaatcaacttctcagagcctgagaactgaggattcttaatgaaggggctggtatacagaggaaagggagaaatattcatagcttttcttgggaagggaggtaggtttttttggaatcaaagagccacctcttttctgcctgtttttggtctcttctggccattgtcatggtgattgtcaactgtcaaggtgccagtgggagtgtcgtttagcatggaaattggatcataatgaagctagaggtttttcagaggtcaagctgccattgcggattttgccagcttcagccagtttagtcctaagaaggaacttctgaccccagacatcctgttttctaaaactaagcagttaaagctgaatgggaatttagctctgtcacataggcattggttgggcaacaaaagcagggtagggctccagctaagccacgtaggcactacgatgggcaacagaaaggttggtttctgggcaattcagagaaaccaaggacagctacccccagaactcagagtagccaactgggctgctcacaggagatgccttaactgaaaggtgatcagactccacaggagacccagagaagatgtggagggagc

SEQ ID NO: 41860 - DNA, 2300 bp, Homo sapien
agaatatagtctgttttgatgattgttccatgtgcatttcagaagaatgtgaattcagctgttgaatgcattgtgtcttcaggtttgaagccatggttattgcaagtgctactttatcttatctcttctgcttgagtattgggtctactgtgtattcctgcctctcctcttacttctgtgcttctttttttcttgtttccttcccatagctgctatgagttcctgtcagtgccctaaaacaacttattatattcttgcccttgcagattaagacatttgttccataaattagataataatttggttctaggcagaattttggtagtggctgctgtgaccatctcccagcatatcctaagaatggaactttctcaggattcttcatggctcatggaagaaaacatataagagcatgcagatcctgtgtatctacggcagggaacattagctccctgctcagcctccatggaaccacaggattgtatcattttggtttggcctgagcatgagaaaacatcaaaagtgtttcctgttctgttagaccaccattttctcagacctctggctggaagaagcaggcttttctttgtgctctttttgtctgtgcctgtcagtgcaggattgtaggtttcttcagcacccagtctaggatatagaatagccttggaattccatactgtgtcatttcttaagtcctgaagtccactttctttccattttgtagtattcgtatatttgtatatttgttaatctttttttgttgttttgttttttctgtagggatttttaattgtaagagggaagatgtgggaggaaaggggttactactccaccttgactggccccggaaataatacctgttttataaacagcatggatgaggagagagtctgtctgtgtgcatgaagtatttaatatttggaaacatgaccagaaacaatagaataaaatacataacaaaacaggggccgggcacagtggctcatgcctgcaatcccagcactttgggaggtcaaggcaggaggatcgcttgagctcaggagtttaagatcagcctgggcaatgtagcaagaccctctctccactaaatataaaaaaaattaacaggacatggtggcatatccctgtagtcccatctagtagggaggctgaagtgggaggatcacttgagcctaggagttcaaggctgcagtgagctatgatcatgccactgcactccagcctgggtgacagagcaataccctatttcaaaaaccaaaaccaaaatcaaaatatgagtataagttcttctccatgagaaatgtaagatttatactatattttcaatttttctcattttagggtattttaaagttgatcacatcaaagggatccgggaaaaacaagaaaaacctctgtggcaagaaatattcatcagtgatgctgacaaaacattgagtaaagaaggacagaaagttttagaaaaaccatttaatctggaaatagctccagagctttcagaaaaaatatcctgtaaatgtgactcacacagaatgaatttgccagttgcttctcaattaattataagtgaaagaaaatattcaagaaagaagactgaatacatgaatgtgtgtgagaaactgcagcttgatattaagcatgagaaagctcatgctgaagagaaatcttatgaacatggtgaaaatgctaaagctttcagttataagaaagatcagcattggaaatttcaaactttggaggaatcttttgaatgtgatggatctggacaaggtttatatgataagacaatttgtattacacctcagagttttctaacaggagaaaagtcctgtaaggatgatgaatttagaaaaaactttgataaaatcactttatttaaccacatgagaactgacacaagggggaaatgctctgatcttaatgaatatgggacatcctgtgacaaaaccaccgctgttgaatacaataaagttcacatggctatgacacactatgagtgtaatgaaagggggattaatttcagtaggaagtcacccctcactcaatctcagagaactattacaggatggagtgcttttgaaagcaataaatgtgaagaaaattttagccagagctcagcccatatagtacatcagaaaacacaagctggagataaatttggtgaacataatgaatgtacagatgccctctaccagaaattagactttacagcacatcagagaattcacacagaagataaattctacctttctgatgaacatgggaaatgcagaaaatccttttaccggaaagcacacctc

SEQ ID NO: 41861 - DNA, 2300 bp, Homo sapien
ctaacaatcatgccagaaagtgaaggggaagcaatcacatctttaccatggcaaagcaaaagagagaacgaagggggaagtgccacacacttttaaaccatcagatcttgtgagaacccactatcaccagaacagcaagggggaaatctgttccatgatccaatcgcctcccatcaggcccctcctttaatttgacatgagatttgggtggggacacaaatccaaaccatatcaggcagtgaaactattttttatgatactgtaatggtggatattacatcattgcattggtggaaatcgcactaaaagacatgcatttggcaaaactcagaactgtagaacagacagaatgaaagctaatataaactatgtattttaaatgtactaaactaatgcaatatattaataataggggaaactgtgtgtgggttgatgagcggaggtatatgggaactctgtgctttctgctcaatatttctgtatacctaaaactgctctgtacatctattaatatcccagcactttgggaggctgaggtggacagatcgcttgaccccagtagtttgagaccagcctgggcaacatagtgaaaccccatctctacaaaaaaaaaatacaaaaggccaggcacagtggcccacgtctgtaatcccagcactttgggaggccgaggcaaggtggattacgtgaggtcaggagtttgagaccagcttggccaacatggtgaaaccctgtctctactaaaaatgcaaaaaattatctgggcgtggtggcacatgcctgtaatcccagctacttgggaggctgaggcaggagaatcgtttgaacccagggggcggaggttgtggtgagccgagaattgcactgcagcctgggcaacaagagtgaaaatccgtctcgaaagaaaaaaaaaaaattagccaggcatggtggcccacacctgcagtctcagctactcaggaggctgaagtgggagagtagcttgagcccggagacggaggttgcagtgggccgagacagcgccactgcactccagcctgggcggcagagcaaaacccatctcaaaaaaataaaataaaataaaataaaataagaaaagtctattaattaaaaaaaaagttatagtacctatctattcctaattctttaaacagtcagatgggtatacacgtttcaaaaaaggtttcctcatgaaaatgcaaggttggtgtaataatcattttcatattttgggttgcatgtgttttcacgcatcacatatgtattttgaacagctagcttcctcctccaacccccataaaccctgctgatcacagatgttactcgtttatgttttctagtatttgttcgatttcacaaccttattcataaagctatttttatgtacttttacttcccttggcaactttgaatttaacggcatacttccgaagggatagtaaagcctctccactccccctgcactgcactgccccacacgtcttttactgagtatgaaaaaaaaaaaatcagaccctcagaatggtagaaaatagtaaaatgagcatcataagcacgtattatacagatttaacaattcttcacttattactatatctgctttcattgttttgagaaatttttgaagtatttcaattaaactacaagcatacaattgtaaatgtttctgtacatatcttttaaatataagaacaatgtcctacatcgtctagctattattctcaaagtaacggtaattttctttaatatttctaatgtcctgtcgatagtcatgtttccccaattgttaatgtctgtttaaggtgcttttttctccaaccaggatcgcatcaagaaccacacttcgcagtttgtggtcatgctgacaacctccgggaatttgggaaatccctgggctccgaaggtccctcccagccggtcaaagcagcagaaaaaattatagtacttccttcggacgcacgggcttacgggaactgtagttactgtagttttcaatgttaacgcgcctaccgcgcagcactttgggaatggggtttcggggctcgctctgcgcatgtgtaaacccagccccacctcctgccgtctgccctcccgggcctgaaagggacacggtgtccgagtctttaggtctgcgcgggagccgaggctgcgcacctggggtgagagcgtcggtgacagggctccgcgcggcccaggaacctggggacgggcgggcttgtgtgcggaggacagcagcaggcagtctcaggagtccccaggatggccctcccctctcctccccggcccagtgcgcgggccca

SEQ ID NO: 41862 - DNA, 2300 bp, Homo sapien
ctgttgtaaggggtgtgggagagacagcagatttggaagcagggtacatccagccctctctggccttcttggatgagcctctctcctcccatctttgggactacaatggggattacctcgtttttgtttttttgaagaaagcatggttacatttgtcttatatattttttaatttgtatgaatttatgagtaacaagtgcaattttgttacatacatagtggtcaaggcagagcttttagggtatccatcacccaaatgctgtagattgtacccattagtaatttctcatcatccccccacaattctgagtccccactgcctatcattccactgtctacatccaggcagacactttttttagcactcacttatgagcgatatttttctatatctggcttatttcgcttaagataatgacctccagttccaaccatgttgctgcaaaatacgtgatttcattctttttgtggctgaatagaattctatcaggtatatataccacatgttctttatccagtcatccactggtggtcccttaggttgattctatatcttttctattgtgaatagtgctgcaagaaacatgagtgcaggtacctctttgatatattgatttattttcctttgagtagatacccagtagtgaggttgtgggatcgaacagtcgttctagttttagttctttgggaaatctctattttcaataaaggttgtactaatttacattcccatcaacagcatataaacattcctttttctccatatcctcaccaacatagcagatgagacattttatctttttaataatagccattttaatgaagatgatatcttattatggttttaatttacatttctctgatgattagtgttgagcattttttttatatgcccatgctggccatttgtgtgtcttcttttgaaaaatgtctatttatatcctttgaccacttttaaagaacattatttgttctttgtctttttttttttaattttttttttagacagagtttccctctgtcgcgaaggctggagtgcaatgtggagtgcaatggtgcaactttggctcactgcaacctccacctcccagattcaagggattcttgcctctcagcctcccgaatagctgggattacatgttcccaccaccatgcccggctaatttttgtagttttagtagagacgggctatcgctatgttggccaggcgggtctcaaactccttaagtggtccagtcgtcctggcctctgaaagtgctgggattataaacgtgagccaccatgcctggccttgtttgcgctttttgttgttgttgtttgttgagggagtcgtttgagcttcttctatattctggatattagtcccctatgggataaatagttttcaaatattttctcctattctcttattgcctgtttacacacctggttatttcttttgctgtgcagaagctttttagtttaattgtcccatttgtctaattttggttttattccctgtccttttaggtcttaagtcataaattctttgcctagaccaatgtccagaagaattttctcaaggtttttagtattttgatagctttgggtcttacatttaagtctttaatacatcttaagttgatttttgcatatggtgagagataagggtctgtgtccagatttgattcctgccagtgggttggtggtctcactgacttcaagaatgaagtcacagactttcacagtgagtgttacagcttttaaaggtggcacggacccaaagagtgagcagcagcaagattcactgtgaaaagcgaaagaacacagcttccacgcatagaaggtaacccaagcagattgccactgccagctgaggtggccagcttttattcccttatttgtccctgcccatgtttggtttttgtcctatcagagtgcccttttttcaatcctccctgtgattggctacttttagctactgctgattggtgcgttttacagagcactgattggtgcattttacagagcgttgattggtgcattttacaatcctcttgctagctacagagcgctgatttacgatcctcttttaagacagaaaagttctccaaatccccactcgacccaggaagtccagctggcttcacctctcaggttctgttttattttcctgcatatggctatctaatttcccagcaccgtttattgaaaaggatgtcaagtgatttttctgcatctattgaggtttttaatccttcattctattttcgtgatgtatcacatttattaatttgcatatgttgaactatccttccatt

SEQ ID NO: 41863 - DNA, 2300 bp, Homo sapien
atctcagcaccttgggaggtcgaggcgggcagatcacgagatcaggggatcgagaccatcctggctaacacggtgaaaccccctctctactaaaaatacaaaaaaattagccggacatggtgggggcgcctgtggtcccagctactcgggagcctgaggcaggagaatgacgtgaccccaggaggcggagctggcagtgagccgagatcgcgccactgcactccagcctgggagacagagcgagactgcgagactctgtctcaaaaaaaaagaagaaaaagaaagaaagaaagaaaagtgggtgacatcactctggttctaatcattttcgtgcttcagctgcccccactggatcagtgtttctggtgaaacgcaatcagttttcggagggcctcaccctccttcactgtaatgatgtttgcagttctttctttctcctctatgccgaaaatccagaattaccaccccctgttccccatggttcacaatctcaaacacgtttctccagtgaccacttcaattcacacagccatccctcagttcaaatattgcctttgaacatcatgagcaagaccacggctctttgtatttctgccacagtttcacaccagttacagattatatacattcttcacgtcaataagtttattttgtagagtgtggtttctggagtcagatgaactctccacctactaggtctgttacttgggcaagtcatttcttgcctagatttaccaatttgttagagttatattactttactccaaaagattttattctgtgaattacattgcttttcttattttttaaaaattgtaaatctagggatttaggcttggttgtttttttaaatatcagtacttatctaaacaaatatttgaaaatttttcttttttctttacgtatattagaaatctggccaggcacggtggctcatgcctgtaatcccagcactttgggaggccaaggtgggcggatcacctgaggtcagcagtttgagaccagcctggccaacatggcaaaaccccgtctctactaaaaatacaaaaaaattagccgggcgtgatggcaggcacctgtgatcccagcaacttgggaggctgaggcaggagaatcacttgaactgaggaggcagaggttgcagtgagctgagattgtgccactgcactcccgcctgggcaacagagtgagaccccatctcaaaaataaaaaaaaaagaaagaaatctgttaacagccttgctatgaagacatttttgtctgtttcttttactttgtgtacttatttaatattaaaacctgtattattgctcagcaaagaggagaatagtttccttgaaggaaaaaaaacatccttaagaacttactagtttaaagctgagcatcttagatttgaaggttgccttacctttttaaagattttttttatgagttgatagaaagtcctaaaatcttaggaacagaaacaattgagaattacaagtcaaatcattgaaatggagccatctgacagtttatgtgttctgctgtgccagtagtgagtgggaacagtttctatgtgggaatataatcagggtcctgactacccctaaaggagctctttcttgtttggtgtgaagccaatacaccaaaccgagagtgagtatcaaacagtgtgggcttttttcaatggccatggaattgcagaagtgggagcatagcctgcaaatcaacttctcagagcctgagaactgaggattcttaatgaaggggctgggtatacagaggaaagggagaaatattcatagcttttcttgggaagggaggtaggtttttttggaatcaaagagccacctcttttctgcctgtttttggtctcttctggccattgtcatggtgattgtcaactgtcaaggtgccagtgggagtgtcatttagcatggaaattggatcataatgaagctagaggtttttcagaggtcaagctgccattgcggattttgccagcttcagccagtttagtcctaagaaggaacttctgaccccagacatcctgttttctaaaactaagcagttaaagctgaatgggaatttagctctgtcacataggcatttgttgggcaacaaaagcagggtagggctccagctaagccacgtaggcactacgatgggcaacagaaaggttggtttctgggcaattcagagaaaccaaggacagctacccccagaactcagagtagccaactgggctgctcacaggagatgccttaactgaaaggtgatcagactccacaggagacccagagaagatgtggagggagc

SEQ ID NO: 41864 - DNA, 2300 bp, Homo sapien
ttaaggcatctcctgtgagcagcccagttggctactctgagttctgggggtagctgtccttggtttctctgaattgcccagaaaccaacctttctgttgcccatcgtagtgcctacgtggcttagctggagccctaccctgcttttgttgcccaacaaatgcctatgtgacagagctaaattcccattcagctttaactgcttagttttagaaaacaggatgtctggggtcagaagttccttcttaggactaaactggctgaagctggcaaaatccgcaatggcagcttgacctctgaaaaacctctagcttcattatgatccaatttccatgctaaatgacactcccactggcaccttgacagttgacaatcaccatgacaatggccagaagagaccaaaaacaggcagaaaagaggtggctctttgattccaaaaaaacctacctcccttcccaagaaaagctatgaatatttctccctttcctctgtatacccagccccttcattaagaatcctcagttctcaggctctgagaagttgatttgcaggctatgctcccacttctgcaattccatggccattgaaaaaagcccacactgtttgatactcactctcggtttggtgtattggcttcacaccaaacaagaaagagctcctttaggggtagtcaggaccctgattatattcccacatagaaactgttcccactcactactggcacagcagaacacataaactgtcagatggctccatttcaatgatttgacttgtaattctcaattgtttctgttcctaagattttaggactttctatcaactcataaaaaaaatctttaaaaaggtaaggcaaccttcaaatctaagatgctcagctttaaactagtaagttcttaaggatgttttttttccttcaaggaaactattctcctctttgctgagcaataatacaggttttaatattaaataagtacacaaagtaaaagaaacagacaaaaatgtcttcatagcaaggctgttaacagatttctttcttttttttttatttttgagatggggtctcactctgttgcccaggcgggagtgcagtggcacaatctcagctcactgcaacctctgcctcctcagttcaagtgattctcctgcctcagcctcccaagttgctgggatcacaggtgcctgccatcacgcccggctaatttttttgtatttttagtagagacggggttttgccatgttggccaggctggtctcaaactgctgacctcaggtgatccgcccaccttggcctcccaaagtgctgggattacaggcatgagccaccgtgcctggccagatttctaatatacgtaaagaaaaaagaaaaattttcaaatatttgtttagataagtactgatatttaaaaaaacaaccaagcctaaatccctagatttacaatttttaaaaaataagaaaagcaatgtaattcacagaataaaatcttttggagtaaagtaatataactctaacaaattggtaaatctaggcaagaaatgacttgcccaagtaacagacctagtaggtggagagttcatctgactccagaaaccacactctacaaaataaacttattgacgtgaagaatgtatataatctgtaactggtgtgaaactgtggcagaaatacaaagagccgtggtcttgctcatgatgttcaaaggcaatatttgaactgagggatggctgtgtgaattgaagtggtcactggagaaacgtgtttgagattgtgaaccatggggaacagggggtggtaattctggattttcggcatagaggagaaagaaagaactgcaaacatcattacagtgaaggagggtgaggccctccgaaaactgattgcgtttcaccagaaacactgatccagtgggggcagctgaagcacgaaaatgattagaaccagagtgatgtcacccacttttctttctttctttctttttcttctttttttttgagacagagtctcgcagtctcgctctgtctcccaggctggagtgcagtggcgcgatctcggctcactgccagctccgcctcctggggtcacgtcattctcctgcctcaggctcccgagtagctgggaccacaggcgcccccaccatgtccggctaatttttttgtatttttagtagagagggggtttcaccgtgttagccaggatggtctcgatcccctgatctcgtgatctgcccgcctcgacctcccaaggtgctgagattacaggcgtgagccaccgtgcctggccgatgtcacccacgtttcttaggaa
